United States Patent Application Publication US 2007/0237770 A1 - sequence listing, part 7

SEQ ID NO: 631 - DNA, 30191 bp, Mus musculus
  misc_feature (1)...(30191): n = A,T,C or G
ctgttatctcttcatctagatccaggccagttctttatctcagtggcctccagggtcctgaacctctgcctctgcagctcaagtctgacctggggtttgactctgtagcagagtctctatcagacctctgacagggttaatcgtgggacacacccctcccctactcgttttgcttccctatcatctggttctctttggaactctttaaagtactgtgatgcctctttaaccctttttaacagttctgtaatacacacacacacacacacacacacacacagagaatgagagagagagagagagagagagagagagagagagagagagagagagagagagagaacattttactatgcagtgtgtgatctgagaacgaacattaatagttgtacaagctggagttatcacagagaaaggagcctcccttgaggaaatgcctccatgagatccagctgtaatgcattttctcagttagtaatcagtgggggaggacccagaccattgtgggtggtgtcatcccagggctgctggccctgggttctattataaagcaggcttatcaagtcaggagtcaacacccctccatggactctgcatcagctcctgcctccaagttcctggcccgtgtgagttcttgtcctgacgtcctttggtgatgaacagcaatatggaagtataagcttgaatatacccctttctccccaacttgtttcttgattacgttttgtgcaggaatagaaaccctaagataatagttaaggcccaaataagagaacatatgttttctttggccaaggaaatcaggacaacttggcaaattgctgccaacaaaatcaatatcccacataatcatttgttgagattcaatacattttgacattggaaagacacagctctctcgtgacagtatttcaccatgagtagactacaatataattttttttctactgttgatatacatttgggaaatgttacagataatgctgttatgggcattcttgtgcatatatcttggccaacatttataagaatttcagctgggggtatatccgagaagttgaatttctgaccccatgtcaatagaaatagacccttccagtcagcccactgaagtggaaacttctcatttctttgggaaattagttatgccaaatgatgtttggctggagcacacagttgaaggggatgtcttgctaaagcagacatgggaaagaatgtttggatatagtaaacacatgaaaggacccatgatgaaggagtataaatatgaccggacagacagtgggagatgagcactgagccttggtttggtttgttctgcctcgttactctttgctaataacacacatgtattggtcctccttacatagaattgttgagctcaacttgtggtaatgcaaccattgagagacacttgcctaagaactgcttgtaaggttcctgtgccagtttgccacttctgaggccttgccgcgggccagttggcgaacctggcaagtttcttcgggattgaattacagctgcctggtgtctgcctgccagactgggctgtagctgctgattcatatgtggtgtttgctacaggactgcactgctgccaaagaagatcgagcctgcccccaaagaactattgctgaacaaatccactacccccatatcctaataacttttctcttccactacctctgctgggtggtggtcaaaaggagaggtcgaacccttattaaaactaggtttcaaaaaaatgtatgcttacaacctactcagtctccctgcagattatgcaagcttctgctttctccctacccttagccttgtcaggcttttaaacacatttcagcaatttctgaagtgaggttaatttgcatcttgagaatggtcatcacgtttagcgacttagcacggggcatacacaccttagaactcctagcagggaaatgtgttagcccgcacaggctgggttagcttccttctgccccagcttgcttctacaccttttcttcccagagtgttgatgtattctgggtgctctgcaggtcaaactctgcaccagttcctttgggtccagctagcaacagttaattcctacaatcatttcttcctcttaactgctgtcatttataaagtccttttaacttctgaactccgttaaccacacacatttggttcacataatgctgtgttagcaaggttgatttaagtctgataaatgccatcatttgacctgctcgctaaaattatgatttactacgtctttcatatattattattttcacatagtgtgtctgataattctaagatacattatccctcgttgtttttctttacaaaaaagtttcttgattaaactagaattctagatggattttagaaagagacttctgttacagtcctgtagggattttggctggaagctctgactcactagactaagcgagaacagaccatttaaccttatttgcttgcttaagaataaggaatgcttttaatgtttttaatgactcttatctttcccacgacattgtctcatagtttattgccagtgtgttggaaaggtgttgattttatgtttgtcttgagtctagtcactttatggaatttgcttagatttaatagcctttcagtcagcaacttagcttttctaggcattgcacgagtgtgtcaggaagttttactgtcagtcttgccagtatttatgattagttttctgagtctatcctacagatagcctttccctcctccctccctccctgaggaactcggacacagagccatgccaataccagttaactcctttatcactggctacatttccagcccttgatgtttctttaaaaaaaaaaaaaatcagaatagtctattgcttctaggagtcaaaaatcccttcttgacaacatccatttacctcctcaaatgaacatgcctgtctcacacattggttcttaatattctcttcagcttattgctgtccctcaaaatccatcaggtgtccttgctgattaattcatcttccaggtttccacttaagaaaattacctcctctgtgaagcccttcctcagatagatctacattcctccttccatgcatttttttattctctacatttttcacattacaataatctattacattacacattgttggtttgcttatttatgaattaattaaaaatgtctccaaggatagaaataatgtttgctgataacacttggtttcttagttcctatcatgtgcttcaggtgtggttggtgctctctctctctctcttctctctctctctctatcttatctatctctcacacacacacactcctctcctctctctatatattatatatataatttttttggttacagggatggaacccagaacctcacaaacactaaggaaaggttctaccactgatctgcaactccaggcctcacttaaacgtaattcataaccacataagtagtggaatttatgtaaagatattttgacataagtactcttcaatggcatattaaaaaaatcactgtgctggtgttgagaaagactggcctcgattagggtgagattatttcatcattttatcttgagaaactgatagctttcttttgatgttaaacaatattatcacagtattaaaatgctgaataggccactgctctgaagtctagttgaatttgttttgtttgtttgttttttgagaccatgtttccctgtgtagccttggctgtcctgaatctctgtagaccaggctggcttgaactcacagagatctacctgcctctgcctcctgagtgctgggattataggtgtgtgccaccgatacctggctgattgaaacatcttttagtttaatattttattgttcattttttcttttgagctaaaataatcaaacaacaaaatgattaattcttaagtatgtataagccagttttcaaacaaattgtttaacaactttctttaagcaataacaactgtttgatagggaggttagatttttctcctgaaataaatacacaaacattaaagtagagaatgatcttcagcattctccccgtgtcagcacacaatcgttcctgcaggcctcaaagattctttcctttaatcctcccagctagcctagttactatgaagtgagttcccaaagacgctggttccatcctggacacccacatggaagcccacaactttctctaactccagctctgtgggatctgatgccctcttctggcttccaaaggcacaaggcacatgtgtggtccacagacatacaggaacgcaaaataaccacgtactttttaaaaagaaaaaaaaaaaaaaaggaaggaaggaaggaaggaaagaaggaaggaaggaagttttgtcccttccaatgaggaccgtatcttctttttgaaggaggtaggggttcattgtgtactccaggttggaactcactatgtagcctgtgctggactctatctgggacatccacttatcttagtgctgggattatatgcatgaaccgctgtgcctggcttacaagaaaaactgggccaagtcttccggaaccatgggttggggcttgcaggtggaagtgggttcggcagctggatctccgactctgagattatctaggagaaagcgggactctgctgggagtccaggatggattatccattgctcctttctccctctgtcctggtctaccctgaccagcaggacacacatgcactgtgctgtgctctgcaatcgagtgcttttcctcccatgcccagttacccaaagtaactctgagactgaattctatatgaataaatccctcagccaataggtttggctctgttccttgattagctctccttcagtttcatgcatctgtccccatcagtgttctggggtgaatcctccccatgcctgactctatcccaccctctctctctctgccaaatgtcccaccttctagtcctgcctcagctcattggccaccggcttttttattgacaggtgaagcttctacacagtgcattagagattctctctacatttccctcttgtggtccagtaaaaggttctttctcttataataataaactacatacgataatagcaattatgagacctatcaggtaagatttacattcacaatgtccagtccctttgtatttggcacccataaatgaaaagaccaaaataggtaacttgtaaacagctctgagaccgagacataaaaatgtctgcggccacaacttcgctatgcgtggccaatagatcttgttagccacaagatcctcaagtcttatcacgcctttctttcaaatggcaaagttagaaattaaattttagcatgatcatacaatcctagctaacttataaagaaagatagatgacttaccagcttgaaaaaaagcaaaaactcatctttagctaaactatgcacactgcacattccatacttatgttaatgcagaaatgtataacacttctcaaagtttatatgttcataggaaaacaaaacaaaacaaaacaacaacccaaaaagcatccctgacaggattcagcttgaggatgctgagaatatactcagacatattcattccagcatcctgtttgatactcagatctcctccatatggaggtggaccggacagacagcattcctaccttccaggaactcccagtccagcagcggacaatggagatgttactaagtaaatacatactgttattgcagggtgtggtgatagttatgaaagaaataatcttgtctgataaagggaatcagagaaatcctctcaggagtggtgtaaggtagggctttgaaaagttggttggtttgtttggacagtgtctcactatgtactcacagagaaccacttgcctctgcctcccaagtggaataattaaagacatttgccactatgcttgatccaatgtagggcatcttaaactgctttctattcagcgccccttttcacctgagaattttgtacataactcagacatatcgttatataaaggcaggtatagaaataagatttttactgctgataaatcataaagtataaacttgtgtgtgagtgcgtgtgtgtgtttctgtgtgtgtgtgtatgcgtgtgtatgtgtgtgtgtgcatgtgtgtgtgtgtatatgtgtgtgtatgtgtgtgtgtgcatgtgtatgtgtgtgtgcatgtgtatgtgtgtgtgtgtgtgtatgtgtgtgtatgtgtgtgtgtgtgagtgcgtgtgtgtgtgtatgtgtgtgtatgcgtgtgtatgtgtgtgtgtgcatgtgtgtgtgtgtgcatgtgtatgtgtgtgtgtgtgtatgcgtgtgtatgtgtgtgtgtgtgagtgcgtgtgtgtgtgtatgtgtgtgtgtatgcgtgtgtatgtgtgtgtgtgcatgtgtgtgtgtatgcgtgtgtatgtgtgtgtgtgtgtatgcgtgtgtatgtgtgtgtgtgtatgcgtgtgtatgtgtgtgtgtgtgagtgtgtgtgtgtatgtgtgtgtatgnnnnnnnnnnnnnnnnnnnnaaccacaaccagctttcaactcctaattttgaatgagaacagttgaaatctaaaagtggaggtgaaagacccacggacacttgactggctggtgtcagacttgcgtttgggactccaagtttgtctgtgtgaaccttttccttaatgcagtttctgatgacgagcagttgctagaagacaggcattcaaactatttatcaatagtttttaaaaagtgagaacccgcccttcctccatttaaacgtgtcctacttagctttcccactcgcttgaaattcttctaaactcaggctgaaaagcagagcaacttggacagaagcctgttgacatgactctgagccaggtgtggcaatcagagtgacacagattggctacctgagggaaacgtggccttgctcagagtgcagggtcacattctgctgtgttgccttacaagttggctgaatgtagggagaccggccttcagacaagaagtggaggtgggctttagctgacataccttttaaccacacttgctcacacgattgacacacagccctgaagaaagctactccagttatgtaacaaagcccaaaaaggccagatatcaccaattaataccggcaaatccttacaaggtaccatctttgtaacaacagaagtatacattggaaggatctgagttggaataggacatactaagatcaagttctaaacataaaggagctttatctgccccagagggacaaacagcaggggatgagagacaaagacaggaaacgggacatggggaaaagggaaaaagaacaggtgtgggaggatatatttgccctggagggaaacggacagcctctggatagagacagaagtggctcatgggaaaatggcaatttataaaggaaaaggggaaaccacaagtcacaatgagttggtttgttttgattggacatgttaattagggtagccaaaagggagcttttgattgctggatgccaataatttgatatctagaccttggtgatcagcctcagggggaggaaatagccaaattagggaattcatcttggtggctagctttaagaaagtaatctactgagcccttcatataccagaggccgagtcacaaagacctgcaaagactctgcaaagatgtgactgtccaaaaagatgaacagcatgagtctgtcagcaaagcagacacagtccttttgtgcagttgagcaggactccaggacctgagaccagagggacagcattagacagagacagcattgcttttgaagctctaacaagatggagcctgaacgggaggacaggcttccccttaaagcctggagaggaacttcacttagggtgtgagtaagggctggagagatggctcagcaggtaagagtgctggctgcctgctcttccacaggtcctgagttctattctcaccaaccacatggtagcccacaaccgtctgtaatgggatctgatgccctcttctggcacacagatgtacatgcagatagagcactcatacataaaataaatcataaaaaacaacaacaacaacaaaaaagaatgtgtgtagtacaaacagtttaagcttatctctgactagcttacaaataaatgagactcaggctatggctattttatttggctttgatgaatactgggggtgacccctaatctactcttctaactacaggcctggcttcctctctattggtgtaccccagacacttgctgtttctcctgaccatgtgctcatggtacctcctcctcctcttcttcctctttctctactcctcctcctgctcttcctcttcctcctcatcttctttctcctcttcttcttcctcctcctcctcctctttcattcttcctctttccccgtctcacctacctctaatccttccaatgactggctgcagccaattttatttaaccaatagatgtaaatcaaggaacaaggtctgtacaacaaaagcttgtaagcatgagaagtcactaatagggctagactttctcatatagaacctagcattacaatacatagcaaaagaccaaacctcaacacacgtgaatgggagagagagagagagagagagagagagagagagagagaggcagagacagagagagagacagagagagagacagagagagagacagagagacagacagagatcaggagaaagacagagtagtgggccagattggggtggggggctagctagaggcagacctcagaatatctttccagaaatctcctttaggagtcttacaccagtccctagaatagaggctaagcctgatttttatatcattttagaggtgtcaggaagtttcacatcccatgatttagttcatcctggcctacatgacagggagctgggtgccacagactaagaggagctgccaaggagctgaaggggtctgcaaccctataggtggaacaacaacatgaactaaccagtacccccagagatcgtgtctctagctgcatatgtagcagaagatggcctagtcgtccatcattgggaagagagggcccttggtcttgcaaactttatatgccccagtacaggggaacaccagggccaagaagtaggagtgggtgggtaggggagggggggtacaggggactttcgggatagcatttgaaatgtaaatgaagaaaatacctaatatttttttaagaaagaaaaaagagtagctgctaagcacggactgcttcataactctgttaggaagagagagagctgcagagaggtgtggcctgattcagactataggatgggtggggcttaaaagattctaacagtggccacagttttaaaacgacgcaaacacgtttgcatacattttctaactccctagggtagcagaatgaaaatcctccacgggcttggaggatctgccagaataaatgcatgaaaccacgaatttaaccgagctagatgacttgacaggtctcaaatggacaaggtcaaagtcttgagtgggataccgaaaactaacaaagtggctttatctgaagactcttctgggccaggaatttttaagttcctgcatgtcggtatttctgtactgtactacatataggcttgcttgctaacagtcagtaaacagaaaagagcacacagaaaactcacgttctcttagatgccaggcaagcatactcaaagacattaaaaaggaggtgtgtgcgtgcatgcaggcagcttttttctagcactgtgacttaggaagttgcttaatttcttctagacctcatttatctgtctgtaaatcaaacaagcaaaacaaatatctctttagggcaaattcgcactcttcacagagcagatcacaggacacggtgaacagaccatatgcttctggaaactgggttgcactggagccacgccccctcttgcctgctcatctctgattggctttctcggaggggcggaacaacgggcaggcaatagttaccccggcagagtttggtcggtgggcagggactccgcagtcagcgtcatggctgcccgtgctcctgagctcgcgcgttccctgcttgctgcccttctggcgcccgcgctggtggcactactggtgtcgccggcctcgggtcgcggaggccgggaccacggggactgggacgtggacaggcgattgcctccgctgccaccccgcgaagacgggccgcgcgtggcccgcttcgtgactcacgtctcagactggggctcgctggccactatctccacaataaaggaggtgcgcggctggcccttcgcggacatcatctcaatcagtgacggtcctccgggagaaggcacgggcgagccctacatgtacctgagtccactgcagcaagccgtgagcgacctgcaggtgagcgggagcgcggcgcggtttcccagacccggcagagcaggaaaccagcgtctccagtttagctcgctggggagagcgtgggtcttagagataagacttttgaacccagctcacatgactgtctcttctggcctgcgctggctaggcggaggttgtagcatcccagatgttggggaactaccaggaagttcctacttaccctgttactggtctaagcgcttggggtaaattctttgccagtacctggagcacttcacacccttcagatagtcaggcgtcctctttaggcgctgtctctgcataaactgcactcttgtgatctaaaggcatacagattgttggatagtttagcgtttggcttatgtgacttcggagattctcttccctacctttacctatcagcagtgggaaactactacacagcattatagttgactgcggacctggctctgcttacagctcaggtggaaacagcctgggagggaaaggccacacaggagcccagaaatgaagcctgactcggtggagggtctgtggcaaaactgagaaagcttggtgtcgtggtaaacagtgagccaagagacgccgacgctttaaccaagcccttgccatggtatgtgcctagggcttttcggttccacctgttttcattcattgtctcttgtagtaactcttagaaacaggcatggctattccgggtttacagatgaagacatgaggttaagtaatttgcgcaaagccagggggccaaccctagttcacctcagacccacttgtcttcaaagcacaggccacaggactgggacccatgtgctagaatagaagagacccgttttcttcagcctccacagagttctgtattgttctaaacaaatttaaattagctactgccttttaaaactgcaatcctaggggctagggaaatagcccagttggtaaaatacttgccatgtaggcgcgaggacctgtatttggtcctcagtacccatcttgacggcttgcacgcacatgtgatcctacactggctcaacggcttgcacacacgtgtgatcttgcactggccaggcggctagctccctggcctgccagccaagcggagtcagtgagcttcagaccgcagggagagagagcctggctcaaaaagccagttggatggctccagcttctgaggagtgacctccaaaactgacctctggccacaccatacactcattaatacccaatgcacctgtggtgcacctgcactctgcatgcgcacacgcgcgcgcgcacacacacacacacacacacacacacacacgcaggataaaattttagagaacaaagtctattgatttgctctttaagtttctaactcttcttgaaaaggttaaagacctagcagcactgggagtgggggtggggctatatttttctgagagacaaaagtaatagaagccgctgtccctcccagccagatatattgaccccaactcgccctttttttttaaccagcccgtttcacttctctagaatctgctattcacccgttctctctaccccagaggtggcactcaagtgacctgcgtagcacttgcagagaagttttaaaatgcactaccaagccactttattctagaacaatgccccctactccctcaaaccctcactggtgatcctaataggaaggggacagactgagcctcgccccgacccatgatcttattactatctgtgaggtatctggggtgtcattatccacactgccgaaatggggagcactgaggcttagagatgggggctcacccgtgaccacctagctgatggccaacaggtaggcctccagtgaagtatttcctggtagaagagaggcagattcgaggagcctccccaggctctcgggtttctgggatggtattattgaaaagacgtgtggacacgttgggaatgtcagcctttgtctggatactgactcggccaattaaccagccgaaactggttcctattacgcgtttcctcttccagcaaccaagagtctcttcatgaggctagaaagagccaggctgaggcttgagaccacttgcccggtgtaaaatgccggccatctccctcacagacaaggggcggcttgggtgtgtgtcccgtaagggtgtccctcttgtctagttgttttggtgtgtgatatttttgtataatgaatctttagaggaagaatctgtttctgctggttggtaatatggtaccaagttatgttgtagagccagcaagtccacagtaaaattggcagggtgcttacctaggctgtgggaagccctgcgttgtatcctggggcttggtgataaggccctaaatatacagtctcaggatttggaggcgggggcagaaggatcttcagctcaaggttagttttctctgttatctggtggtttccgacctggctggactgtctaatgtcctctctcaaagcaaacaaaatccttttacctctccgtccttcttggcgctgctctcttgtgatctgaccaggttactcctgatttctcttcccctttgacccattaaaaacaagtcaactttgttatgtgcacagtcatggttctcctttcagttaggatttacttccgcattggggtgcctgttgggtctcctcagagtcttgtatttctttctttttaaagatttatttatttattttatatatatgactacactgtggctgtcttcagacacaccagaagagagcatcgaatcccattacagatggttgtgagtcaccatgtggttgctgggattgaactcaggacctctggaagagcagtcactgttcttaactgctgagccatctctccagccccgagtcttgtatttctgatggccttcattaagtatctgtccagtgaaagtcccattttcctcttgttcttggaaacccatagcccctgaccggcagcatcctggattgtggaattattttcacattagaattcccattgcctctccacatctccgtctttcttctgctgtctttgttatcatccctgctccctcctcttcagtcacaccatgcttaggctaagtcctcgacacctcatgctagaaagtgctcatacaacttttaaattatctgtctgaaccatcctgctcaccagaacttataataacaaaaatacaggttgccctctgcacagaggacttaaacactcctgctcctcctcctcctgctccagctcctgctcctcctcctgcttctcctcctgcttcagctccagctcctgctcctcctcctgctcctgcttctcctcctgcttcagctccagctcctgctcttcctcctgctcctgcttctcctcctgctcctgcttctcctcctgctcctgcttctcctcctcctcctgctcctcctcctgctcctgctccagctcctgctcttcctcctgctcctgcttctcctcctgctcctgcttttcctcctgctcctgcttctcctcctgctcctgcttctcctcctcctcctgctcctgctcctcctcctgctcctgctccagctcctgctcttcctcctgctccagctcctgctcttcctcttgttcctgctcctcctcctgctccagctcctgctcctcctcctgctcctgcttctcctcctactcctactcctgctccagctcctgctcctgcttctcttcctgctcctgctcctgctcttcctcctgctcctcctcctgctcctcctgctcctcctcctcctcctcctcctgctcctcctgctcctgctcctgctcttcctcctgctcctgctcctcctcctgctcctgctcctcctgctcttcctcctgctcctgctcctgctcctcctcctgctcctgctcctcctgctcctgctcttcctcctgctcctgctcctcctcctgctcctgctcctgctcctcctgctcctgctcttcctcctgctcctgctcttcctcctgctcctcctgctcctcctgctcctgctcctcctcctgctcctgctcctgctcttcctcctgctcctgctcctgctcctcctgctcctgctcctcctcctgctcctgctcctgctcctgctcttcctcctgctcctgctcctgctcctcctgctcctgctcctcctcctgctcctgctcttcctcctgctcctgctcctcctgctcctgctcctcctcttgctcctgctcctgcttctgccgagcttcaaaccctggtgtcaggtctgaggagatgggtcatcaggaaaagagcttgccatgcaagtatcaagggttttgatccctagcacccacgtagaaaatcagctgaacttcctgtactcccactgcttggcaaatggaatcccctggggcaagttaaggagttcctggttcatccacacttgtgtatctgcccacatacatgggaacacacacacaaacacacacacacacacacacacacacacacacacacacactcacactcacacacacaggtgcacaagtagtaaaataagtaaaaccttgggtacagattggtgcggggactcagcattttaacagactcggtatgggattctagaaagcactgcttgggtattgcctgcagagttcacagtagggaaacctcacccaaggctccctcttgttttcctccttggggaggttgaggcgggagggttcctcttcttacctaacagcttgcagacagcaaattccttagctggagtgaaggtgtgtacttcttacctagcagcatgcccagcaagatcgtctttatttttgattatgtgtgtgtgtgtggctatctctgtgtatgtattgatgtgagtgtgtgggggccctcaaaggccagatattggatcctttggagctgaacttacttaaaagtgaccgtgagccactgggcgtgggttctggaaggggagcgtgggcctttggaagagcagtcacactcctccctgctgagcccctcccctccccgcttccctgagcagctctgagactcagtgggtttgatgggccattgtgagatgggcgcatgcagttgtgagtgtgcagtagtctggaacaatggtgggtgctggagagaaaccaaccaggaatctttttgccttgggtttggaatctgaggtaaaaattttcatgtgacagaaagagtaagcaacttgagaccacgtgacaatttctgcagccaagtgatagccactcagcatgattcagctactttcttgtttaaattgtgcaattaggccgtgcgagcacctgtggtcattttatgcagtttttcttttttcttttttcttttaattagagcttaatcttgtagatattccagccctagtttagggggtactttatttataattctgataagtatggaactgataggactagctatgctaaaacatcctctacagtttgttaatttaaaacatgacacctctccacacacactttgtggggatgggacaggtttttacccatgggtcaccccacccccaccccagtgggttacagttcactgtttcatggaagtgagctgcagtcagttccaggggatagtttgactgcgggctgtaaagtgtgtacctctccagaaactgtattttacaatgaaggatttttatttttctctcttcaggaaaatccagaggctacgctgactatgtctttagcacagactgtctactgtaggaatcatggatttgatccccagagtcccctgtgtgttcatataatgatgtcgggaactgtgaccaaggtaagttccacgaagagagatgggcttaaaagaatgtggtggcattaaaaaccaagggaggggtctttggagaataaaacgcaattgatttgtgagtgggcagatggtaagaatatgtcctaacacagatttcaacaactaaaggccctgaccagggtctgtcatataggtgtgtccagtagggtacttatggggcaaaggacccttgtcctggagccaaatagatgtaacatctggaaggctccttataaaacactctggctaaaaacagctgctcattccgaaccattgctctctagtttcagggggctccttgtcctcgtgcctctgcctcccaagtgctacttctaagcacttttgcccttcttgcacatgcattgaatagagtaggtgtgagggcactttcaggcctgggtgacagccagtgcttctgggccatggacagtgctagcttggaatgactgttgaacagccaagctccacccccatcatggttcctgctttatttgtgtgtgtcattacaagtttgaaagggcacgtttctctgttttctttaggcttcctgtacgctcttgactcttaagatcagaatttgcaacggaacgaggtgccaggcagtttgtggtgtgagaaccaccccttcttagtaagataaaagtgtccttagaacggcctgtttatctcctgtttgtccttcaggtgaacaagacagaagaggactatgcaagggattcgctgtttgttcgacaccctgagatgaagcactggccttccagccataactggttctttgctaaattaaaaataagccgtatctgggtcttggactactttggtggacctaaagtagtgacacctgaagaatattttaacgtcacgctgcagtaagtaattatacattttccaccattgccggactgtagctcttcccagcacccccaaggctgagcctgctaggaccacctctcaaaattacaaaacacatgggattacaaagacactaggcataggaacacacacctttaatccctctcatcagtgtcagatgcagaattagtaaactcacctgtaaccctagaccttgggagacaagggcaagaggattagcaattcaaggccagcctggaaggctgaaaatcagctcaagttacatgaaactgtgtttgaaacaaaaacaagcccaacaagggggacctagtaacgggcctgtagctctcagcgtagtgaagcctagggtctatattttatgacattttctacacccacaactataacacaattggaagggatctgtggcctgcagaggtaatggagttgattccaaaggggctactggagagaaaggaaaagagtacgggaggtttaagttcaagtttagcagttgggccctggggtttgggtgtgaatctcagcattgcaaaacaataataaaattactaagggctggagacatagctcagcccaagggcctgggtttggtccccagtacatctagtctggaagtagaaaagaacagtatctaaagatggcctgggccgggaagaagggagtggtcagatgtggagtgaggtcaaatgaggtcaagggtcagaggacagaatgggagggactagagtgttccctaagtgacactggattttgcaatataggacatctatctacaagcccaagaggtgctacagcagctagagtctgttgagcgtgttttgctggtctgtgctatcctaatcgcttcctgttcgtagctgaaattctcaccacacccctgtgaagcgagtgctgattgctaggctgtaaaacaagggccggcctgggaaagggggcgcttgcataacgcctttcagccagcaggtggcagtgctgggattcaaacgctgggcgtcctagccctgagccctcttctgacccctaaccccgtgctggacgccaggttcatcttttagttcacttcctgtttgcaatgactgacaactctgtggagagatgggggaggatagtaggacttataagtcaagacggaatgagtatgggcgcagtaaagaaaccaaagtagccgatctgtgggtgaaaagagaaaactgtattccaataaacagccaaggctgtcgcctgggaaagcagggaaggatttccagggttagacgagaacaagagaacggggtgggggtggggtgggggtggagtgggggtgggggtgggggaagactcgagagctgggtgggatctgtgagccaggactgagggtgcccagaggctagcaccgaccttgacaagttcttaggtgccccagcgtatgctaatggagacacacttgttccttttgccagagataaggagaaagcaagcaggaactttcttcaagtcccaagggaatggcggcttttgtccaaacgcccaaccttgggaaaaggttatttctttgtgggaccaaggaatcttcagtcccggaccttaaattcttagtgcttatgtgttctttgttttcatgctattagagaacagctcatattaagctatgtaaccccctaaccaccaccaccccgctccctgccgtaaatgtacattttaacagcaaactcggggttgttggtatttctgtattccgagcagggtcgagggtggtgcatggcccatggtaggtgttttgggggcagttgcatatagccagctgatggaaacacagactttcaaattgtctaaagaatccagttgtcccagtattgattttgtggccgtgtgcgtgggaggagaggcgcaggctgctgaccctcccggggctgaccgagcctcctccttgataggatttaggaggtagcgattgtcagattattaccagcaagcgcgttatggaggagagtggcagtaagaatgatgggctgttctgtgaggtcagagtttaccttcccaggacatcacaatctccgaagagcagttatctctgtgtaaataacacgccctgggcagtgcttactttaataacaaaataaaattatgatttcccataagtctttgctctgagtgtgtaaaatagaggctcccgttctgttatgtagccgggtaagtgcttttctgcagctcaaagataaggcagagagcctttgctctgattgggggtggggggagtgcagggggagagtgcaggaggtgggagtgcggggtggggaggatgaaagaccagggcaaggcatcccaccacagtggcagagtaccagggaaggaggctcctgtccccaagtacctctggccactcattgccacttcagagtctatgaagactggggtctgcacattgtcgggaaccaccaatggggtctttgtggtatcctaggctttccccaggtcaccttgccaggcttgcccacatggaccacagaagatactgtttctctaattagcacagtgccttctgtagctaatggccaggacactgaaatgatcccaagaaagcatccacacggggaccgctcagtcagggctgccgtgagacctaattaagtgctttgtgttaattcactgggttgccggacccagcccgtgtgcgcttttgcacgtggagtgaaagtgtgagcatcctcttggtgtgtttgttgacttcctggatgcagccatgatcagagtaggcgttacttcctatcaccatggagcctggacagcagcaggcctggtccagggctcactgtatcactcacacgaatcctaccaagacagacacggaaaaaggtccccagtctctcacttgaacccttacctgggtgtagatttcctggttgaatggtaatcccagctgggaattaacttaaaatagtaaacgtttcggggctgtgtttctctcgtcttctcggagaatgaatgaccctttaagtctggccagtccagctcatgagataacggtctctctttccctctctaggtgaagcaggatatggtggactgagtcacaccagagaagtgtcttcggaggctcatgcacacttgaagggttggccctgcttgggacgtctccagctgtcagcttactctgccacctcttgttttaatcttgtttgcttgtgttaacagagagttgtccgtcagaagatgtggttgctggatttttaaaaaagaaaaaaaaatgtattttgaagccattttcagagaaaaatgccattcattataaccaaggaagttttctttcagccattcccggtggcttttcctcagtggtgcccacagaagggcaacatagaccagctgtagatcgcccattggctctggaggaagagaggtgcaggtgctttgtgcccgacggccactgtgcctgaggggtgctgtcctcacacagctgcctcaggagtctgtcagaggggcctagagtcgggaggcctgggcagggcgtgggtcccggatacagagtgcttgaatgaatccttcagtcgaggacagcaatggccacacacggagcttcccactcacgtccacccgtacagctgatccatcacaaggcaaaactgggtcctctataaaactccataaacatcatacatcctaaagtcatagttacccaggacaaaataagacaaaaagattttcctgtattcattttccacccaagtagactgtatatttatttctcatccttcaaaacacacacacacacaggagctggggtgcagctttcttggtagagcgattgtctagtatgagaccatagctctcttccccagcattgaaacaaaaacaaccagcaataacatttttatttgcatgagaaaggaaccgcaggaattttacatatgttgggttcctttttttgacccaacaccaaccataaccccagcccttctcgggcactctgtatctccaggctcctggcactgcagcccggagtcctccatgggagataaccacggtaccacggcatagaaacaaactacaacaacaacacaacatgcttctggcctagagggttggctcagcacttaagaagattgctctagcagggacccaagttcaggacctggcgctggagtcagacaggcacactggccatcactccagttccaggaaatcatatacctctagtctccaaggtcacctgcactcaagtgcacgtacccacgcagacacacaccgacacataattgtaaaccatgcatcttttcttcagaagaggtactacttagttttactacgtgtattcatgctcttggatgacgtaagagtccttttaattgagtgtgcgtatcagacttcttaaacagcaaaagagttgaacatgagccatcatgttggagaaagagatagaaatccagcaagtgacttctcagtaaaaacccactaagcagcaagaatccagtttttttcaaatcaataattaaaagcataattctaacaaagtgtgttggactgatttctgtgatttcagagacatagatgttgatcagaaagcttcattcattgtgcactgctcagtcaatgttcttatttaaccacactttaaatcagccactgatcgttccagaatccgagaagaatcatatacgttccccggtggcagagaactcacgtcccagcatttgggcagtgtctccatgcaggcttagtcacaggcccttgtgttccagcatgcatcgtagaactggcttgagggtgttctgtcttaagcacttggcaccagggaaaaactatccacattcagatcaaattcaattatcctacggggcgaaacagccaattctttacagcaggcgctgcacattcctttataattgaatttgcagtctgtcacggtagcattctggatgtccacaagggggtgcaatagactaccgttaaagcagatccaggttgcggtttggttttcggtggtttggttttgtttcccctctctcttagagtttatagacagtagcctaaggtatcttcaacctgcaattctcctgcctcagctgggatgatcaacgcacgccatcatccccaacccccaccgaacagtgcccctttctcacataggccaatgtccaatgtgaccatgatggtgacattaatataggcaattcagcagggaagagatgagatgaaggcctagtgtcacactgccactggcaggttcaaggctcggtcacttcctttacaccatggactttgcttcagaccctgggtctcacacctcacctgctgcaggtagagagagattgaaccagggtcttagctgggtaagttggttgcatttagcagatgtttccctggccaaaccacgaccaacaatcggttaatctgtcttctagcccaggttcaaagtccttgggattacgtccgggtggggatccattatgaacggaggcgcgattcagtgaaacaggaccattctgactggagattgccgggatcatgtgcctttcttagtagtattcagacagaatcgcaaggtaattgaagactacttttctataatggcgcattcatgagctgtttcagtgctgagaaaataatactctgtgggagtttattggccagtatttttgtggtgttttccaaactcttcaaaacagatgggctgtattttcatctgagaagacaaatgataagtttagaaaagaatatgaagcaatcgtttttttccctttgtgttgtagggtgcatacatgatagagagagggggaaaggaaagggtacatagggggagaaggaagggagagagagagagagagagagagagagagagagagaatcaagacccgatgcctacagttaccctagctgctagcattttgtagttcttcccaatctttgatgacttgcttaaatgtggtcaggattgctgggtactgaggctgagtgctagggcttcgcctccatcttgagttccttatgttcctaggagttgtttgcgaggataattgagtaaaaaggcaaaggacctatgtgacctgaggagaagccacagtagtcaagggtaacagagtagctgcggaatcttcctcatcccctggctacaaaataaccatctgcttgggggtggggctgggggtggggtagggagggtgctgctgtgccgccgtgctgggactctgttgctatcacagggtctcaaatcaaagcaatttaaacaaagtggaggagtttgctcttcctaaaataaaacagtccttctgaacaccctcttctcagccctgcttacctcttccttagttttatctgcagccagcaattctaacaaagaagatggtgcttgctcaagtccggacttactcattcctgaatatgaagtaggtctggaagtgcggtgccctcagtgactgagcccaggtcctgtgtctcattgtcctttccagaagatgggggtgcagcgctctgccctgggaatcacggggacttggagagttttgaagggtactcctgagaggagtcatgataactgatgggtcagactgaacaagcaaaggctgatggggatcgccaccctagtttccttgtcttcctctccttactttctaaacatttaggttatagaatttccaagaatgttgcagattgcttttagagattgatatcaactaacagctccaagacgtcacattgcttattccgtgcagaatctagcagggaaaagcactacggcattatttaaatcagtgagtttaggttctaacatataaaatagtagtttgggccaatgaaatgacgtcagtgcacttggtgctaagcctgatgacctgaatttaatccctgggacccttatgttggcacaaaaactgtcctgtgcccaccatgcaccatggcattcatatacaatgcattcattaaataaatatattaaaagttcttaaggtgttctgccagctgtttttcttctttgtgaattgtcagcttatgctagttgttcagtggtcctgagaatcactttaatttccctcctggtggctctcggggtgggacccagggtccttctcatccaagtatacacccttccacccagcccttggggataatttttaaaaattgattttagtgaatattatgtatttatttcagtaaataatttttgttgtcgacacctggtaagaactgttttccctttaaattgtttttaatatcagtagatttaaatttttccacaaaggaaatttacataattgaatatttccctcttaacatatttatttttcttgaaatttatttctttgcctttgagaactttggtaaatgctagtttgggctttcttccatttttctgtttttttcaccctcaattcttcaatctgcctggaatgcgctttgtgtagaatgttcttctctttcttcatggcaatcccaactcatatttagcttttttaattgatgtgtgagcccgaatctacacacagatctctccacagcagggacagacatttaagttaggcttccccattaaacttgtttgcaatctgtgggcagtctagtccagagaccctctgtaatctgcagcttaggcctttagcactaatattaaccaaaatctcatagattctcatagactcaaactctggagggtgtttataatatgcactcactttacttagctgaagtctccagtccttccacaataaactcttagttggctttcttggcatctatcctatgtgtgtgtggtggcatgcacacagacacacagataaacacctatctgtctgtctatctatctgtctgtctatctatctatctatctatctatctatctatctatctatatcacatacacatgcaagcacacatacactaaatgcaattttaaaaaaataaaagagaaatatttggtggatgattgcagggcaattgaacaaatcagtttcttctgagagtggtagtccaacatgttatatctatgtactgaggtcagttagcacacactccttatttggtcaccaagggtcatctgttaatggtctgcataccctggattcatctttgcctgattttgatcaagctgccatagacagaaacatatttctagccattttaaaaactggaagtcccatctaaaaccacacaggcactctggactgacagagtctgtgttgggtggacatttcctatgctgcatgcttttgaacctgtgcatagaatcctagagaagtccaataagacaggggagccttgggccgagggaggaaggtcctcacatagggccatggtggggcccgtgaaacagcttagcagggcatagctcacctaaggttaggaacatagactgcaggagccccaattcttgaccagatctgggcagacgacatgttgtcttgaatctgtctctttatttctttgagctatgttggtacatctgtaaaggacaatacttcataggacaaggaacaaattagcaaaactcaaatcattttgcaccctgcctgcagttggttgctcttagggataacagagaagaaaccatcatgcattgggagtcccaacagcatcctctctgtgagccttccgaaggcagccttgcagaaggagagttaatttcaaagtcaagtgttctggctctgccatgggcctaggttcaaatgctggtttcagccttagctgggtggttctcattgaacaagtgccatctgatgagggagcaaccgagttttcagccaccaaatggaggataatacaatcccttcctccttatttgtagaaagaatccaagttacccagcacactgaaggctgaggcagaagaatcgtgggttcagggtcagcctggtctacatagtgagagccttccttaaaatagtttatttttctaaactaacacataaaaaacacataggaggctaccttagagagtgaacactcagtaaatactagataggcaagtcctgtttctttacttcatatgccaattgataatgttagtactttttgaagtaagagtcacagcttcaatgcatttaattttatgcgtggtgctctttttctaagtctagttacaagaccaagaaacaggtgaggcacacgtgattttttgattttttttttttaattttatggaagaggttagttacccaaagagctggtttgaggttgtcctcacatttccgtatcagatcctatagttttgattcaagaatgcaacgctagaggtccctgtggatcctttaaagaaatgcattgcctcgtgttttgtttttaaaggtttgtagtgtggaaggaaaacacacacacacagggagggccatgtgtttgaaaaagctaggttttcacaaataggtctttgacatctttgatggtgtgtgtgtgtgtgtgtgtgtgtgtgttgtgttgcgggagggcagggggagataagtcctgtgagctctgaagccagactgtgttcaaatctcaacccaatcgcttagcctgagatcaccagggttaagtccaggattgggctagataatgacttttgttcagttgtcaatcaggttgtgaatggcctgaagtccttacacagaatgtaagaccagcgcagaaccttggaacccgacatctaggaagtgatgcggtagccgtgggagagttccaactgttgtgtgtgctttggtgacacgcaccctcactgtgagtactatggaagaggagcctatagagactcggtctgggattccggggtctgacttgagaggctagactgccaaccctagagcgtgggggagggagggggcggcaaaaaaacaaaaaacaaaaaaacaaaaaacaaaaaacttgggagctgcagtttgacatgatggccgctggaggtcgctgtggagccgcgcgcaggtgctaactggggcggcccttcgaccccctctccccaggatgggagaagttagtcctatcgctagcagtctctctgctctgctggagttgggtccctcttagcgacatctttccgtccctttaaggaaatgaccatcctaaggaaaggccaagtgtatctagcagtatccagaagtggagctctgggattattggcagagcaagcgatctctgctggggacctgtttgtgcggctctccaggaggcaaggctggctcagcaaggacttctagcagcctcctcacaccgcacgggtgagcggatctagtctcccttttggggattgaaaaaaaaagtgacgcacgcgaagtaaaaaactctccagcgtcatgggattgggtagaaccttcagactctgtgcttgattctccatgcaggaagttcacccggtggctcaggtcaaggaaggtgccagctgatggcagtgaaccggccaagaaaaattatcctcagatacagggtccaacccgaaaccagtttgtggaggccagagacttcagccccttcaggggacacgcagaggcctgtagagggagagtgagtttcttggtttgttttgttcaaagtcacacagtaagtaacggatgaggctgggaccagatcccatctctcttaaaaccaataggtctgtggcactagccgagggtaagaccttctgggagaatcagaactgagcatgaaaacaaagccaggccagaggtggggaactgaagagatcccctcctcgcaagatgtggtaactggttcctcaggttccccggggtctcaggcttagagttttctcatctcaatgacttctcctttgcttagctacctctgagcttctgaggctgaaccagtcactgaagccggggctatctgttcataaggaagacgaggcaggcactttgagtcaagaaagaactacaaagaagaggaagtggacaggtccctactccggtgtggtctacgctcccataggacttgtccacaacctccttttttcagtccccccctcatcagagaccgtgcatgtccgttctcagctcccatcatttctagaagattcttgccagagcttcttcgactaagcatttaataatcccctggcatccctttcccagatagtgatgacagttccgacctcccctggagtatgtgaagggagccgactttccacagcatcctcggtatacagacgtatgatgcagaaaaactgccaggaagcaagctgtccattcttcaatacacagctgcgtgggtaaaatggataaaagctacgcaggaagttggacgtggtcagcaagttcgggacaaaaagccagttagtggggtcctttctcacccaagcctgccactctacaccccaagtcttcccgctaccgtgatgcaccaccacccaggacacgtgacttccggtcttgagttggccacttgccagctttgggatagcaggtaaaatttcaatttccttaactataaaatggaacgtgcacatccgcaatggctgtcttcctgggtcatctaaaaagactaaagtgacaacatgtgaaaatgacattcacatggaagacaggacgggctgatttccagttgaaagtgttgggctgccaatcaatcgctcaacttatctcctgatagtcctcgggtgatattatccacaatcctgcttctgtttgctatctttcacaaagattattgaagacatttttgttctatctctttgtgcaatgttctaacattatttcttcctttattatgtttattggtgtgtttggaccttgggtatgcttttcctccacaagatttcacagattttttaaaaaaataatgtgctttaattggtcttttgagagaagggagaactaaaattagcttcggagtaaaatggacccaggtcagtcacagcttccgtgactatgttttcagtgtctgtaacatcaagagcacttcaagtgcaaactgcacattcaaagtcagctttcataaaatggaaaaaacccatggagcggggcccttaaacatggcgcaatccaggctctgaacagttgcattgaaagtctcctacgcatcttttactctgcccacctctgtgttggcttcatctttgggcaaaagtggcgagcatccttcacttggtgtgcccggtgctcacaagggggagaagtttatttttattttttttttaaagatgcacttctctgggagacaagatgctatggtcgtttccaagacggccacaatgcagtgtgtacaacagtgtagctttcctgatggcagaagacctgggcctggaagagccagtactcttgtgcttctcttggggtctacgggaaaaggagagattgacttgagtgtgtcagatctaatctcatataagcattctccgtccatgcagactttcctccatgtagctgcggaagggcaaagcagagagtgctgtggtcggcttggggaaactggctaggaggttatactgcaagaagctgcaggcgccctctgggagccgagagctacatctggaccccattcttgtaagcgtaagaaaattttctagccaccagtgagttagggataaacagctggagcttcagctccaaacaacagccaggccggcatgctgtgtctgtctgtccttctgtcctgtaacatgacaacagccaggccggcatgctgtgtctgtctgtccggcaggctgtttctgtccttctgtcctgtaacatgacaacagccaggccggcatgctgtgtctgtctgtccttctgtcctgtaacatgacaacagccaggccggcatgctgtgtctgtctgtccggcatgctgcgtctgtccttctgccctggaacatggtaaagttatgtctgcactgtttcaggacactacgtttgtgataattcattatgtggcgatagaaagcttattcaatgtccaaaattcccaatacatgaattagaatcacttggctgccagtaacagaaattgagtttggggtggggagagaagcagtttttctagaacagcatctacagtagacacagaccacagaacacagaatggatccaagtaggacaaacgacttagagatatttctgggcttgattccactcttaagacctgatttatttttgtttggctttatttatttatttattatttattattattttggagatagatttgtaccctgggctagtctcagacttactctgtagccagggatgatcatgcaatcagaagccaagtgctgtgtttgcaggcctctgacactgtatacagccgctcttaaagcctcagtaaacaggcactgggaagatggcttagtgttcaggggaac

SEQ ID NO: 632 - DNA, 850 bp, Mus musculus
gcgtcatggctgcccgtgctcctgagctcgcgcgttccctgcttgctgcccttctggcgcccgcgctggtggcactactggtgtcgccggcctcgggtcgcggaggccgggaccacggggactgggacgtggacaggcgattgcctccgctgccaccccgcgaagacgggccgcgcgtggcccgcttcgtgactcacgtctcagactggggctcgctggccactatctccacaataaaggaggtgcgcggctggcccttcgcggacatcatctcaatcagtgacggtcctccgggagaaggcacgggcgagccctacatgtacctgagtccactgcagcaagccgtgagcgacctgcaggaaaatccagaggctacgctgactatgtctttagcacagactgtctactgtaggaatcatggatttgatccccagagtcccctgtgtgttcatataatgatgtcgggaactgtgaccaaggtgaacaagacagaagaggactatgcaagggattcgctgtttgttcgacaccctgagatgaagcactggccttccagccataactggttctttgctaaattaaaaataagccgtatctgggtcttggactactttggtggacctaaagtagtgacacctgaagaatattttaacgtcacgctgcagtgaagcaggatatggtggactgagtcacaccagagaagtgtcttcggaggctcatgcacacttgaagggttggccctgcttgggacgtctccagctgtcagcttactctgccacctcttgttttaatcttgtttgcttgtgttaacagagagttgtccgtcagaagatgtggttgctggattttt

SEQ ID NO: 633 - protein, 219 aa, Mus musculus
VMAARAPELARSLLAALLAPALVLVSPASGRGGRDHGDWDVDRRLPPLPPREDGPRVARFVTHVSDWGSLATISTIKEVRGWPFADIISISDGPPGEGTGEPYMYLSPLQQAVSDLQENPEATLTMSLAQTVYCRNHGFDPQSPLCVHIMMSGTVTKVNKTEEDYARDSLFVRHPEMKHWPSSHNWFFAKLKISRIWVLDYFGGPKVVTPEEYFNVTLQ

SEQ ID NO: 634 - DNA, 32787 bp, Homo sapiens
gggaactgttgcaccagatactgcagctctgcactggcctacaaccaccgggcatcatcgaaactggacctccactattgccaaacattactgccaacatatgcactttcagttcatgttgttgaggttttttttagcccctccttcccctatccatcatgttccacttctagactaaggcatgagaccaggggaggttataaagctggactggaggataaatataagttgtaggtgttcttccatcttctttgttaccccctcctctctgaatactggagtagtataacagcaccaatcccatatgcttgccttcctcaccccctggtatcatgtcctgtgttaatctcctctccttgaatgacggaatgtcattctgagattatgaaaaaattgtaagactccagtggagccctgagatgactgcggctcctgtcaacagcttgactgcgactgtcatgacagaccttaagccagaactacttagtcaacccacacctcaattcctgacccaaagaaataatggaataatacatattcattatttaagtcactaagtttagggataatttgttaaggagcaacacaaacatagacacataaaagtataaaaatcaagtgtagagctcaatgattgtttcataaggtgagcacacctctgtaagcactgcccagctccagaaacgaacattgccaacagcctcgaagctcccctcatgctctcttccagtcattatctcccaaaaggaactgttgttttcatatttagaccttagaattatttgtctacttttgaattttatataagcagaatcatacatgtgttttgtggctggcttctcttgctcaagatcatctttatgtgattcatccatgttgcttcatgtagcagcactcattgctgaactattccactgtgggaataaaccacagtttattttccatcccactgtcaatggacatttgggggctattacaagtaatgctgctatgaacattcttgtacacatcttttggtcaacatatgtcagtatttcaggctgggtatggtggctcaggcctgtaatcccagcactttgggaggccaaggtgggtggatcacttgagtctaggagttcaagaccacctgggcaacatggcgaaaccctgtatctaccaaaaaatacagaaaattagccaggaaggatgatgtgcatctgtagtcccagctacttgggaggctgaggtggaagaatcacctgagccagggaagtcgaggctgcagtgagctgagatcgtgccactgcgctccagcctgggcaaccagagtgagaccctgtctcaaaaacaaacaaaacaaaacaaaaaatatatacaagtatttcagctgggtatatactggggagtggaatttctgggccatatgtttaatagacactgctggccgggcacggtggctcatgcctgtaatcccagcactttgggaagctgaggcggggggatcatgaggtcaggagattgagaccatcttggccaacatggtgaaaccccatctctactaaaaatataaaaaattagctggatgtggtggtgtgtgcctgtaatcccagctactcgggaggctgaggcaggagaattgcttgaaccagggagtcggaggttgcagtgagctgagatcacgccactgcactccagcctggtgacagagtgagactccatctcaaaaaaaatagatactgccaatcagtttccaacctggctgcagcagttcacatttccgccagcggtatgtgaaagtccccactgtttcacattctcaccaacacttggattttagctattccggtgggtatgtagtcacatcacattgcgattttaatctgcatctcatgagtcatcatgccattgccccacttccgatggaccatatacactccagaactccttaggaagaggggctttgtcaggcctgcactgcaggttcgcttctctctctgcccaatcctgctgccaccctttttttcccccacagatattgatccttaataagtacagatgctcctcaacttacgagggggctatgtcccaacaagaccatcgtaagcttgaaatactataagtcaaaatgcatttaacttaaacttgcctaccttaaacgtgctcagaacacttacattagtctacagtcgggcaaaaccatctaacacaaagccaatactataataaaggattgaatatctcatgtaatttattgaatactgtactgaaagtgaaaacagaattgttgtgtgggtgatcaaagtatggtttctactgaatgcccatcacttttgcatcatcttaaagtcaagcaatcattaagtcgaagtattgttaagtcagggaccatctgtgctctgcaggccaaactctgtcagtgtctgcttctgaggaatccaatctgtaacaatttgcctattcctaccatagttcctacagctgcctcaattactgtcatgtacagtatgttttaacctatgagcttttgtcaatgaacacatatatatttgtttttcatggcactgtaaggtagcaaaaatcaatctaaatcctataaatggtattgttatatgtttgttaaaattatgctttaaagctttaagttatactgttacatacacatttcttggagagattacagtatgattgatatttatagggcaatttcccccttactgcttttcttttgcaaaaatatcttagttacccacatggattacaattccaaataaattccaaaatgagttcatcagtttcccttaaaaaattctgtggagattttggttggaagtcactgaattaataggataacttggggagaacagatatcttcataaaattatatttttttctttctttctttatttcttttctttctttctttctttctttctttctttctttctttctttctttctttcttccttccttccttcctttctctttctttctctttttctgtctttctttctctttctttctttctttgtttctttttctttctttcttcctttctttttcttttttgttgagacaaggtctaactctgtcacctaggctggagtacagtggtacaatcttggctcactgcaacctccgccttctgagctcaagggatcctcccacctcagcctccccagtagctgatactacaggcatgcaccaccatgcccagctaatttttttttgtattttttggtagagatgggatttcaccattttgtctaggctggtcttgaacccctgagctcaagtgatacacctgccttggcctcccagtgctgggattacaggcatgagccatcatgcctgaattgatctttctaacatatgaattttctatggcttcccaaaatcaaaatctcttcttggcatgatatatttctcctacccagctgaacatgctcatctgcctgcattggttcttcacattcttttcaacttaaaatggctttttctgacacatcatgtcttcttgcctctgtacctactatttcctctgtgtaaaactcttcctctccttctctctagtcccaccttctcactgtctgccacgcttctatttgttcttcaagtttcaactcaagaattacctctgatatgaaccttccctcgagacaggcctatgctccttcttccctggcgcctttgcctgtggatagccctccacgttgcactaatgacatcaaattatactttgtctctttgcttatttgtgaattaattaagcagaaatttttcttaaaattaaggacaatgtctattaataattttaattctcatcacccatcacagcacccagggcttgtttggcactcaatgcatacttgttaaatgcatacatctaatgtacaaatgcataagtagtggaattatgggcatctggcaggcaaagaggacagatattttgttacaggcactctttcatttgtgcttttaaaattactatgatgatgatgtgaaaggctggccttattttagtgcaaattctaatctaattattttcttctgactcgcaggtaactttcttctcctgtttaatattgctgatatattgatacaccatggaataatatgtagccataaaaaagaatgagttcacgtcctttgcaacaggaagccatcattctcagcaaactaacacaggacagaaaaccaaacactgcatgttatcactcgtaagtaggagttgaacaatgagaacacatggacacagggaggggaacatcacacaccaaagtctgttgcgggttgggggtaaaggggagggagagcgttaaaacaaatacctaatgcatgtggagcttaaaacctagatggcaggttgataggtgcagcaaaccaccatggcccatgtatacctatgtaacaaacctgcacattcggcatatgtatcccggaacttaaagtaaaattaaaaaaataaattttacagatatattgaaatactgggatgactactcttctaaagcttagttaatgtgtttttgattaaacaaatgcaatccaaaagatacatattaccatgtctttctatgtagcaagcactattaggcatttggaaaacatgtcctctagattgaaaggagtcaagaattgttccccaaatgtctggaaaataattgttatccaaatgtaaacgtgcatgaaagagaaacatgtaaaactcaaggcagtcagcaaaagggcaggttttcattgctaccttttaaattcggaacatttgactaaagtgaagggatgtgagaagaaccatggggaaaggctatctgcttaatgaaaaataataggcatcggcattttctccctcaaagctggggtgggctatgaaagtacttcctcaatagctgcctggggactttcaagacattttataaagttatttttttcaagaggcttttttttttcctgcagaggccacagtgaaaagtgtgaaaaatctatagagaaattaaatgaagcaatctacagatttttagagtagaaagtgggaacagaaatagtgggaaaaggcctggtatggtggctcacacctgtaatcccagcagttcaggaggccgagacgggcggatcacctgagttcgagttcgagaccagcctggccaatatagtgaaaccccatctctactgaaaatacaaaaatcagctgggcgtggtggcatgcctgtaatcccagctacttgggaggctgaggcaggagaatcacttggacccaggaggtggaggttgcagtgagccaagattgcaccactgcactccagcctgggtgacaaagcaaggctctgtctcaaaaaaaaaaaaaagagaaatagtgagaaaaaagctaacaattactaacacatagctaacaactactgagcatctattctgttccaggcactataatggatattttaaatgcattctctcatttaatccccataaaaatccagtgaaggaggagctatgattttaatgacagggaaattgtggttcagtatcatcctatgtaatctcatgcttaagtggctaactccagagctaactctcttcactgtttcactagctatctactatttgaagcatgcataccacaaaagagaagttttctattctttaaagactaaagcctgagctatggcagacagcctgagaaccctctgcccttggtgtgactgttctgatacaattcttttgtcaataacatgtaatgggtacctgctagatgcctggatctgtgctcggtgctgggagacggaaaggacaaagccactgcttctaacctagaaggaaccggtggtgacctagacaaataagcaagggcaacaccacgtaaaagaaggagtttgcagggtgggttcttcataaggatcaaacctaggcataaggaaaagataactattccacagtgggcctgtggggatggggaccagtgtaggttgttcacataaaaacataaagtcaggatgagaagcagcaggacctgggatgattatttcagccactcctggctaagggcttcccctaatatcccaatgaggaggatttgctaaacaaaagctggagcgcctggttattagcttatgctgatttagtcatcctcacttcttattcattttatacagctctatgtgcaaagaattttgccagatattattcactgtcaggtagtctttcaataaatatttatgtagtgcccactctgagcattgggaatacgaaggcggacaggatagacaacattcctgctctcccggagctcgcgttctaccagtggagacaataaacacgtagctaaaaaaataaatactgttattatagtatttatttttgttgtgatgaattaatgattgctatgaaagaaatagagttggctgagggagagtaactggggaaggcctctcggaaagagtgctctaggagtcactgctgaggagtgacatctaagtggaggtcccaatgggagtgaggtagccataccagcagctgagggaagagcattttgagcatagggaacagcaaacacaaagatagatactgaggtggcgtgcttaaagccagagggtttgtagacttcattctcctgctctgatgcctgagaccaagctctaggcacctgttttgtaatggagctgtaatagggtctattgctattttgtatgccagcaataaatgatgtagcaataaataaatttttttcatctttttgcaaaaaaattcacattgtgaaacttacaaaaggctcatactttgcatgttaatagaaaaataaggccaggcatagtggctcatgcctataatcccagcactttgggagaatgaggtgggaggaccaattgaggccagaagttcaagaccagcctgggcagcatatgagaccccatctctacaaaaaattaaaaattagccaggtgtggtggcatacacctttagtcccagctacatgggagtctgaggtgggaggatcacttgagggaggatcacttgagcccaggagtttgaggctgcagtgagctgtgagccaccactgcagtgtagcctggatgacagagcaagaccctgtttcaaaaaaaaaaaaaaaagagaaaaagaaaaacaaacaaccacaaggaaaaagaagatatagggctggaagaggcatcagatattaatatcatctaatccaactcctcattttagatgagaaaattgaggcccaaaggtaagataaaatcccatggtcacatggcacaatagtggcagacctgagattagaactccaaatgtgagagtattctttccttaacaggtaagggatgaaatgtttataactggcaggtactcaaactatttgtattaatcatttgtttttaaaataatgaacccaattttcctccttttgaatttctcccacttagttttccatctattttgaagttcttccaaattcagttgttataaagcaaaccaactttgattaaggatccttcttaccccaatgtcgaaatcagggtgtgtgacatcatttggccaccagagggcactgaagtctcctgttcagagtagatgatcttgcttcttctgatacacaattcctactgtgtagcctgagaagttggctgaatattaggaggctggttttgagaagcgaagtagcggtgggactttggctcacacacctgttgcccacggctgctcacatgactggccaacagcagctgagtgaaattacctcacctctgttacacaactcagcctcacagggccaggtgtctgccagagccagctttacaagatgacaaactcttgcactaacaccaccatacagtctttataacaacaattacagtggaaatttgaggccaggccaaaaagattaagacttgctccaaaaagacgtgaccaaagcttaaagtcataaagaatggaggccaggtgctatgagcttattgaccagtttccagaatagcagaatcaggagcacccgtgagagaatgagacaggccatcttagaagaagcaaaaggaatgtcccttacatggagcagggaagggcagcgggggcaataaattcatgaaaccgccgaccccaagcttaatgtcttaacaggtcctgaactggtaagttcaaatttgtacatgggatattgatagtagactaacaatccctttgtgcgtctatatgagggactcctgggccagtagtttaaaaggtcttgacgggcaataacaaatgttggtgaggatgtggggaaaaggaaacccttgtacactgttggtgggaatgtaaattagaataaccgctttggaaaaaaatttggagttcctcaaaaaattaaaaatagaggtaccatatgatccagcaatcccacagctaggtatatccctaaaagaaagaaaatcagtatattgagagatgtctgcactcctgtgtttactgcagcactattcacaacagctaagatttggaagcaacctaagtgtccatcatcagatgaatggataaagaaaatgtggtatatatacacaatggagtactattcagccataaaaaatgaatgggatcctgtctgtctttgcaacaacatagttggaactggaggttattacgtgaagtgaaataagccaggcacagaaagacaaacttcacacatcctcacttatttgtgggagcctaaatggaaacaattgaactcatggagacagagagtagagggatggttaccagaggccaggaagggtagtggggggacttgcaggggaggagtggggatggttaatgggtacaaaaaatagttagaataagacctagtatttcatagcacaacagggtgactatagccaataataatttaagtgtacatttaaaataactaaaagtataattggattgtttgtaacacaaaggataaatgcttgaggcaatggataccccatttaccctgatatgactattatgcattgtatgcctgtagcaaaatatctcatgtaccccataaatgtatacacctactatgtacccacaaaaattaaaaattttaaaataagtaaataaaaagttttttaaaggtcttgaactttcgggcttctgcctaactttactactagtgtaagtgggccccttgagatttcagcaccccagcatttgttagtgactgaaataatgaaaattctgatcaggcccttgcttgcacatgttgacaactctctttttgcccaatatcccttgttcctacaacataatcataaactgctgatgtactgtttctttatcaagcaggaggagataataacttcagggttacgaaaaagtttgcaggaggaataagtcctttgaagtactttgaggccagcttctgtcgcccagaagtctgattgttcaaggaattatctgagactgaagaaacacagactttttccctcgattccctgaaactccccctccctgactcgctggccgcataaacactctctgcttcttctttttgttagggcggatttgagagatcttgccctcccgccttctcgctttggccaaatcgaataaacttttatctccaagcacctatatgtcagtgtttggcatcagctacacatggggtacacgagcctgagtctgggcttctacaacgctgggaccctcgctgttctttggagctgatggtaaattcaacagaaaagaggcgcgtgggtagaaaatgcagcatttcctctcagatgccagatattcatctccaaaggtattaaaaggagggggtgtgtgcctgtgtaaagaggctggtcttttcctagcagtacgatttgggcaagttgcttgatttcttcaagcctttctttttccgcctgtcaaacaaaacaaaacaaatatcccgtttaggacaaattcacaatccttaaagagggcaggcagagcgattggaatgcagatgaaccaatcccttctcctgcaggttgcggagctgcagagggaccccgccccctgcattgtgcttagctctgattggcgcctcgcggagggggcggggcctgggcgcgccgagctccggctgggtccctgcaggtcttggggcccgggactcttcctggagacaccgccatggccgggctatcccgcgggtccgcgcgcgcactgctcgccgccctgctggcgtcgacgctgttggcgctgctcgtgtcgcccgcgcggggtcgcggcggccgggaccacggggactgggacgaggcctcccggctgccgccgctaccaccccgcgaggacgcggcgcgcgtggcccgcttcgtgacgcacgtctccgactggggcgctctggccaccatctccacgctggaggcggtgcgcggccggcccttcgccgacgtcctctcgctcagcgacgggcccccgggcgcgggcagcggcgtgccctatttctacctgagcccgctgcagctctccgtgagcaacctgcaggtgagctggggcccgcggcttccccaggcgggctgtgggcggggcggccacagagcgagccttcactctccccagaattcttcccgggaagtggagcgtggctcgaacggctgttgcttctctgccgcgcaggcaggtaggtgggcgttgcagcgtcccagatgttgggcaactgggtaccaggaatttcccacaagcctccgccactgggccacgcacctggggtaaattctctgccagcagcccgaggacttctcatccgtgagtggttctcagtcgtcttggggcccagtgtctctattaactgtgctcctattctcttttttttttttttccctttgagacagaatctcactttgtggcccaggctggagtgcagtggcgctatctcagcttactgcaacctctgcctcccaggttcaagcgattctcgtgcctcagcctaccgagtagctgggattacaggtgcgtgccaccacacccggctaatttttgtatttttagtagaggcggggtttcaccatgttggccaggctggtctcaaactcctgacctcacgtgatccacccatctcagcctcccaaagtgctgggattacaggcgtgaaccaccgcgccctgcctgggctcctattcttaaaggttttacagggcatagagattgttaggtacttaagcactttaatatgtgacttcagggtttctcactctcttacccttcctgaattaagcttttccctcctgcagcaagacgctaacgtacaatatcatggacgattacaatgattactgcagtctttaggcctccacaggcatagtggctcctcagtaagatgcagagctgattgaaggtgtatctcttcctcgccctttgcccaccttctggtgcagggccacacttacaactctgatggatctctgctgtctcagggatggggtcacagacacccagcttgggaggccggagacacacagagtccaggaatggagcctgatttgatggagggtctttttgacaaagctctcacatttgagttcaactctgaaagtacaacattgttgataaagacaggatgcaagaaactgatgcttgattaatcacttttccatttgccttccattcgttgtctcttctattaattctttgaagtaggtattatataccccattctgcagatgaagaacttgaggcctacctaggttaagtaacttgtttaaagccagcgggcaaacccctagtttcatctcaggttcatctttcttcaaaccacctatcacaggctggtggcccatcagctgaatatgtcccacagaccggtttggcctacacaaagttctgttttgtttttaataaatttgaatttgttaccaacattttaaaatttagattttactttaaaatgtaaatctctaacttttcttgaaaaatgggaagatccagtgacactgtgggcctgcactctttgagcaaaaacagaagcagtgccctcttttatctaaggcagatacaccccagttcaccattttcttattcccagcccattccacacctttaggcgtttgctcaaaacaaactcactccactccatcagtggtgctcaactttgactgcaaatcatagtcacctaagaaggctttaaaaatgggatgccaaggtattttattgaaagcacattttattttaagacaacaccccttcccgcctccccacaaaccactccctgatgattctaatgggggaggagggagattgaccaatacataatcatatttaaatttgtgaggtgactagggagttgctggtattattgtccccatttaggaagtgaggaaacacagactcagaggtgcagggacttaccctgtgaccagtcagctaatggctgtcaggtaggacattagcccaggtctttcatgtttctagaaatagacagggcagtggcaaggaacctacccagggctttaggtttccatgatggcagtgaaaagaagtggccacattagaatttgtctgacttgattccatcaattagcaggtcaaagtttctgcttttttcttttcctcctcctgacctccagggtgctctgcatttcttctcattgacagggggtgaaatcgttcagaaggaacaaaaagacctaggtttgggaccatttctcatgtgtaaaatacctgtcctctgtaacttagagatatgttgtgagcttcaaacgtacttaccactgggctgtttcttttgtatgtctctttctttgtggcatttttgtatagtaaatgtctgtaggacagtgttgctgatgttagcttatagtgggaccgtgtttggctgcagagccagtgagtctgaagggaaatcttggggtttgattatttgcaccaagacctcttactattagcctcccttccattttggcattcttttcttgtgatgtgcccctttctgttctggtcactcttggttttttttctctgacccactaaaataagtatccctcaaagtcagtttcctactcttttgttccctgcagcgatcctcagaagattgtatacactctcgttgtatacattctcttctagtccttactaggactcacttccagatgtgtgtccatttctgacctcttcaaagttctctatatttctgcttgctgttcatttttgcttcgttactttgccaccacttcaaattcaacatgtttaaatccagtccttcttcctcctgaaacaagctgcttttgatcttctgcatttctgttagtggaattattgttttctcagtaaacccagttggttctcactgcctccccaaatccctcagttcccaagtcctgacagttttttgttgccttctttacctctgtccttgccccttcctcttcattcctgccacctcatccttaagcttatcatctcatgcctaaaagtactagaacagctcttacatagtcttcctgtctgccccatccaccttgcctacccaaatagattaacaaaaatacctgtcacagcattgccctctggccagaaacctttaacaatacccagctgcctatagctgcgtaagagctacctgggatgtttgtttaaaatgcatatagaggcgggtgcggaggctccagcctgtaatcccagcactttgggaggtcgaggtgagcggatcacctgaggtcaggagtttgagaccagcctggccaatatggtgaaacccacctctactaaaaatacaaaaattaactgggtatggtggtgtacgaccgtagtcccagctatttgggaggctgagttgagagcatcagttgagcctgggaggcagaggttgcagtgagctgagatcacgccattgcactccagcctgggtgacagagcttgattctgtttctaaataataaaatgcagatagaggacagcttggtggctcatgcctgtaatcccaacactttggaaggccgaggtgggaggatcacttgagtctaggattttgagaccagccagggcaacacagtgaaactccatgtctacaaaaaataaaaaaatattagccgggtgtggtgatgcacatctatagttccagctactcaggaggatgagatgggaggatcacatgagccctggaggttgaggccacaatgagccatgattgtgccactgcactgggtggctgcctgggtgacagagtgagacactgtcttaaaaaaaatattgcaggccaggtgcggtgtctcacgcctgtaatcccagcactttgggaggccgaggtgggtggatcacaaggtcaggagttcaagaccagcttggccaacatgatgaaacccagtctctactaaaaatacaaaaatcagctgggcgtggtggcacacaccagtaatcccagctactcgggaggctgaggcaagagaatcgcttgaacttgggagttggaggttgcagtgagctgagatcgcaccactgcactccagcctgggtgacagagcaagactccgtctcaaaaaaaaaaaacaaaaaaaaattgcagttatttgggttgggagtgaagcctgtttcaacattttaacccaaatcagcattttatcaagctctccaggcaggtggttcttagaaaacagtgcctaaggttggcccacaaattacaatctagactccttaacttaggttggagccctctccactcccaaccccaggctcctcccgtaggaaagcccttctttccagcaaatcaggtttcttggtactgttcatcaagtcttaggctcacccagttctgtgttttttgcagtcagtgtctcctctccctttaatatgtcctcccaccttctatcctggttttgaatatattataaagctccttacagttcctctatcactctggtctatgctggacatacacatttgtttatgtctgccttttcaaccagattataaactcacggagggagagagtttacctgagtgtccccctccccttctttggtctcctgtggtgccttgcctaatagtttctagacagtgactatttggctaaatgatttcaaagaaatctctttatgactctttgttttgatgggtcagtgtgaaatggcaaaattctccacacaaggcacttagagcttaaagagctaaatagtctaaaatgcgatgtgtgaattttgctataatctgtcaacagtgccttttatgaagttgatttctgaataagaaagcattaagaattttacttgtgttactttttgaatgtgggataaaactcattgttactaaagcaggaatgaacaacttctccagttttgaaatcacatgacagtttctgctaatgtaagataaccaagtagcatgattcagctactttcttgcttaaatcgcgtagttagccaattgagcaactgtggtgtttttagcaatggttttgtatagagtttaaccctttaaatctttcagtgaagcctatagaacagccttgaatttgggtgtcactataattataattcttctgatgaatatggaataaattcagggtttcagaaaaagaatattgaaataatttttaccaagtcagttcattttaaatatgaacccccgcaccccctttggggagtggtcaggatactttccaagtattattttcccctgagtggaaggtgatgttttatgattcattgtttcgtggaagaccagtcaagctctagggacatcatgtatgcaacttttgaaatttattacctctccagaaaccatatttcacatgagaggatcttcattttctctctataggagaatccatatgctacactgaccatgactttggcacagaccaacttctgcaagaaacatggatttgatccacaaagtcccctttgtgttcacataatgctgtcaggaactgtgaccaaggtaagtagttatcctacaggaagggagatggtttcagaacaccatcgtattcacaatgaaagaatagatcatttttcttttgagacagagtctcactctgtctcccaggctggagtgcagtggtgtgatctcggcttactgcaacctctgcctcctgggttcaagcgagtcttgtgcctcagcctccctagtagctgggattacaggcacgcaccaccacacccagctaatttttgtatttttagtagagatggggtttcaccatgttggccaggctggtcttgaactcctgacctcaagtgatccacccacctcgacctcccaaagtgctgagattacaggcgtgagccactatgcctggcagaatagatcttttgagaatgaaatgcagttgatttgtgattgccatgcccagtcagaacatgttctattctaataggtgaagtaattccatgaaaaccaaacgttttaataagttgctttcatataggtgttaaataagatatgacaaaaatgaatgattttctgaagccaagcagatgtaacaactatgaagctcctgtatataaagttattcttactaaagagcatctggttgaccaaagccctctactctccattacattttacattggtataatgtttttccatgtctgggctccttgtctccatattttaacagtggcttaaagcagagaaaacatattaagtaggccaaccagaggactatccattactgaaaactggaagtgaatttagtttggatcacctgctgaagggaagaggtcaaatacaatctcaggaagagcagtgggcatggtgtcaggagtgctgatctgattacccagccagcagatttgctttttgaccgtgtcaatcattaatgcctcagacaagtgttatttatggtctgtaaattctttgtggatgcatctctgtagttgagtgtccttcactggcaggaaaaagatggaggagcagcacatgcttttgagttctgttatgtggtttctaaacatttttatccttcagtacattcatctgtatgtttaacatgtccatgttatgggataaatatgctaaacattacatgtcttaggcaccagtaatgttacagtacttagtgctagttattctaatagctcaaaatgcctttttaccaatgaaagttggtattatacttacagtggtttcccacttcgtggtatctgttattaccaacaattgaaatctttattctctgcattctttacatttcctttattttctcttgattccttaaggttaagatcaagatttacaactaagtaaactcttaggatttatagaatgctagagtcacacattcttttttttttttgagatggagtcttgctctgtcatgcaggctggagtgcagtggcacgatctcggctcaccgcaagctccgcctcccgggttcgtgccattttcctgcctcagcctcctgagtagctgggactacaggtgcccaccaccacatctggctaatttttttttttttagtagagatggggtttcaccgtgttagccaagatggtctgagtctcctgacctcgtgatccgcccgccttggccttccaaagtgctgggattacaggcgtgaaccactgcacccggcctaatcacacattcttaacaaatgagaagataaagtgttactgccataagaatgtttatttcatatatgtcctttaggtgaatgaaacagaaatggatattgcaaagcattcgttattcattcgacaccctgagatgaaaacctggccttccagccataattggttctttgctaagttgaatataaccaatatctgggtcctggactactttggtggaccaaaaatcgtgacaccagaagaatattataatgtcacagttcagtaagtacttacacatctttcacctaagattgccgcccttacagccatcctcagccttctaaggcgaggggggtttaaccgtttcatgtgccctggacaccctgggcagtctggtaaagccgctgaccccttctcagaataatgttttaaacacataaaatacagaggattaagaagaaaatcaactataatgaaatacatttatgaaaatatttgtaaatgtgtggtataatcgttttattaatatattaaatataagatctagtaataagtctattactttttctttttttttcaagacagagtcttactctgtcacccaggctgagtgcagtggcaccatctcagctcattgcagcctccacctactgggttcaaacgattcttatgcctcaagcctcccaagcagctgggaatacaggcatagaccaccacacccagctgattttttgtattttcataaagagggtggtgtcgaactcctgagctcaggcagtctgcctgcctcagcctcccaaagtgctaggattacaggcatgagcgaccatgcctggccttttctgtgcttttaaagtagtgaggattgaagacaatattttaagacatctgcaacacctgtgacatgatatgaatgtatctgtgatttctctatttctgttggagacagtcacagataggctgtcaccctgtggtttattccctacattcattattgaaggaaatgatacattcagttagagcctaatgaaaatgaaaaaaaaatttttttgagccaagttcgcagacccctgaactctgtctacaggcctggacaccaggttgagactccattttaaggctgtgcttattgggccctgaacagagcccagttatgacccacgatggcattttctcatgaggcttagactcaggtgctcctggactgtgaatgcccttcatctgagtctgagcaagtaaccccatcccatcagccccagtactacaaatgcctatggggatgtgtggtttatcccactaagaagtgcatggaagggaggaggctgagataaaagaggccatgggagaaaataaagcccaggacctgaagacagaaagggaaaggaaagaagagtgtaactggagtctttggagttagctaagggttcaaatgagggaatacaagggactggtgcttctcccaggtgacacagggaattctggcatatctggggaggtgataagaacagtaacaataacagctagtgtccattgtttattactggctgggtgctatactggctacttttcatgtattaactcattcagttctcaccacatccctttcttgcgcaaccttccaccgcaacaggtaggtgctgtttttccacatgtgtgaaatggaaagctgatgcacagagaacaaactggcctaaactgtttgttcttgcagccaggaagtggtggtgctgggactcaaacccaggcattcttgctccagagccatcacctgacttctatccatgatgctgtacttctcctctggctgcctcactggtagctggccaggctcctagctcagtgtaatttataatgcactttctgcttgtaatgattgactgctgtttcaggagattacggtgatgataactaaggtagacttgtaggttgtaggtcatttgagggcttaaattcttagcatttatttaatctctgtctttttcaattgtagaacaattccgtgttgaactattgactccctaccatgattggaaatctcagttttgttttgtttctaattttttttaattccaagcagggcctaggacagtgtgtgtcatagagcaggtgtttaggaatgattgtctggctcattacttgagacaaacactctcacactctgttggaataaagaatcccacagtcctggcgcttgttttgctgctgtgcatgcaggagaggcacgggccactggtcgtcttctgggctggcaaagccatctgacttcataggaatatagaggtagcaattacaactttattccctggcaacaaattatcaggatgactgttaagaagggcctgctcttcgaagttaaagtttactttcacaggacataatctctaaagcgcagttatctttatataaataacatgcccaaaggcagtgcctggtttaataacaaaataaaactgttttcccataagtctccacactgaataagtgagtaaaacagatacttttgaggttcccactttattatgctgacaaaggagcacttctctgcagcacagagatagaacatttttcccttgtcctgagaggcggcccaaaggctagagcagatgtgactcttctgaggcagtgcaccagaacccgagggatgggcagggcctgaaagctgcccgctctgaccgggtgcctctggctaggaattgtccatctccgagtctaggagtgcccccactaatcccacccgccaggtttgccaccagagctgtttaatagtccggggagtgtacagtgatatctgtgaggaccagggcccccatcttcttggagaaccacccacaggggcctcacaggcgttctggagcttccccacattggcagccaccttgcttggcttgcccagaaggtattattcctccaaataccacgaagccctctgcatctgaaatctgtttcacacagatggagactgccacttgtgagagctgatacggagcttaactgaatgtggtttgcctcattggactgttgggtgaagaccccatgagcatgtttgcatgatcagtggaaggcttaaatgtctacacgaagcatttgctggcaccctggaataagcagttctttttttttttttgagatggagtctcactctgttgctcaggctggagtgtggtggtgcgatctcagctcactgtaagctctgcctcctgggttcatgccattctcctgcctcagcctcctgagcagctgggaccacaggcacctgccaccacgcctggctaattttttgtatttttagtagaggcagggtttcatcatgtcagccaggatggtctcaatctcctgacctcgtgatctgcccgcctcggcctcccaaaatgctgggattataggtgtgagccaccgcgcccgcccaacaagcagttcttataagcataagcattgcttttgaccactgttaagtctgggcagcagcatgtttgtgctaagcctcattttatctcctctggcgcacatccggatatttcctagcaaacacacaggtaacaaaaggtcatggattacagacttgcccagtcttgatacctagagatggattccctggttggtggcagcagaaagggggaaagttcacctcccagctgtggtcactatcactgggcaatggctaatcactgctcttctgccctgatgttcaggaccccttctgttctcaactatttttgtcttttaagccttcagatactcttaaatgagataacaacagcagccacggcagtggcctgcttcttgctacatcctagtagcgtttatcagtgtgtcagaatcatacttggagaggagggttattgctaaaatgaggattcctaggccccaccctcaacctattgaaaccgaaactcaggagtctgcattttaacaaacccaagtggttatttagtatattctagtggttgaaatgaactgaaaatcttaatttagatcagaaattttatctagtccttccctagaatgaattaatttttaagatttgttaacccagtttaacaaaataattcttctctgttcccctttctaggtgaagcagactgtggtgaatttagcaacacttatgaagtttcttaaagtggctcatacacacttaaaaggcttaatgtttctctggaaagcgtcccagaatattagccagttttctgtcacatgctggtttgtttgcttgcttgtttacttgcttgtttaccaatagagttgacctgttattggatttcctggaagatgtggtagctacttttttcctattttgaagccattttcgtagagaaatatccttcactataatcaaataagttttgtcccatcaattccaaagatgtttccagtggtgctcttgaagaggaatgagtaccagttttaaattgcccattggcatttgaaggtagttgagtatgtgttctttattcctagaagccactgtgcttggtagagtgcatcactcaccacagctgcctcctgagctgcctgagcctggtgcaaaaggattggcccccattatggtgcttctgaataaatcttgccaagatagacaaacaatgatgaaactcagatggagcttcctactcatgttgatttatgtctcacaatcctgggtattgttaattcaacatagggtgaaactatttctgataaagaacttttgaaaaactttttatactctaaagtgatactcagaacaaaagaaagtcataaaactcctgaatttaatttccccacctaagtcgagacagtattatcaaaacacatgtgcacacagattattttttggctccaaaactggattgcaaaagaaagaggagaagaatattttgtgtgttcctggtattcttttataagtaaagtttacccaggcatggaccagcttcagccagggacaaaatcccctcccaaaccactctccacagctttttaaaaatacttctactcttaacaattacctaaggcttcctcaactgccccaaatctcttaatagcttctagtgctgctacaatctaagtcaggtcaccagagggaagagaacatggcattaaaagaatcacatcttcagaagagaagacactaatattattacccatatacatgatttcagaagatgacataagattcctcttaaagaggaaatgtcaggaatcaagccactgaatccttaaagagaaaagttgaatatgagtcattgtgtctgaaaactgcaaagtgaacttaactgagatccagcaaacaggttctgtttaagaaaaataatttatactaaatttagtaaaatggacttcttattcaaagcatcaataattaaaagaattattttaatgaaatgtgttggattcgttttcttaaacatagacattaatatttattacactttgttttattgtctactgtcgaaatagcatgttcctaaatcagtcactggctgtttcaaaacttgaagtgaataataccactctttctaattggcaaaaagctcattgtgtcctaaaattctgggcatggccagatctagcctttgtcacaggttctgcctcagggatttggttgccagtgtaccttgtgatagaattaggttgagggcagctatttggttttctccctttacccacttagtgagttttttctccagcatttggaaccacataaatacatatcgacattcaggtaagatctagttatcatacagagtaaagtcaaccagtgtttcacagcaggcagattcttttataattgaatgtgccagaatatgtcactgttaatattccagttagccactagggggcactggactactctttgtgcaagtttgggtttcttacacagccaaatcaagcccctaggaataatgctctgggttaggagctggagtaaatgcagctcagcaggggcaagaggagaagcagaggcctgatttgctgctgctgctgctgctgctgctgctgctgctgctaggttttcctgggtttatcattccctccacaccatgtgcttctacatcaggcttctggtctccttgcaccccacctgctgcagaaggagaacagatccctgggctcaaacagctaggagatgagtatcttagactggggtggggagggggagtcagccttggtgcagagagcaggacaggccctgatagagaaagataaaagtgtaaagaggggccgggcgcggtggctcacacctgtaatcccagcaccttgggaggctgaggcaggtggatcacgagattaggagatcgagaccatcctggctaacacggtgaaaccccatctctactaaaaatacaaaaaattagccgggcgtggtggcaggcgcctatagtcccagctactcggaaggctgaggcaggagaatggcgtgaacccgggaggcggagcttgcagtgagctgagaccgcgccactgcactccagcctgggcgatggagcgagactccgtctcaaaaaaaaaaaaaaaaaaaaaaaaaaagtggaaagagggagtagctcaggatcctgaagctacagagtccagacagctgcgtttggcagatgctatcttgaccatccttctgcactcagctggtcaaggccatttgtctttaccaaccatggccaataatcatagtttattctgtcttctagtccaggttcaaagtccttgacaggtatgtgggggagtggagaaaaatctttatgaaatgtgacgaagttcaatgaaataaatgcatcagatattctgaggaggttgctagtgtgatgttcccttcttagtagtatttagactgaagatcacaaagtaattgaaaaggagactactttcttttaagggagcatgtttttcagttttagtactgaggaaataatgctctaatttgtgtaatgctggttggtcagtgtttcctaggggaattccaaactgtcacttcaaaaccaagtgttctataaatattattagagaagacaattataatttaattataattccttttggaattaaggggggtacaaatcagtaaaatgtaaatttttcagttttttctttaagatttattgtaagacatttgtataggaaatgtggagaataaaaagtttgacatttataacctcaccaaccagcatggttgctaatattttgggtgtgttttcttgggagtgatgtttaaacatagtcaagatcttgctgtttaatgaatgtgtatcatgcttctttcactttatcataaacaaccgtgttcctagaagccattcacgaggatggctgagaatggctgcagaatatttcatcagatcaatataagcaggccaccaaataatggtctgcattgggactctgttgctagtgacaagaaacctaagtcaaagttgtttaaacaaaaagagttcattgatcttatattattcagaacttggctttcatttcctggctcctctttctgccgtgttagttttcattgcagccagcaatcttaccaccaagaggatgtgtccttcctagctgggccctagccattcccgaataatcactgtgtctgggaatggggtgccctctttggccgaacttgagtagtgtggcttctcctggagttgcgggttcactcagcaccatcagaatcacagagactgggagaatgtagaagggggactcctgcaatgaaaagagtgcttatgcgaactgaaggaacactgagcaggcaaaaaccaaaggctattagcattttctccagtttttgcatatttaggttactttcagttttttcctcttagaaaagtcttacacataaaatattttctacatttctgtttatttccttagattcccagcagtggaatttccaagccaaaagcttttggtacatgttataaattgcttttaagaatgtgtatcaattataatgtccagtgtttgctttaaaacattctagcaaagaaaaaagtataggggattagatgaggagaaactggcaaaatggtaacagttgaagctaggtgaggtgcctggagattcattttgctattattctcttttgtgtatgtctgaaaattacaaagatttctaaattgaattgaaaaaaaataaagaattgaggatctagagaggttaagtgactttcccaagcccacccagttctggtctccaggctttaaatcctggccatttcttctactccacactaaattggcatgtggtcatattgtctgagacacagattatgccagcgtaaggcttcctgactcttcttcaccccgcaacacaccaaggcaggaatgcagagctaatctatgtttgtgggtggggagggggcatgagtagtgggtgctagggagctagataacaagtttggcttggtgattcaggagttcaatagagatttcttgaaaggatgttttcagtaaaattttggaaaatacataataatgggggaggggagagaatttatatcaatgaacagccctgcaagcagtgtatgaaagtgcttactctgcgatgggttaaaatagtgtgttattttaattggcaattcttaaggttactaataacattgaacattaaaatttattttggtttatttttcctcattgaaaactgtcaatttatattctttgtccacttatgtttgggggatcattttaaaaaattgatcttgctgaattctgtatattcagtctatgaaatcatttagttagtaaatttgttgctaatactcagttttccttttaagttattttgtttaaaacctatagattttccatttctatagaagaaattaacataatatttttcccttgacttctttaagtttaatttcctttaaacttggtatgtttgtttcctttgagaaatttgataaatgtcagttcagattttcaaattgttatgtttaatttttatactttttaatcctttagaatgcattttgtgtataatgttcttcacttttttggatgacaaacccaaattatgcttagcttttgtagtctagatgtgaacccaaatctaagcatagctttctcagaagtgaggatgtaagtgagttagggccatcggcctagcctgctggacagtctgtctgagagacactctgtatcccttagcttgaacttgagggattggaattggcaaagaagcatggttctgataatattctcataacctttggaggttgtctaacacacacacacacactccttagctagattctcaagtcccaccacaataaaacttcagctggctctcccaacattatctgccattcctcagtgtatcctatgccatgaccagccaatctgatctggttataccccaaacttttccctttggacttttccacatgctcctcccttagccaggcatctcctacctcctcatctccctcacttttcaggagtaggtagtcctttgaaggccgagtctgcatctgatatatttatcactgtagccccaaaacaccaagtgtcaatattccattacgtggagtaacccctcaatgaaattttaacaaacgttttgcttacagactttgtactttagtgaatatagtggaagatggaggttggacctccaacttgctgtgtgacttagaatgaagtgatttgtttcagtgaaggcacatttaatcccaagcacttggcaaatctcaaggagactttgcttggcaccccagacatcagcctccattaaggaatggcattccacattacaggcttggatggagacatctgtcttgtgggcacgctgagcaactctgccacaaacgttccatgaggaagcaagggatttcgaagtgagttaattatcatgtctttgatttttcagatttggcggactatgtctcattgttctgttcccaaagcctgatgtatagacgctgctcaaatacgcttttgagcatggaatgagggcagagcagcttaaccaagacacagtctcctctctctctttacggctgctctgagaaggggaattcagcacattatatgcatgcccagagtcggtcaacacaaactctcctatttggttgccaagagtcatctgtgaccctgggatttatctttgtcttagtttgcccaggctgccagaacaaaataccatagactgggtggcttaaactgcaggtatttatttcccgcagttctagaggctggacatctgcgatcagggtgtcagcaagagtgggttctggggagggctttcttcctggcttgcagacggccgccttcttgctgtttcctcacatggcagagagagatctctttctgtcttcctctttttttttttttttttttttttttgagacggagtctcgctctgtcgcccagactggagtgcagtggtgctatctcggctcactgcaagctccgtctcccgggttcacgccattctcctgcttcagcctcccaagtagctgggactacaggcgcccgccaccacgcctggctaattttttgtatttttagtagagatgaggtttcactgtgtttgccaggatggtctcgatctcctgacctcttgatccacccgcctcagcctcccaaggtgctgagattacaggcgtgagccaccacgcctggcctctctcttcctcttcttctaagaccacagtcctgtcagatcagggccccaaccttccaacctcacctaaccttaactacctcctaaagactctacctcccgatacaatcatagggtgggttatggcttcaacatatgaatttgggggaaaacaattcagcttatagtaattgtgtttggaagagaataaatgataaggctgctttgttcatcccaaacctttcctcctttgataactcccaggcccacccacgcaagaagatttatcctcaatggtttctagtccattcctgctctagactgtggttttacgacacgcttttgcaggttgtatcctgcacaaaggccccagctgacagggaagcaggggctgaaacccagcctgagctcatgcctttgtcctggtgtgagcagcatcaccccaaagggcatctttcctaaaaatgacactttatgggttggtggcacctggctttcgggccatttcttactttagaagtttttgcttcctatgcatggaatcccagagagggcaaaaagagtgtgaacagagcccaagggagccctgggctgtggggggccccaccggtggatggatggggggagcagccaagcaggagcagtatagcggaggttaggagcggttcggctgcgagagcactgggttctgagctagttgtgcacttgctgcacgtggccctgggcaaatcattctacttctcagagccttagaccccatctgtaaagcaagggcaatacttcacaggtgggagtacagattagcaaaaatgtccacaaatcacttagcacagtgcctgacacagcagtgatccttgttagggccagtagaagaggcatcctcaagctctgggggtcctcattgcatcctctctgggagactggaatgtatccttgaagaacagcagagtaagtgtcaaaatcaagcacactggctctgcagtggggctgcataggaacacatcctcgttccatcactatttcatcatggacaaggtgcctcccctgtgtgggctgcagggttttcatcagtaaaatggagaataaaaataggacctgcctccctggtttgtaggaaaaagttcgagctaatacgtaaaaagtacacagaacactatccaatatatcaaacattccataaatactggttgcattttttttctttagcttcaaatatcggttggtaactacaggttgttttcacaaaaataaaagttataatcgtcaaattacttaattttataaaatatgttcaatcgtggcgtttcagctaactcttgcaacaagccctagagataggcaggacactctttatttttatttcgtggaggaggttggattcgcaaatggttaccttgggcaagtttacacgtgtcagacccatcccttcaacctagctctgtctccaagaatccggtgacccctcaactgctggtggcacatgggtcctttgaagagatgtcttctcacttgttttaaaggtgcatcgtatagaattggcaagtgccatgtgctggaaaacaccaggttttcatgaggagcacactcacatctttgagggcaggcagtatgaactctgaagtcaagcggcagcgttcaaatccctgctcaaccacttagccaggtggccttaggcaagtgctcctcaagaggttcccctctgtgaatcagggacgctgcctaggatagatgttggttattggtattacttagtatccatccaggtgtggaatgtcctgaggctgggaaggctggagaccgcagttcgacaaaacagccgctagaggtccccatggagccgcattgaacatccaagaattctgtttaatcctcctgtcttgggccagaccagctggccctgctggaactgagggcccctctttgtcctgataagcactcttccttccctttaagctggtgacccttctaaggggctgtcaagggctaatgctgagactcacaggttcctgaccttcagtccccagaagtgggccctcaggtttaatcctgaggcgaggggttgcaggcctgttccagtggattcccaggggccaggatgggctctgtgaggactccaggtcaggctgtctccaccctgggcaaactcaggcaaccttttcgtctttcacttttagaaaagacaaaaatgtaatctgcatgaagtcagggtgtcttggcagaccctgcaggccaggagccagaccctcatagggaaggaaccctggacatgggccatcactgcatgcctgggatgtggcccagaggcagcacacagcacaaccctgtggggaggtaacagctagtggagctgaaagagaaaggggcactggagaagcaggaatcattatacgaaaatttaatttccagctggaagacatcttgtggagaccatctagttcagctccttcattgtatagctgaggacacccaggcccagagaggggaagtgatttggtcaaagtcacacagcaagtaaaggacaaagctgagagcagatcccaggtttgtgcattcccatagcagctgctttccacacaccccactgagggaagaccatttggtcaagtcagagcacggggggtggggggttttaaaaagcagagctgaggaacttaggaatacacactgcttagcacatggttattagctggtccttcagatgccccagggtctcagcgttcgaagcttgctcattccacaggataattttgtgtttgctcaggtgcccagaaaatgcctttttaagatttctgagaataaacccatcacctccaacagtcccaggaattgcaactgtctattcataacgaatgagaggcaggtgcattaaattctgacctagtgctcaagaactttggagggataaaaagaggaagcacacaggtccctgttctgggaatgtggggcctccctcacctccccataggagggcttgtccacaccacctcctctttcctcctcttcatctcccaccctttccaccaagacagtgaccccattccccatgctgggttccaatcattcctggaaggatttttcccagagcagttgccagcaaacattttacagtcctctcctcctctctgtgatgtaacatttcccaacaccttctatatactaggcacataacctacatcatcttactcattcctccaacaagacagtacagtaggcattgttagccaatgtgggacaaaagatttcagatatttattaacttgttcaaaacatacagccagctagtagatggaatttggaatttgaacctaggtctaacctgttctaaagctcatgttcttccactactgtgaaccagcacccagaaaacttgagttttagttttgattctaccagctttgtgaccttagaaaaataacttaattttaagttgcctaaactacaaaatggaaactggctgggcatggtggctaactcttgtaatcccagcactttgggaagctggggcagccggagtttgagaccagcctggccaacatggtgaaaccccatctctactaaaaatacaaaaaattagccggttgtggtgtggggggcctgtaattccggctacttaggaggctgaggcaggagaatcgcttggacctgggaggcggaggttgcagtgagccgagatcgcggcattgcactccagcctgggcaacaagagcaaaactccatctcaaaaaaatttttttttaaatttaaataaataaataaataaaatggaaacggtacaccaatattgacaaccttactgagtcatcaagattaaaaagacaatatggctgggcatggtggctcatatctgtaatctcagcactttggaaggccgaggtgggaggatccgtgaaggccaggagttcaagaccagcctgggcaacacagggagacccctatctctactaaaaaaaaattaaaacattggccgggcattgtggtgtgtgcacccgtagtcccagctactcaagtggctgagacgacagggtagcttggccccaggaatttaaggctgcagtgagctatgactgcaccactgcactctagcctgagtgacagtaaaaccctgtctcaaaaataaatttacaaaatacaatatattaatatgtgaaaatgacacacaaatgtaagacacccccattaaagcaaaaaaggttctttttccaattaaaggggcttggctatcaatggcaatatttagtaggttatatataactatagttgacccttgagcaacatgagtttgaactgcatgggtccacttatgcatggattttcttctacctgtgccacccctgagatggcaagagcaaccctcctcttccttctcctcagcctactcaatgtgaagacaatgaggatgaagacctttgtgatggccaggcacagtggctcatgcctataatcccagcactttgggaggctgaggcaggaggatgacctgaattcaggagtttgagaccaacctggccaacatggtgaaacctccgtctctactacaaatacaaaaaattagcggggcatggtcgtgggcacctgtaatcccagctactcaggaggctgaggcaggagaattgcttgaaccagggaggaggaggttgcagtgaactgagatcactccactgcattccagcctgggcaacagagtgagactatgtctcaaaaaaaaaaaaaaaaaaagagaaagaccttcatgatgatccacttccacttaataaatagtaaatgcattttctcgtacttatgatattcttaa

SEQ ID NO: 635 - DNA, 2019 bp, Homo sapiens
cctgggcgcgccgagctccggctgggtccctgcaggtcttggggcccgggactcttcctggagacaccgccatggccgggctatcccgcgggtccgcgcgcgcactgctcgccgccctgctggcgtcgacgctgttggcgctgctcgtgtcgcccgcgcggggtcgcggcggccgggaccacggggactgggacgaggcctcccggctgccgccgctaccaccccgcgaggacgcggcgcgcgtggcccgcttcgtgacgcacgtctccgactggggcgctctggccaccatctccacgctggaggcggtgcgcggccggcccttcgccgacgtcctctcgctcagcgacgggcccccgggcgcgggcagcggcgtgccctatttctacctgagcccgctgcagctctccgtgagcaacctgcaggagaatccatatgctacactgaccatgactttggcacagaccaacttctgcaagaaacatggatttgatccacaaagtcccctttgtgttcacataatgctgtcaggaactgtgaccaaggtgaatgaaacagaaatggatattgcaaagcattcgttattcattcgacaccctgagatgaaaacctggccttccagccataattggttctttgctaagttgaatataaccaatatctgggtcctggactactttggtggaccaaaaatcgtgacaccagaagaatattataatgtcacagttcagtgaagcagactgtggtgaatttagcaacacttatgaagtttcttaaagtggctcatacacacttaaaaggcttaatgtttctctggaaagcgtcccagaatattagccagttttctgtcacatgctggtttgtttgcttgcttgtttacttgcttgtttaccaatagagttgacctgttattggatttcctggaagatgtggtagctacttttttcctattttgaagccattttcgtagagaaatatccttcactataatcaaataagttttgtcccatcaattccaaagatgtttccagtggtgctcttgaagaggaatgagtaccagttttaaattgcccattggcatttgaaggtagttgagtatgtgttctttattcctagaagccactgtgcttggtagagtgcatcactcaccacagctgcctcctgagctgcctgagcctggtgcaaaaggattggcccccattatggtgcttctgaataaatcttgccaagatagacaaacaatgatgaaactcagatggagcttcctactcatgttgatttatgtctcacaatcctgggtattgttaattcaacatagggtgaaactatttctgataaagaacttttgaaaaactttttatactctaaagtgatactcagaacaaaagaaagtcataaaactcctgaatttaatttccccacctaagtcgagacagtattatcaaaacacatgtgcacacagattattttttggctccaaaactggattgcaaaagaaagaggagaagaatattttgtgtgttcctggtattcttttataagtaaagtttacccaggcatggaccagcttcagccagggacaaaatcccctcccaaaccactctccacagctttttaaaaatacttctactcttaacaattacctaaggcttcctcaactgccccaaatctcttaatagcttctagtgctgctacaatctaagtcaggtcaccagagggaagagaacatggcattaaaagaatcacatcttcagaagagaagacactaatattattacccatatacatgatttcagaagatgacataagattcctcttaaagaggaaatgtcaggaatcaagccactgaatccttaaagagaaaagttgaatatgagtcattgtgtctgaaaactgcaaagtgaacttaactgagatccagcaaacaggttctgtttaagaaaaataatttatactaaatttagtaaaatggacttcttattcaaagcatcaataattaaaagaattattttaatgaaa

SEQ ID NO: 636 - protein, 216 aa, Homo sapiens
MAGLSRGSARALLAALLASTLLALLVSPRRGGRDHGDWDEASRLPPLPPREDAARVARFVTHVSDWGATISTLEAVRGRPFADVLSLSDGPPGAGSGVPYFYLSPLQLSVSNLQENPYATLTMTLAQTNFCKKHGFDPQSPLCVHIMLSGTVTKVNETEMDIAKHSLFIRHPEMKTWPSSHNWFFAKLNITNIWVLDYFGGPKIVTPEEYYNVTVQ

SEQ ID NO: 637 - DNA, 42379 bp, Mus musculus
  misc_feature (1)...(42379): n = A,T,C or G
ttagcacatggtggccatgcctctctgcattcctacaccttccagcgaatctgagcagtatatccccagctcagcttcctagtcaccaggaatggattagcgtcaagcacatacttaaacttggcagcttaaaatctcaaagattaagccagtgtggtagcacacgtgcaatcccagctcctgggagatggcggcaggaagagaaacagttctaggtcagtcttggcggcataaagtccaacctggactacataaaaccctctctcaaaaaggggttgctgatggggtggctcagtgggtaaggaaatttattatcaagccagatgatttgagtttgattcccaaaatccacatcatggtggaaggagaaaactgactactgaaagttgtcttttttttttttttttttttaggatttattattatacataagaacactgtagctgtcttcagatgcaccagaagagggcgtcagatctcattacggatggttgtgagtcaccatgtggttgctcggatttgaactcaggaccttcggaagaacagtccgtgctcttaccctctgagccatctcaccagccctgatctccattgtatgtgcatgcacatgtaaataaacataataaaacatcgtaagtcttgaacacattatctattttatttaataaagagatgaggtttcactgtgtagccctggctgtcctggaactcactctgtagaccatattggcctcaaactcaagagagatcacagcttgcttctacctcccaagtactgggataaaaaatgtgagccacctccgtccagttcatttgtacctttttacattaagttggaacttaatataccagtaagatgaatgccagccctgtcctattgatcttacagttttgaaggacaggcatttatttgtatcatgacaacaagctgcagctggggaggccctgggaacaggcagaaaccccggcatcagtgccattgccattttttgtgcttttgaacattttcatttattctgtgacaatttcacacatgcatataatgtttttttgggttggtttgtttgtttgatttatttatttatttattttttggtttttcgagacagggtttctctgtatagccctggctgtcctggaactcactttgtagaccaggctggcctcgaactcagaaatccgcctgcctctgcctcccgagtgctgggattaaaggcgtgtgccatcacgcccggcgcatataatgttttgatcatattcattgcccttttcttttcccctgctacgcctgcaaaacatcttcatccctaaaagcccctttccatttcttttgttggctttttgtaatccactgagtttgctcagtgtgctggcgagttttatgtcaacttgacagaagctagagttacctgaaaggaaacatcaattaaatgtctgtaagttctggctctaaggcattttcttaactggtgattgatggggttggggagtgggcagctcattgtgggtggggtcatccctgggttgatggtcctggattctataagaaagccgcgagcaagccagtaagcagcacccctccatggcctttgtacagttccggcctccaagttcctcccttgacttctttcgaggatcatcagtgatgtgaaagtgtgagccaaataaacccctttctccccaagttgctttggtcacagtgtttcatcgcaccaatagcaacctttgacacactcggggttgcttgcatgattgagggttggggttatttagtgaagctgaggcaaataaccaaatgccttcctacaccactaaaaaagcgtgttcccctcctcctaactgtccgcagctcctctgcagcggagccccatgagcaccttcccatccttgctagaatgctgatggacccactatagcccgggtcctgagtacaaaggccacttcacatccagaagccacttcacagcatttctccagctcctccctctcctcccctcctctagctcctccccctcnnnnnnnnnnnnnnnnnnnnnnnnnnnnnnnnnnnnnnnnnnnnnnnnnnnnnnnnnnnnnnnnnnnnnnnnnnnnnnnnnnnnnnnnnnnnnnnnnnnnnnnnnnnnnnnnnnnnnnnnnnnnnnnnnnnnnnnnnnnnnnnnnnnnnnnnnnnnnnnnnnnnnnnnnnnnnnnnnnnnnnnnnnnnnnnnnnnnnnnnnnnnnnnnnnnnnnnnnnnnnnnnnnnnnnnnnnnnnnnnnnnnnnnnnnnnnnnnnnnnnnnnnnnnnnnnnnnnnnnnnnnnnnnnnnnnnnnnnnnnnnnnnnnnnnnnnnnnnnnnnnnnnnnnnnnnnnnnnnnnnnnnnnnnnnnnnnnnnnnnnnnnnnnnnnnnnnnnnnnnnnnnnnnnnnnnnnnnnnnnnnnnnnnnnnnnnnnnnncagtcgggtgctcttacccactgagccatctcaccagccccacatattcttttatttaacaaaaataaattaagtaacagtgtttagaaagccatcattttccttcctgggtagtgaccccatggatgacagtgcatactgtacaaccataagttcaaatccccagcagcctaataacattcctggtatggcctaagcaggtttgtaacacaacactatgggggtgactgggaggtttggggaagaggcaggaggggctttctgctcaagcaacctagctgaaatcactgcaagacccaggttcggtgagagaccttccttgtcttagggaataaagtagatgatcacagagggcatctgatgtcttttactggcctgtttgtattttctgcatgcatggggcagatgcactcccccccccccacacacacacccacgtgtgcaaacacccatacactgcacactgctcttgcagagaacctgagtttggatctcagcatccacaccgatgcccacacatacacatgtgcttaattttttctttttaatgctagacttacctttaaggctccagtcagataaatattgctgtctcttcgatccctcctgctttctttgagacaaggtttcctgtatcctatgctgatttcaaactcccatagctgtgatgacctagaacttttgatcctccagtgttagaattatgggcatatgctagcactcttggtagatctggttctggaatttgaacccaggacctgtgcatgctagacactctaccaactgagcttcatcacaatactttcttttcttctcttttctctgagacagggtcttgctaggcagaccaggctggccttgagctcacagcgtcacttgcctctacctcccaagtgtgcaattaaaactcttattttaatgggcccatgtaactaatataaatttgagtgataatacccttattttgtcttttcatcagtgactctatttaaattttcatttcattagccagttagtggtggcacatgcctttcatcccagtactcaggaggcagaagcaggcggatctctgtgagtgtaaagtcagcctggtctacagagcaagttccaggacagccagggctacacagagaaaccctgtaacgaaaaaccaatatatatgtatttttttcttgtgtatatgtatgctgtggtacatatgaagctagaggacaactttcccaagtcatttctcttcttgaaccaaggataggactctggtcatcaagtttacagggcaggggcttttacctgatgaggcgcctccctggccctaccccgtttacttgtgattgttgccttatgcgtgatctagaatattgacaagtaggctaatgtcaaaattcttgggggagatgatgcaactcaatcaaggggtagcaagtttaaggccctaagttcagctgccagcactacacacacacacacacacacacacacacacacacacacaaacatacacaagcaaaatcctacatgcttttctgtgtgtaatacagagggggtggggatgggattttgggtgtgttagatttactttttaagacttttgggtttttctttcttcctcccttcatttccttttttctttcattctttctttctttctttgaaacaaggtcttgctaagacattttctggctgtagatgaggctcagtggaatgcaggtgcaggcgcaggcacaggaactgtgcacctcgactttgagacagggtgccttacagatctacagttcacagattggactaggctggcaggccagcaagctcaaggctcaacgtgtttaccctccacgatgctgaaattacaagcacaggtgtgatggtttgtatatgcttggcccagggagtggctctattataagatgtggccctgttggagtaggtgtgtcactgtgggtgtgggctttacgaccctcatcctagctgcctggaagccagtattctgctagcagccatcagatgaagatgtagaactctcagctgtgcctgcaccatacctgcttggatggtgacatgttcctgccttgatgataatggactgaacctctgaacctgtaagccagccccaattaaatgttgtccttatgagagttgccttggtcatgctgtctgttcacagcagtaaaaccttaagacaacacaccacatctggctttttgatgtggattctagggattaaactcaggctcttgaggtctgccgaaatggcagttaagaggactagctgctttttcagaggacctaggtggtggctcacaaccatttgtaaccccagttccagggcatccaacaccaatctgaaggcaccaggcatgcgccaagcacatacaaatcttaaagtgagcgctgtaatagggaaaacttgaggactgaataaaaaaatcctccgtttatggatctcaagtttaactgtgccctccttaacaatctgaatcgacacttgccctgtcaaccctttcagtacatgcatttccatgcatgttcattgcacacactgcttgtgtagaagccagaggataactctgttgcattctttgttcttccagcatcatccactttgacacaggatctttcactggcctgggactcaccaagttggctaagctagacagccacagggatctgatactctcagtgttcctagcaatggggggataattgtgtgccaccatgcctgacattcttaatgtggattctgggggattgaacccaagtctgcgcttttgcaagcatggtacctactgagctcactctccagcaagtgcctcgcccctccttttgagatagggtcttaaatttgttaccagaaaatgaccccagcctctgattctcctgcctccatctcccaagtgctggggctacagccttgcaccatcacacctggtttctacacacccttgaaaatcaaccccagagcctggtggatgccaggcaagcacttccctgagctactttcctggccctccagtcctgctcctgtaagttcctcccctcttgaagtgcatgtctgttatccccctgctcccaactagcactttctcctgtccagctcccagcttctgaccacagccttccctgtgtcctgattacattttaccttccttctgtgtcctcacggttgattctctcaaagaatttctacaaaccaccatcctctctcaccaaagtatgatttgttcattcagaaaccatttccatacaaacaaaaaaaacaatctgtcctcaaaatagtattgattagcccaaagcaaattaagtatgcacttaggacaaacatgcacaaactcagatattatttttttggagggaagggcaacatactaaaaacctaacaacatagtttagtgttttatttttctttaggaagaattcacacttctttaatgctcaggcttatgaactcaggttttatatagtaaaaatggggagaagggggtctttccctaagagctcaatacctcttctgttttttgctgtgaatatatttaaatgcttacgggcaaaaaaatctgctgggcagtggtagcacatgcctttaatcccagaatttggaaggcagaggcaggtggattcctgagttccaggacagcctggtctacagagtgagttccaggacagccagggctgtgcagagaaaccctgtctcaaaaaaacaaacaaaaaccccaaacaaaacaacaacaacaaaaaacaaaacaaaacccaaaacaagcaaacaaaaacctggtggatgacctcaactatttcttcttcccccagttctccctatcttgtcgctctgcatgtgtaaggatcacagtgcctgcatgggcagagtggctggccgagggagaaaactatcccacacatgaacacagtcctggtgtgaattagactcgatgatgacggagatgtgtggcaactgaggagataagggaaatagggaaatccataaaacttggtatgtgacaagccagacaaaggacatttccgagaactgtgccttcattccaggtttacaaaccactcagatatgatgttacatattgactattatattcaggctcagtttggttatctaaatgaagtgatagaatggcagcccaaggattgcgtactcagtgttttaacagaaccagtaacatcattagcagtaagtgaattgtattatagaccagacaaaaataaagcttttttttttttttttttttttaaactcagcatcttacttaaccctggctggctgacccggcctctgcctcctgaccacactggtgggattaagcctgtggcactaccctcagcagggacagcgaattctttttttcttttccttacagtctcctttctcagctgagaccaccaagtgtaatgatatttttttctttcgcaggaaacgaaataaaacatttggatgtaggcaccagcataactattaccccattttcctctcaagtacactttagtgaatcactgcctaaaattaaatagctagtttatctgtggtccagatttgaaggaaagcagccctcccaacttcagacctttgcagtaatcctccataccccaaacagtaactgttaaatgtaagtacttttactcccattgaacagattttttttatagcagtactaagtctactagtaatgtaaagcatttgaatgttagtgcctctttatcatcacaggaaggggtaatgcagcaagaagcaaatatgaacaaagaggactctagctgtcaccaagcatactgggtactactaaggagaataaaggaagccacagacaaaagcttagaggctggagcaggacagtgtgctgtgggggtgggggtggggacggtttccaggagaaaagtttctaaatactgtctgttaaggctgttagggaaagtagtatttgaactaagtcagttcttcagtaacgtgcaggactgtgacatcacaccgccgtcccagtatcttagcagctgctgttcgcacagtaaacatttgcacagggacagctgagatgtgtttatcagtccatgtcattgactaatcatttctaaaaaatcttgtgtgggggtgctttgcctgaatttataagaaccatccgtatggctctgccatcagccagaagagtgtaccatggatcccctggaaccagagttgcagccagctgtgacagcagctttgtgggtgctgggaactgaatacaagtcctttagagcagcaggtgcacttaacttctgctgagtcagcactccagctcactttttccttttttttcccccttgctgggggtgggggtgggggtgggttgagacagggtttctctgtggggccctggctgtcctggaattcactctgtagaccaagccggctttgaactcagaaatccacctacctctgcctcccaagtgctgggattaaaggcatgcaccactgcctgccccctcccccccaccccctttttctttttggctgttagtgacagggtttctctgtgtaatcctggctctcctgggactccctctgtgtaccaagctggccttgaacaaacagaagtccacttgcctctgcctccatagtgctgggatcaaaggcatgtggcttcattatttattcattcattcatttattgtaagtacactgtagttgtcttcagacacaccagaagagggcatcggatctcattacggatggttgtgagccaccatgtggttgctgggaattgaactcaggacccctgggagagcagtcggtgctcttaactgatgagccctagttttgttttttcaacacagggcttctctgtgtagtcctggctgtcctgtaacttactctgtagaccagactggccttgaactcagcaatctggcaacttctcaaatgctggaatcgtgaccatgcctgggttatttattttataggcacgtatgcctgcagaggccagaagggggtgccagatcacccaaaactggagtgaaggctggtagtgtgctttcatgtgggtgcaggggaactgaactcagatcttctgcaagagcagacagtgcttagagaaagcactgactccagccccatttcaccgattctaaccctccccttttcataactttaagctagtgtatgtagagctacagtatagtatggtttaactagattcttaatattatatagtcagcatcatacttgttaaactccacatcaagcacgtataaaatgctatacagtacatattgtctcagtcaagcttcttaacagctttacccagctggtgccattaatggttacagaaaactgaggctaaaagccttaatcagtagactcaagcagaactgaaaacctggcagagctaaaggtcaaccctttgtcctatctcaacatttaccttgggtgatgtagaagattaaataaaaacatacccttgtgtgaactcctgctcaaatcaagactcagctcagactgacctttctgaagctattcttttcttttcttttttggttttccaagacagggcttctctgtggagccctgtttgtcctggaactcactttgtagaccaggctggcctcgaactcagaaatccacctgcctctgcctcccaagtgctgggattaaaggcgtgcaccaccaccgcctggcttctgaagcttttctgaatcctccgtgaagaatcggtcttgcgctctcaacactttagctataattctatcttactatggcgtacaatttccctggggaattttggaaccaaggaatcttatcttgctccatcttacagggcccagtactgttcctgacatatatttaatgtctattaaagacgtatatttatagttatatctttatttaatagacatatatttaatatctattaaaggagtcctggataaatataaggcaagagaaactaaaaaggtaatgctacagaagatttataaattgtgtgcagtgaaatttggaagaacaatgacagaaaatggaagtcaaactgggcatggtggcacagttatggaaagctaggacaggggggtctcttgagtgctccaggtcaaccagggctccatagtgcaaccctgtctcaaaaaaacacaaggacgcacaaaggaagacttctgagttttcttgaggaaaaagagcagatctgagaattgggaggaatcgagtgctcttatatcaaggccttcccgtcattttctcgccccgcttgcacacggtaatttacagtccatcacggaggacatctgagtgtatgaggctctctcaagacatcctacttttacacaccacacctttttctatccccgtgtccgtccccccccaaccccccggctgtttttttttttctttctttcttttttttttcgagacagggtttctctgtatagccctggctgtcctggaactcactctgtagaccaggctggcctcgaactcagaaatcggcctgcctctgcctcccaagtgctgggattaaaggcgtgcgccaccaccgcccagcccccaaaacacttctaactcaaattcaacgttttcacttcttccccttcgactgcgccaccgttccttccaataaaagcccggccgcagcaagcgagttgtgcagcccttctcctccaacggcgtccccggcatcataaaggctggtttaaccagcgcccgaggactcctcgactcggctcgcccagcccaggaccggggcgagcccccagaccctgacgctccgcacgcggtggcctaacttttcggccacggaggcggggatgcgggtgaagtccagccaccgtgtgacagggttctagtgtgaggtaggcgatcgggctcggagagcaggtaacgcactgccgaggtcgcaacgccgccgccaccacaccgccatcctccgaccgacctggctttccaactctcgcgagaccgggcctggcgcgcgccttcggcccccgagacttgcgcgttgccgctctctcccgactatggcggccagacggcgggagtgaagcctgtagttccgggtcggcgccccggaagcggaagtgtagactcggggctgtcaaagttgtagcgctcctcgagggtcggtcccgccacgtctcttcccggtctctctggctctggagtgctttccccccgcggagggtgggagcgcggggacagacgggcgagatgagcaccatgtttgcagacacgctgctcatcgtctttatctccgtgtgcaccgcgctgctcgccgagggtgagggcggctgtttccttggacgtttgattaatcccagggtggaagggcactggggtccctcgcaccccatgagcaaagatcgggagcctcactccctgcggcctgcgtggtccgttgcaagaaatcccgggctcatccccctatagaagcaggagagtagtgtggagtcatacgtcctgattttctttacgtatttgtggatacactgaaaaaaacaaaacaaaacatgggttgatctgactttgaaaaaagttactgataagtatagagcaaaatgtcgaaatccttttgtctccaatactaacaattaaagatggtttgttgtgatttccatttatttctcattagcatgttgcttttactgtttaggcataacctgggtcctggtttacaggacagacaaatacaagagattgaaggcagaagtggaaaaacaaagtaaaaaatgtgagtatggtaagacggtggacggttcaacacgggaagttcaatgggtgcatgttcacagtaactaagagaggagtataccaagaatactacaagccagtgttccttgttagggcaactgaaatctcaacactcaggagatggacatgattgtgagttcgcagctagtgtgggctacatagggagattcatgttacaaacaaaaccatactctaacttggtaaagatagaaatcaaagacctttgtgcagcatctttaataaagctaaaaggaatctgggtgtggtagagctccagatagggcaggcctggtctacatagtgcattccaggctggatctacttcctgtcgagaccttgcctaaaatggacacacacacacacacagagtcttcattctaaagaagaggtcctgttctgttgtgagagactatggaagatctcatggtacagatggacccagtgccttgtggattagttagaatgtagatagaagataaaagagggagaggaaattctagggaaaggaaaaatcacgtaaacatggagatttgaatgtgtgagctgtgtttggagaataagtcactgtgactagtgtcagtaggagtggtaccctttaaagtttagccaagtttcagtcgggtgagaaagctgaaaaatgattaacatgggtaaaatttgtggcttttgaaggaaagttaaaatttagcagggcacagctgatcatataaataaggccttaggtaacccaggcaggcctcactgatcatataaataaggccacccaggcaagcctcacatttctgatgcctcacccttagctccccagttactgggactttgaatggttctctaaaagcacaattggtatccagtgttggttggttgttttgcttttatgaggtgggtctcatttagccctgcttggctttgaactcactagctgaagatgaccttgagctgattcttctaccttccaagagatgaactatagaaattcagaaccctaaaccatacctaacttggcttctaagagtttctacagctacctttattcctatatccttcttatttccttatatctttataagttttgtgagtgtccgttttttgtttgtttgtttgtttgttctgttttgtttttaattttagacagggtcttatataggccaggctagcctataaaagctaactccttagctgagtttgaccttgaacttatgatctcctgtttctgctcactaagtgctggagtcacagttattcaccatcaagtcagtttgtggggtgcaggggactgcactcagggctttgtgtatggtaagcaagcactctgccagttgagctgtactcctcagctccccttgcattcttcccccctaaattatcctatgtgaggggctcagagcagagagctgtgatagagttcgtgcctgccatgcccaaagcctggagttcaccctcagcagtgaaaaatatgtcatttggtgcacataaaaaccattgtggttggttataaaaatgtttccaccttatgggacaggagattgagacccaggaagttaatgatagacttacatcacaagaaaacaaagaactggagactaaactcagacttttgtttttgagcctagactttgaaaattacagttcgccatcctttattcaaagttgatagtgttggctcgccatatttaaaccaaattcattctatttaccttcacaaacatgaccttccaggattttcttaccttggtgattttatgcttttagcagggaaatccgaaaatcttttttattttttatttttattttatatatatatatatatatatatatatattttttttttttttgagacagtgtttctctgtatagccgtggctgtcctagaactcactttgtagaccaggctggcctcgaactcagaaacccgcctgcctctgcctcccgagtgctgggattaaaggcgtgtgccaacatcatccggcttatttttatttatttatttacttatttattttattatatgtaagtacactgtggctgtcttcagacactccagaagagggtgtcagatcttgttacagatggttgtgagcctccatgtgattgctgggaaatgaacttaggatctttggaagagtagttgatgctcttaatcgctaagccatctctccagcccccaaaatcttttttaaaagagatttttaaatatgcttgctttctttgttgctgtgtctacttgctagcttggacgtgctgctaggacatggttctttgtgctcacgtatgtacctgtgtgactgggaagtgactggtgcatgctaaacaggaacattgtcttgggtttgggttttttgttttgttctgctttaggttttttggccttgactgactgagaacttgctgtgtaactcgggctgcccttgacctcccagctgatcttctttctagtttaggggttacaggtataaggcacgccccctttttcaagcacttgttattcctgcctgtagttcattatcaaagcctgtacctgttgtcctcttgaatggttttagatctttttacatcttccatacctgccaaacccacctattctaaagtagcatgtttcgttgactctattaaagcgcctcatgtgtctgcccttcagttattcagatttgctttgtagggtacatgtagcattctttttcagaacataaatctggttatgctacttgtctcctttatatggcttttaggataaaagacctgtgtgctgggtggaatggcacatgtctgtgattctagtattcaggacactgaaatagggagtcctcagtttgaggctagtctgagctacatagctaaacccaacttcaagaaagcaatggacagacttagtgcatgccttaaatgtctgaggtaaaggcaggagtatctctgagttccaggccagtctggtctatataacaagtttcaggccagtcagagctgcatagagagaccatgtctcaaacaaacaaacaaacaaacaaacaaaagggaggaggagcagcagctgccaggtgtggtggggctctagtttctggcagcctggtccacatagtgagttaaggacagccaaaggttacatagtgatgagaacatgtagaaaggaaggaaggaaggaatgtgggtagatatggctttagcccacaagagatagagctgcagttaagaatgctttctgttcttgtaacactacccagtacccacaccatgtggctcatggctgcctgtaattccagttccagggatccattttcctcttttggccctgtgagcatctgtacagaagacatggtgcatatacagacaagcagacgcgcgcgcgcacacacacacacacacacacacacacacacacacacattttttaaaaaaccttttttaaaaagatatgacccagtaaaactcaggaaaataagattcttccttcccttcttttctaacattgtttgtttgtctgtttgtttgtttttgtgggttttaaggtagcagcttactatatacttcaggcttgcttctaagttgcagtcttcctgcctcagcttctgctagagtggcattacaagggtataataactaccatgtctggctttcctgaagccacatcttatctcatattctcctgtgttctttgcctggtttcctagggcccttttctaacttctgactggggcttggattttcctactgttgattcttagtacttgctattcctttcatggtaaacattttccctttgtattttttagtaaactcttaggcttatttagtctccagatctttgtactttctgatttatccataggcctctccttgaagcgctttctgcagttgtgtgatcacctcctcctatctcccccttctctgggtttctctgtgtagccctggctgtcctggaactggccctgtggtccaggctggccttgaactcatattgtccttcctctgcctcctgagtgctgcggttaaaggtgtgcactgccaccatctggctacagttgcaatcttttcgtacctgtcaactatggttattaggattagggcttttgctctactccagtgtaatgtctgtgaaggcaaagtggtgtctctagcccttaacatgatcctagatagctgtaacagtgtgcttaataggctaaaggataaagtgtctctgtagcacggcatgtttctgagaaattttgttatgatcacatactagttagcatgtactggtatctgaatagaaagttctttatgtaatatatatgtgtatgtatatatatatatatatatatatatataatttactatcatttttacttcaatgagtattctcatatcttagccatggatttttttccttaagatttttaggcttttcattagtgtctataatttttctgtttgtttgtttgtttgtttgtttgttttttgtctttcgagacagggtttctctgtatagccctggctgtcctggaacttacaggtctttgtagaccaggctggcctcgaactcagaaatccgcctgcctctgcctcctgagtgctgggattaaaggcgtgcaccaccacgcccagcagtgtctataatttttacatgaagtttatttacattttggaagcaaatgaaaagtttacttttaatatataattttatgtgtttatgtttacagtagagaagaagaaggaaactataacagagtcagctggtcgacaacagaagaagaagataggtaagccagtaacctaaataaaacttgagttgtgtgtgtgtgtgcatgtctgtgtatgtatatatgtgtgtgcgcgtgtgtctatgtatgtgtatgtatatatgtgtgtatgtgtgcgtgtgtctatgtatgtgtatatatatgtgtgtatgtgtgcatgtctgtgtgtgtatatatgtgtgtgcgcgtgtgtctatgtatgtgtgtctatatatatatatatatatacatatatatatatgtatatatatatatatatatatatatgtatgtatgtatgtatatgtgtgtgtgtctgttttgttttgtttcttgagacagtgtttctctgtgtagctttgactatgtaggaattcatgttgtaggccaagctggcctcaaactaacagagatcctcttgcccctacttcctgagtgctggaattaaaggcatgtatcaccaccacccaggtttttaaataatatttgcaattaaatagttttgtcactttaccatgttcctttctccagctcctccctcaaaccttcccatacctccttccatcttaaatctttcattcattctttcattactgttgttaaatacatgtatgaatatgcatgcataagtatataaatactatctggttcttctctttttgttgttttgtgtatgttgtttcaaagctgaccactttgtatcgaataccaataagagtgctcatccccaagcaaagctaatttcccccctctctgcagtcattagtttcataaagttctttatctgggggtgggaccctgtgaaatcttgtcccttccatgttattgtgttgatgctattgtctattgatttgccattgttctggtcttgtttatgtagccatttctaggagagtcagtttcaatatcagacttcctggtattctggcttgtacaattcttttgctccctcttttgtgatgttccctgagcagggatgcaggagctgtggagtagatgtatccactggggctgggttctgcacagtctgttgttttctgctttgtgttgagttgtgattttctgtgatggtctccatttggtggccaagagaagcttttttaatgaggatggtagctacacttatctgtaggataaggataggatttagagtacacaggagttatgtggcataccaaagtggaggtagtagattggttttctttttttcaagcttttaacttgtgagcctccatgtggatgctgggaattgaatccacatccactagaagagcagccagttttcttaactgcggggccatctctctccccccagtagtctttccaagatctatgacctcactagttccaggaagttggctagctttctaagcatgacttccctcttgtttagtgggccgtgagtccaattagacatctgttggttcccaccgatctgtaagtgccactcatagtgatttttaaactgaaatattttggcattcttctatatttaaaacattgttttagggggctggtgagatggctcagcaggtaagagcacccgactgctcttccgaaggtccagagttcaaatcccagcaaccacatggtggctcacaaccatccgtaacaagacctgactccctcttctggtgtgtctgaagacagctacagtgtacttatatataataataaataaatctttaaaaaaaaaacaaaaaaaaaaaaaacaaaaaaaaacattgttttagggctggtgagatggcacagtgggtaagagcacccgactgctcttctgaaggtccggagttcaaatcccagcaaccacatggtggctcacaaccatccgtaacaagatctgacgccctcttctggtgtgtctgaagacagctacagtgtacttatatataatataaataaatctttaaaaaaaaaacaaaaaaaaaacaaaaaaaaacattgttttagtatggagtaagcaacagcccacatattcacttcgtcttattgagtgatattgaaacaaaatgctattgtaatctccagacagtgataatttattaaataattaagctgtgctcagtatttttgaactaaccagtttcttcttttcagagagacaagaagagaaattaaagaacaacaatagagacctgtcaatggtaagagtcccagagtgtaactgatggcaaaccacataaactannnnnnnnnnnnnnnnnnnnnnnnnnnnnnnnnnnnnnnnnnnnnnnnnnnnnnnnnnnnnnnnnnnnnnnnnnnnnnnnnnnnnnncaaatatgctgccacatttaaatttcattttaaagttggcatggtggtatatgcctttaatctcagtactcagaagcagaagcaagtctttagatgaatctttagagttcctggccagccagggctacccagaaagaccttgtctcaagaaaaccaacaaacaacactcccctccccaccccccacccccgaaaaaaaaccaaaaaactttattttaatattttgtttataaaggctgctttggaggttataatttgtcttcttcagaaatgccttgcattttcttctttgatactgatatattcaagtttttatgtgcagtaaggggcataaacattattagagataaaataccgatggaaaaaacccatcccagagtaacatttacagttgtttccgtcacttacaatacagtagctgccatgatactccatgtcttgcttaaggtttttaaggttttcctggttttgtttgtttggtttgtttttggtttgaatcagggtttctttgcttagccttgcttgtcctggaacttgatctgtagaccaggctagccttgaacttatagagatccccctgcctctgcctctgaggtggctctgcctgagtgctgggattaaaggcatgagccacactgccttgcaagttttctttttttaaaagttatgtattttatgtaagtacactgtcactgtcttcagacatatcagaagagggcatcagattccattccagttgttgtgagccaccatgtggttgctgggaattgaactcatgaccttgagaagagcagtcagtgctcttaaccactgagccatctctccagttccaagttttcctcttttttaaaaaaactattattatttatttttatatgtatagacattttgccagcatgtgtgtctccacgtgcctggtgcccgcagaagtcagaaatagatccccgaagactggagttatagatgattgtcagctattattcgagtgctaggaattgaacccaggtcatctagaaggagcagctagtgagtgctcttgaccactgagcccccttaactccagtcccctttttattttaaaacaaaaccaatcgtttttccttgtttcatgttgaatcttggtttatggcatttgtgtaattccaggatagaggtcggcacactggagatagctctgtaggcatcacattcatgtaaagatagtgggttcccagcccttttgttccctctttgacgcagggctattttttctagttctgtgtagttagcatggggcatctcaactttccatgagtttcttcacttgctggagatcttggctgtggttctttatttgctaaaaattcttttcccgaatgactctaatttactggtaattttttttttctgaggcagagtcctagtatataccctgactgccctggaacttgctacgtggactaggttgcctcaaacgattagcttgcctcttcatccttagtgctgggatcaaaggcatgtagtaccacatacagggagatttttttttaaagatttattttatgtatataagtatactgctgctgtcttcagacacaccagaagagggtgttggactgcattacagatggttgtgagccaccatgtggttgctgggaattgaactcaggtcccctagaagagcagtcagtgctcttaaccactgagctatctctctagccccagggagatttttttttaaagattttatttatttattatatgtaagtgcactgtagctgtcttcagacaccacagaagagggcatcagatctcattatggatggttgtgagccaccatgtggttgctggaatttgaactcagggccttcggaagggcagtcagtgctcttaaccgctgagccatctctccagcccaccaggaagatattttaaaaagcgaattttctcacctttagcacaatgtttatcatgttcactatttggaaattataaaagtaaaaatcaccaagtgtccagagattgtgtttgaaaactgtacatctttatactcgttttttttttaaatctatttatgcatttatgggatgtggaatttaataagaatttagttgtaattaacaggttacctaactcacagtgcctaccatgttgctttctttctgttgctcatgaagttaagaggttggcagccctaagctgctgtcatagcttagcaggccctcaaagactctggcctcagtcacaattcacctgactggttgatgctttccctgaggcattctgttcttcattccagtcacaccacctcaccccttgaaagaagcctaagaagattcaagattgtccttttaaaaagggcttttcagagccagatattgcggtagaccacgcctatgatccagctacacattagacaggcaggcagattcagtgagtccaggaattccagactccaccataataatgagacagatatcccagtcaacacttgttacttatgattggttggccagaatctggcctcagagctatcccagtttattacaagtaacaaggagaggaggaattggagacagaaggtgagttagataacaaggagctttttgcaaaagagaactttttctttgtttgttgtttgtttttgagacagagactcactgtgtagccctggctgcacatctcacctcatcctgtcagatcagcctgccaccatacccagctctacggaaaagtttttaagaaaaattacatgaattgaattacttcaatttttgtagcatgatacacacacactcctttagtgtgaactgaccattttttgctttccttataggtacggatgaaatccatgttcgcgattggcttttgttttactgccttaatgggaatgtttaattccatgtgagtaaccttttttatatgcttctgcctaataaatgttctgtttgtatgcatatgagcataacatttgtagtaatattgtatttgacagaatttcaaagtaatccacagccaaatcctttctcaaaaataacgaaagaaagccaagcattggcggcacatgggaggcagaggcaggcagatctctgtgagttccagggccagcctgatctacatagtgagctccaggacagccaaggctacatacacagagaaaccctgtcttgaacttctaccctctccccccaaaatattgaagaaagaaaacaaaatttcaaatgtatacattattcacatgtcaagaaaaatgttttcattgtatatatttattgtatgtgttataagtatactttgtacattgagcaagattttcccatactgcctgcccttttaaaattggcttatattcactatgcaaatgtacagtactggtgtatggtgtgctttgagcatatcctcactgtcatgtatctttcataatcatttgagagtatgcaggggagagagagcgcaagagctcaagtgcatatgttacaggatatttgatcacattgtgaaccctgagattgtgaactgtaaaaacctgctctggttgtgctatggctcagcctttgatcctagagctttctgtttactgtaaacaagtactgtactgtggcctgtctctagcacacggctttaactgtaaacaagtactgtactgtggcctgtctcgagcacacagctttaactgtaaacaaatactgtactgtggcctgtctctagcacacagctttaactgtaaacaagtactgtactgtggcctgtctcgagcacacagctttaactgtaaacaaatactgtactgtggcctgtctctagcacacagctttaactgtaaacaagtactgtactgtggcctgtctctagcacacagctttaactgtaaacaagtactgtactgtggcctgtctctagcacacagctttaactgtaaacaagtactgtactgtggcctgtctcgagcacacagctttaactgtaaacaagtactgtactgtggcctgtctctagcacacagctttaactgtaaacaagtactgtactgtggcctgtctctagcacacagctttaacccaagagctaaagaaagtcaacacaggtcatgtggccgagcaagcaaccagctggcagggagtgaacagaagtggacagaaaggagggcctttatgttgaaaggtatttaagacagtgtggagaagtagactttggtggagtaggagggtcagctgggtgctttctctgcctctctgagctagcaggttttcatcccagctctggctcctgaatcttttctggtaaaatcaaacggctgggatttttatttttaaaacaacatgcttgagtggaggtcagaggacaactggctggaatctgttccctccttccatcagatagttcctaggattttgaactcggttgtcagacatgatggcaaatgactttaccctctgagccatctcaccatccttctttaaaaaataacttcaatataattatgtaaataagaatttcattttaaacgaatacaatcacataatatgggcagtcagccccccccccccgtatgtgggagctgtcaaacaattctcacaggggtggcctaaaaccattagaaaacaaataatttacatttctattcataacagtagtaaaattacagttttgaagtagcaatgaaaataagcttggcagacacccgaggaactgtattaaagggtggcagcgttaggatagttgttgtcttagttagggtttccattgctgagaagagactccatggcaactcaagggacaacatttaattgaggctggcttacagcttcagaggttcaaccattatcatagcaggagtcatagcagcatccaggactggtagttctacaccttgttccaaaggcaaacaagaaaggactgtctcaagggtagcttggaggagggtctcaaagcccacccccacattgacatatttcctccaacaagactacacctcctaatggtgccactccctggaccaagcatatacaaaccatcacagttgagaagcactaatataataactttgtttgcttgcctttttttttttttttttttttttttgaggcagggtttctcagtgtagtcatggatgtcctagaatttgctttatagaccaggctggcctcaaactcagaggttttcctgcctctgcctcctgagtactgggattaaaggcaagcatcatcgctgcctggttcctaataactttttaaatctacttaaccgtgagaatgtttgtcagataaaagcctagacattatatagtctttaaagataattccgtatatccctctgtttttaaattgcttaccgatatgcttcttcagactgaaggtattggtataacaacattttgactcaaaatagagtcttaacaactataatcctgttcagtgatgaagtcaaggactgttgttgaaacagtgagtaacagagtggcgcaatcgtgtggcgctgccttgaagagctaggcacatccagagttcacttagctgatcattctcggaaccataggcctctagagctggaagacactggaagatgaaataactttatgggctatctagaaaccccatgatttctatcctataattctgttttccctcatttattatttttgtgtttattgatgaagggcatactacagtttgcatatagatgctaaaggataactttcaagagtttgtgcttgtagactatgtgggcttcaggcatgtcaactgttctatatagggccttctatgcttaataataatttattgtacatttttaaaaatatggaagcaaggatcttggttgttcccaccaccaaacgatagatagatggatggatagataggtaagtgtttgggagatagagaactgaaaaccatgttctgatcattacacattttatatgtactgaagtgtctgtcacactccctgtgctccatggcctgtaacagtatgtcacttacagatttaaagtgttgtcaggggccggccatggctcagtgagaagagaagcttatcgtgcaagcctggtgactgactggagtctggtccctgaagcctgcataaaggtgggcggagagaacccgttctacagaattgtcagctgaccgctgcacgcacccgctgtgcacacagagcaatagaagagactttgatcagttcattttgtagtgtttgatgtgttgtacttcttcatgtgtttgtttttgtttttgagacatggtttttctacacagccctggaactcactgtgtagaccaggctgacctcaaactcacagagatctgcctgcctctgtctcatgtttaatattctcatggaagagtagtttttgttaagtctgtttacattttgtagcttcgttctaagtgtctttagtatttcttatcttctagcttgactcttcagcatagaaggggctgtgatatcaccatcatcatcatcatcgtcgtcgttttcattcttgcttttaaaaaaaaatcaagacagccgggcactggtggcgcacgcctttaatcccagcacttgggaggcagaggcaggcagatttctgagttcaaggccagcctggtctacagatctagttccaggacagccagagctacacagagaaaccctgtctcgacaaaaaaaaaatacaaaaaaaacaaatcaagacaggattttgttgtgtagtccaggctgtccttgaaaatgcaattgttctctcttcctgccttccaagttctagaatcctagacttacaggtgtgtactaacacatttagcaggtcttttccttaaagcacctgctgtctatctataaatgttaagacttaaagtaggcatttaagagattatatttgggtttgagaggtggctcagtggttaagaccactgactgttcttccagaggtcctgagttcaattcccagcaaccacatggtggctcacaaccatctgtcatgggatccgatgctctcttttggtgtgtctgaagacagtgacagtgtgctcatatacattaaataaataaatctttttttttaaaagagagagactatattctagcctagaacgcagcggacttgagggcagcttccaatagacagtgagaacctgtctcaaaagaaagacaaaaaaagaccagagaagcagctctaatccagagagcatgttcccttcttgtctcaattctaggagtgtaagttttaaaagaagggttaaagaactggaagcgatcagcagtgctcaggcagttctgtttccaaatacctcccagcactccagaggcagaggcaggaggatcaggtgttcactcactccagctagggtctccccagactaaattagactctggtttttaaaaagaaaataatttcttttactgagtcagaatatggttccgaatccccctactcaagagtagcattcttgctctggattttctttttttttttttttttccgagacagggtttctctgtgtagccctggctgtcctggaacccactctgtagaccaggctggccttgaactcagaaattcgcctgcctctgcctcccaagtgctgggatcaaaggcgtgcgccaccaccgcccggctgctctggattttcaaagcttaagtgtacttaaggaaagtctaccttgcaccaactctttcctttattaggttaaggacgattgtttagctcttccttataaagtctcatggtcatctgggtggaacataattcttagactttgccaaggagctctaggggaagggaaggcaggatgattgttggggctgaagcagagagatcgcaattttgggcacagcttggcatatagcaaaatctcttaaaaaataattggtagttgggtaatggtggctcctttaatcccagcactcaggaggcagaggcaggcagatctctgtgagttcaagccagcctggtctacagagtgagttccagaacagccagggctacacagagaaaccctgtttcaaacaaacaaacaattgctgctgctgctgctgttgcttctccctacctgcagtgtatatggctgtctgtgtgtgcttgtgggggnnnnnnnnnnnnnnnnnnnnnnnnnnnnnnnnnnnnnnnnnnnnnnnnnnnnnnnnnnnnnnnnnnnnnnnnnnnnnnnnnnnnnnnnnnnnnnnnnnnnnnnnnnnnnnnnnnnnnnnnnnnnnnnnnnnnnnnnnnnnnnnnnnnnntgtgtgatgctgcagcacccccaagattaagaattataaacccccatcatttcttaggaggcaactattaggtttcagaagttaaaaatatccctcttcttagcatttttaaattttagaatatatttttcccccaaatacttattacttctttaaaaaaattgtctgtgttttgtggtgggtaccctcacatgtgttaaggtgcatatatggaagtcagaggtcagcttgcaggtggttctctcctttcaccctgttggttccaggatggaattcaggccaccaggctggacagcagccacctttatataatgagccatcttgctggcccctaaaaattatttttcattaaaatatgttaacaaaatcagatttcttgctagttaagaggatacactttttaaaatgtatatgggtgttttgcctgcatgtatgcacaaggtgtctgcagaggtcagatgaaatctcctagaactggagttataagactattgtgaaaatacccaattaaaaaaaaaaaaaaagactattgtgagccatggtgtgggtgataggaatcgaaccctgatcctctggaagagcagcaagtgatggcaactgctgagccatctctccagcccccttccctatattgtattgtattgtattgtattgtattgtattgtattgtattgtattgtattgtattgtattatatttgtttgtttgtttgttttgaggcagggtttcactatatagccttggttggcttgtaatttgctatgtgttgacccaggctgtccttgaactccaagagatccacctgcctctgcatcttgagtacttgagtaccttgcccagctaagaggatacttaaaaacagttattatctcagtttctaatagaccatatattaatagccatactgtacacaagacttttcggtcctctgtaatttgagtgtgctggatcttcctaccagaagcatggagaggcacttgtttcagtgctccaattagccgggtccttctgctcatcactgcaccttcagccctagttaaagtgtgtcctacctgtacccagacttcttcctgaaaaaactttgttgattttctaaaaataacagttctttgcctttttttatcttttcattttagatttgatggtagagtggtggcaaagctccccttcactcctctgtcttacatccaaggactatctcatcggaacctgctgggagatgacaccacggactgctccttcatcttcctgtatatcctctgtaccatgtcaattcgacaagtgagtgtccgtaccctcgattcactatgtatagctctcctttctgccactgctagatcacactagctctgcctctgtaacgctgggaacatttatctgctacgagctctttcagttgctcacctggaattccagtgtgttgttcacagctgtgttacatgcctgcaactctagttaactgacactagggatggggggcagctgtaaaaccaaacgtggctcccacaccccttcctgagcctcagttccttctcactggatctgagcacagtgactttggtcgttccagtatcatctctctcatgttctagtgccttttgtcagttcaagagtgttcactgctctggaggtggtgggacctgggagaatggagcctgaaaatgaggcagatgcatgcaatagccaactttcttcagagcatcagacaatttatactcttagatttaagaactcactttacagccggctgtggtggtgtatgcctttaatcccagcacttgggaggcagaggcaggcggatttctgagttcgaggccagcctggtctacagagtgggttccaggacagccagggctacacagagaaaccctgtctcgaaaaaccaaaaaaaaaaagaactcactttacgtgagtaaagtgtagactcacaaggacaagccaaacatggcacaaacatgcttttcacagaggcttgtaagccagtaccagtagccagctgtatacctgagggaagctcactcgtatctgttacacccgagaggagcatggcaacacattccaaggacagttctgtgtttccaggtcagaagacttttgtcttggtttcctaagttgtctcacaagcactccgaattccttacatgaaactccatttttggaaggtgttctgacaaatgtgttttgtacatctaccctacacctcccttcaacttctgcagacccactctgacatgtcccctcctggcttcatgtctccttccttcctaacctaacctaagtctatttagtgttgcctgtctgcatatggatatgaggccatccactgagggagcatgggcaacttagcagtcaccacccttccaaagaacagtgactctccctccctccctagctgccatcagttgccagtagctcctcagctaggggaagggccttgtacacctctctccaagcgtccacgctggagtttgactgatccacaactgccatgagttcatccagaagatagtttataatactcctccacatccttcttccgagacgttccctgaggcccggggaggggttgatatggctagcctgcatacagctgaccagtcacagtcacctgttctcaaccctttgcctagtttgggtctctgtattaaccactgcgcactggccaaggttgagagcagaagagaattgtagagagacttgttggccgtgctgccttgagtcagaaggtaagctcctcagcgggagcatggcgctctcagtctgctcttcagtctcttgtttctccaaacagtttaactttgcttcccactttctacctcatcgcagtaaccctgtcatttaaagccatcagagtttttacactgacttttattctggaaaatgacaaggactcatataattgacccctgtctctgcagaatatctgagccaaggttccttgtatattttgtctagacttctgtgtttgttggctgaacaaatgcgttatcatcttgtgttctctattgtataatttctaattgtgcttgtttctcagaatccttagctaaatacattgtaggtgcccaggaagtactggtcagtttctgttcttttaaattactttttgagacaatcttatgtatcctaagctggctttaaaactgatccccctgcctctgctttccaagtttggggtagaggcatgtgccatcacacctggctattaatgctcaaattttttgttttgttttgttttgttttattgatttttcgagacagggtttctctgtgtagccctggctgccctggaactcactctgtagaccaggctggcctcgaactcagaaatcctcctgcctctgcctcccgagtgctgggattaaatgtgtgcgccaccaccgcccagcaatgctcaaattttaaaagcaggaaattaatagcatattgtttgatttttctcacagttttatataatgtttttgtttttaattttttacagctgtctgggaagttatatttattataaaagaaatacaaactcagatacttctctagcctgacctattaatgattgatcttcctaactcatttaaaaaattctcattaaagtatgaaatatttaaagtattaaatatatgcaaatatatttaaatattttatgataaattaaaggggtccttgaagttgtatttgttacttcattatcttctgacaagggatgaaagtattatgtatatacaaaggagcctagatacgggcattctcctagtgtcttaaggccaacagacaacggagtgttgaaggacagatagtccaggagtataaggctgtgtatactgagtgccatttgttctgaaggccagcactctaacagaaagtgtggtgggagagtgtccactagactaagaatcagagcatatggtttaaattagaaccttttgagacagctcaggctggccttgaactcttgatcctcctgcctgcacctgagcactggaattctagctgtgcgtcatcacacctgctgctaacttaactttgctattttggagaacccattagtcctttccaaagtttagtggtttcaaataccaaatgaagggactgagaagagtaatagaacaatatccaaggttttcttagagatgctgtgagctttccgatagttggcagtgacgtaacacttgctcactcatcagccctctccgttccagtaaagtgcatgccgattgattctctagtcagacggctctgcatgagtactctttagacacccacgcctgtctgctccaaaagtctattgttttccaaaacctgtttatactgcttttacttgttattgtagttatgtaattaaatgaaatgttacattagtcaaagaaatcagaacataaaaaatgttttttatggaaactgcttcagtacttaaaaaaaactaaatacacttatattgttgtattagatgtagttaagataaagaaaagacacaaagttttaaaaatctaaggattttgggcctccaagttaggtaagtgttcttcctctgagctattatgtccctgcccctctggcactatttgcagtaaagactaaagtcagtcatactatactcaagggaaagcaagcccttgtattttataggctttgtgttaaaaataaaacattacagtggggcgtgggggcatatacctttaatcccagcactgggaagacaggcaagaggatctctgtgccagcctggtctacagagtgaattcctgaacagctagggctacacagagaaaccctgtctcaaaaagccaacggggttgggggaagtgagggggggaagaaaggaaggaaggaaagaagcaagcaaggaagggaggtaggttacctagagtgattgcctactacgaacaaggctataggttccatattcttggcacttcaataagaaccccccctctacccccctccccgtgtgtgtgtgtgtgtgtgtgtgcgtgtgtgtgtgtgtgtgtgtgtgtgtgtgtatgtgtgtgagattcattctacacagttggcatctttagattagcagcaccaggtcctgtcaagtatgtacaggtcttttggtttggtttggtttggtttggtttttggttttttttgaggcagggtgtctctgtattacccgggctgtcctgaaactcactctgtagaccaggctggccttgaactcagaaatccgcctgcctctgcctcccaagtattgggattaaaggcgtgtgccatcactgcctggcatatgtacaggtcttattgttgtgatcttcattatattaaaaaatgacaccatcagcccattgcaggtagctatagttttagtttatatgcattctctttgctgatgtatgtaaaacactctttatagcttatattaaaattggtttttactgtgcttgctatgttgtttctttacagaacatccagaagattcttggcctcgccccttcacgagctgccaccaagcaggctggtggatttcttggcccaccacctccgtctgggaagttttcctgaaggaaagcagaattctgaatttcctgtcatactttttagacattcacatcagacttacagagcacctggccacattctaggtttgtgttatttctcagctatggatatgatcaaatgagaacactgcttaactaatgggatagtgctatggtcacggatggcttctttagtaataagtgcactcactggttacatttggatggcttatgtaaccacaaacatcatctttcttgtctcacttgagtatttcagtgtatgtgccatatacacagaagcagactgtccatgaacattaggagaaaaatagtttatgtaacaacttcactgtaattagttgttgtgttttttaaaaagccaaatatgtcactttgtgttcgacaatgagccaaatttttagatgtttcagttagagaaatgtttgatttttttgcatattaaaaagagtattttctgtaatctgaacataaggataagcattggcccaaaaagctaaaataaagttttgtcatgttcttttaccagccttgtctcctgttcaaaatgtgggattgtcccagtgtacactttgaacgtgttccagttggctttctggtgttttgtcaaacactggccagaaccagaagcagcttaggggaggaaaggggttttcagcctatgcttccgggtcatagttcaccattgggggaaaagaggttagaactccagcaagacccaaggcggaagctgtggaggatggctaccagctagctaactctgccttgctctcagttcgcctcctcttagcagccgggcccacccacctagaaaagctcacatactgtaactgtgcagggttggagcaggccctcctccatcactcaccaatccagagactctcacagacatggctacaggccagtctgacctagggaacttcttagttgatagtccctcttgccaggtgactctgggttccataaaggtgacagtagaaacagtacgaactgtaagcttggaaaggaaagggacagtgcagtgaggggaactcgtgcttgtctcgaggactcctgcttgactggcagcagccgctgacggaagaggaagggctgcttcccctttactggagagtagtatggagttccgtcccagcactagatgctcatgggcactgccttgctgtttctagacctttctgcgagcataatatgtgctgctatttcaaaggaagatccatcgtgagctcaaactgcccagggtaggatctttctttccttctctgacttgcattccctttatcaaatgttcatttaggattgcagggtttagaacaggaactatggatggggagaaccacacacttacccatgggcatacacacacacacacacacacacacacacacacacacacacacacacatacacacacacacacacacacacacacacacacacacacacacacacacatatacacacacacatggaagtcccaacagtagtgcaagcgttagccagcagtgtgagtgaagtttctggaatgtaccgattttgatagggaacagtgaagattgtttggggtacatcccactggggactcagtcgtcgaatcactgagatttcgggtaacagttctctgattttaattttcagaggctgctttttaagtgacttggtagtgttgggaatcacacctgggactgtgctccttgcagataagcactgcgccactgagctctgtcctcagctccagagattgtactgtaatttcacgttacagccatacagggtttttagtgggtttctaggccaccagcaaaaatctgagtagatggaggtggttgtggttgtttactgagtgtaactgtgatcataagactccacatgggagaaccatgggcaggtgctaaggttatctgaagtaatttaattttaaaccagtgctggggtcatcgagaacacccctgcagtagtccttctggggagcagatgaagtcctgtgtgtgtgtgtgtgtgtgttgttgattagagcacagccatggcaaggacccccgtgtctcagacccatgggaatggcaagaccaccttgtgcaaggtttctcagacctgtgcatagttgggttagacttctctcccaaaatttctatttaagcttctcatataagtcacttgttaaataattaacagacctatttatgcctcagttttctgatctgggaaagagttaataaccttgtgaaagccctttacagtctccatgtagctgactctggacagagtctgcctgactcctgcccatcttgctttggttcctacagtttggattgcataacattggtctacttgttcttttaattagatatgttggttacatagtatttgcttctatgaaaactaaattgaatggtctagattgacctaataagtcaagcttcctgttcaggccaccattacagaatagcatccatggccctgtgctaccccatggccatgggcctcaacaatggctacaaggtgacaaagaacgtcagcaggccagggcatggttatgccagggggtgtcctccaccaacacaccagattcctgccggacctgatcctggaggcgtgccccttcacaccgtaggagtggtgcactgaaggtctccagggacaggtgtgtgttcatcattcaaacttgaggacttgacccatggtgggaggagcgaacagaagtctgaatgttgtccttaatttcgtcacacactgtggctcatgagcactcacatcatatacatctcccacacacatgctaaaaggaataaataaaaagttaaaactaaggtgaatgctgaagccacgggtggaagtttatgcctgtaataccagcacttaggattggcagcaggaggatcagagaaggtcaagtcaacagcctgagatatttgagaccctgtctccgtaaaacaagcaacaggtttagagatttttacatgatttgtcctcaaatcccatactagtagatcagaaaaccagcaaacactctgacccttggggttcgggttccttgtctttctacctcatagctgcagtgctgactcctttggtcctgttaaagtcttcagttacttagcgggagtctcgagttccactgccccgtgttcagatggcttcatggaaggtaagtacaaactcttagaaaaaattgtgactaatttgttaaaatatttccttgctccgataatccgatctgaatatttttattaaaaagccttctttaatgatgaattaacgcttcctttaatttattccactgttgccacactgtaaggaaggagacaggtgcaagtctagtgagatgataatcaaatggccactttttgcaggtggaagctaaatatatttttgtatggatccaggattcattggctgctgaagaaattcaatagagtcaagggctttttttttcttagtgcaaaagtagctttcaggtttataattatttcagccattttctgaacagctaaatcgaccttcacagctgtcttatgaagagagctaagaaatcgcggagactgcttgacctggtggtagaagattccattcacaggaaaaataaatgcgttttaaagcaagatgcgacaataaacacttcagcaccgtgcttttcctgcttgctttctaaactacaacccagggaaaagcatctattatcacaatccaaataaagaagtttcttgaaatatttccctcttccatgcattttgaatattgttccttcatttctcaaaaaaaaaaaatgtggtcataacccacagattttactgtctcctaagttctgattgcactagacagaaaaataagcccattctactggggtagggtcggtaagagtttcctttctcggtggacttgaatattataagaacggggaactgagtgtggtgtggtgagttactcactcctgtagtcctggctcctgagagactgagagcagagtcacctgagttcatgagttggacacaaagacaccccctcttttttgtttcttgttttttttttttttttttcgaggcagggtttctctgtatagccctggctgtcctggaactcactctgtagaccaggctggcctcgaactcagaaatccgcctgcctctgcctctcaagtgctgggattaaaggtatgtgccaccactgcccagctttttggggttttgttttgtttttgttagaccctgggacagtggggaacactgctgtcatggtgcacgtgactgacccagtacctcatgatgtttcttcatgattgacgaagtcaatcacaccattccctgaagggtgtgggtgaaattagtgataagatcagacctatctctgagaggagactctggaggagaacccagccgggtctctcaggaattgtatgtgagatagcaacatatatctctgctaagtccagatcacaagttatatcaagccgcatgtcagcactctggggatggccacatcttcttgggaatgtgtcctttctgttcttcgatctgcactaggggcttggctcaatgataaatacgtgaaacattttaggggaaacaaaagcaatctaggttggctatggcttaattttctgcagtcagttgttctacctcagagacaatccccaaagagagactagtttgcctcactccctctgtccaaaggcctcgtctagtaaatcttgctgataaagtgcaaggcttgtggttgaccctcgttcggttgttcctaggcttagatgcactcagtggtcactagatacttcaagctacaccacttaattaaaaaccttctcttcttctccaatgataaatgcttatctgaatagagaagagttactgaaacaacaacaacaaaaggttaaaacatctagaagacttgaaataatgaggattcttgcatccgctcaagaaagttcatggctgcagacagatcatctccgtaactcactcctcagccacagctcagccctcaaatgttcttgtactgtgaatatctggatggtgattttttttcccccccagtcttgtcagagctactcagcagccattgagcacagtgtcctgggcggagggaggtaagcagtaatactggcaagaagacgccttgccatcgaggtgcacagacaagggaagcattggttctgtttggggaagtcttggacgactgtgtcagtgaaggttggttagaagtctaggaggaggtaggaaaccaccagtgagaggagaaagagggatggtggtggtgggtgtgtgtgtagggtgggggctggaggcgtatcagggagggtgggtttggacaatgtatattacacgtgtatgaaaatgccatagcaaggcgggcagtggtggcgcacgcctttaatctcagcacttgggaggcagaggcaggtggatttctgagtttgaggacaacctggtctacaaagtgagttccaggacagccagggctacacagagaaatcctgtctcgaaaaaactaacaaaaataccgtaacaaaacacatacttttgaatgctaactaaagtggtacaacataaatttcagccaggcatgagggcccacgcctgtaatttcagctcctccaaaaggctgagaagagattggaagtaccaggcctgcctgggcaacttagatcctgagtcaacaatacaaagttaacaatggaagagtatttgtctattttctggggtctttggctggccaacaatttcctttagggaactgttggactttcattttgccatagccggaagctgagagaacagctcggaagaaggaagggctggttgcgattgttgtgattcatgttttcagttcacaggtagccctcttctttcagggccgtgacgagatgtatattacagtagaagaacgtggaccagcaaagctatctacagtatggtgtctgagaagacagggaagggctcccagcgaccccacctcctgctttcaccccttcccaataagcccattatattaggaatatatcagggactccatccatcaatgaaggaggagctaccaggagccagtcactgccccaaagcctgtcagctggcagccatatatcaccaacacttgatcctgtgaggacatttcacactcaaactttgacaggacacttagnnnnnnnnnnnnnnnnnnnnnnnnnnnnnnnnnnnnnnnnnnnnnnnnnnnnnnnnnnnnnnnnnnnnnnnnnnnnnnnntgctgtgatggttctactgactgtcaccttgatgcccatctaaaatcatttcaggagacaagcctccaggcatgcctgcaagggactgcgtagattagcttcactgacttttcgaaaggccaaactgaaggaaaaggggaagggagctggtttggcttgctttattctagcttcctggatgcaagggccatgtgaccagaggcctcaggcctccggtgctgtgacttctctgtcacagtagactacatccttgaccactttacataatcagggtaccaatcttatctccagtgactgggatctaagaaggcaggaagaaaagaatgaagttcttgctgttttatctgggtgtgttcatgtgttactagggatcggacccaggttcttgtacatgttaggcaggtgctgtgccattgatctagaagggttgtgtttttttttttcctagaagatgcttaatctttatcactttttggctgtttactagaagagatatttcatgtttttaacacatactcgagtgcatgcatgcacctcagaggtgatggatggtcataagcttgaccctggtgatcctatccctatctatgggcatcagagcaccccactctacaccttacataaaaccaatgtcataaaaaagacataggtgcatgagtgtgttgcctgtgtgtatgtctgtgtgcatgtctgtgttgccctcggaggtcagaaggggctgtctgtcgtctgtaactggagttatagacaactgtgggccaccatgtaggagctgggagttaaacctgaagtagtgagtgcttttaatagcctggctatctttccagcccccaaaccaatttgaagctacaggaataaaaagggaaattctatgtgtttccaaacctcactcttcataaagcttcctcctttctgatactgatgcacagtctacccactgtttccttcctccttggcatttatttcctttgctgctcttttttttttcccccccgggggaacctggagtccttactttatttcctccctatgtagagttatctgcaaatcatttttcctgtattttgtccaattttatggttccttaaagcagaaaaactggctccagctttctctgaaagaacatgaagtctcccgcggctgagaccaaaggacatggagcaaagtggatcctagagcgccacccagtggctctgacgggaactttatattgcctgggttctctcggatctttcctagcaactcccctagcaacccatgagtcagtcccttggatgcactgaagattttaccacctggagtatttttgccctgtttttcttattctgccaccatttccggttcctataatatttgttcgttggtcagtccattataaatagctgccacttagcaaggtcacaatgccagatattttaacatctttcacagttccttacaaatgtgtatcacttcctcttaacacacaagtgaaaactcggtgaagggactaagcatcacattcaaattcatttgttaacggacagaatcgagattttcctcttttcattacatcatcgacagcagtggttctcaaccttcctaaggctgtgacctttaacacagttcctcaggtcgtggtgacccccaaccataacattatctcactgctacttcataactaactttgctgttatgaaaagtaacataagtatctggtatgcaggctatctgatacgtgacccccgaaggggtcaagaccctcagcttgacaaccgctgacctaaggagtccttagggaagcaatgctcccttccaggtcattccaacaattacttcccagaaactgatctaatcactagctaagactttgcattattgaatacagaagtctcggaacaccagctcccatgccctgtaaatctgcttttctaaactgtgcacgcctttaatcccagcacttgggaggcagaggcaggtggatttctgagttcaaggccagcctggtctaacagagtgagttccaggacagccagggctacacagagaaaccctgtctcgaaacaaacaaacaggggctggtgagatggctcagtgggtaagagcacccgactgctcttccgaaggtccagagttcaaatcccagcaaccacatggtggctcacaaccatccgtaacgagatctgacaccctcttctggagtgtctgaagacagctacagtgtactttacatatattaataaaataaatctttaaaaacaaacaaacaaacacccaaaaacaaaaaaacaaaaacaagccgggtgtggtggtgcacgctttaatcccagcactcggaaggcagaggcaggtggatttctgagttctaggccagcctggtctacacagtgagttctaggacagccagggctatacagagaaaccctgtcttgaaaaacaaacaaacaaacaaacaaaacaaacaaacaaaaaaaacctgcttttctactagctggaatctacaacttcaatccttcccatatttccttttgctgttttctgccaaccatagtaaagctaattcaggtacacactgaaaaaggccttctcagctattgtgccgagtaggcttcgggtgtgtttgtataaaatcactctgcatgcttagtgttagtataaaagatcatagctgatggtgttcgtggtagagcacttgcctagcattgacagggctctgcattgaaccctcagtactgtgaaaaagaaaaaagagtctgttgtaaatacggattcaaagagacttcccaattacatcattataagctagactataggggctggacagatggctcagcagttaagagcactttcagaggacctaggttcaattcccagtaacagctgtttgtaactccagttccggggattcggttctcttttctggcatccatgggcactgcatgaatctggctcacagacatacatgctggcaaaacacccaatacannnnnnnnnnnnnnnnnnnnnnnnnnnnnnnnnnnnnnnnnnnnnnnnnnnnnnnnnnnnnnnnnnnnnnnnnnnnnnnnnnnnnnnnnnnnnnnnnnnnnnnnnnnnnnnnnnnnnnnnnnnnnnnnnnnnnnnnnnnnnnnnnnnnnnnnnnnnnnnnnnnnnnnnnnnnnnnnnnnnnnnnnnnnnnnnnnnnnnnnnnnnnnnnnnnnnnnnnnnnnnnnnnnnnnnnnnnnnnnnnnnnnnnnnnnnnnnnnnnnnnnnnnnnnnnnnnnnnnnnnnnnnnnnnnnnnnnnnnnnnnnnnnnnnnnnnnnnnnnnnnnnnnnnnnnnnnnnnnnnnnnnnnnnnnnnnnnnnnnnnnnnnnnnnnnnnnnnnnnnnnnnnnnnnnnnnnnnnnnnnnnnnnnnnnnnnnnnnnnnnngggggagtgaccagagaggcagagagagacttggcataggcttttgaaacctcaaagcctcagagtggcacacttcctctgacaaggccggtcctcccaatccctctcatagactaccactctccgagcctgtggaggtcactcttattcaaacgccacacatataaaataaaaatgtatgttgcagctaaagttggcagtccttattgtatatgttttctttgtatttgcttgtctttattcctatttctttacaaaggtttccctgcaagaagagtaagagaaactcacatgcccttggacagaagaatttccagtcagatacatttttttgttatccagcaaagatgaaaccagacccagtcattctcttagttaggatggctattgttgaaataaaacactgtgaccaaagccacttgcggagggaagggtttatttggcttacatttccatattgctgttcatcaccaaaggaagtcaggactggaactcaaacagggcaggaacctggaggcaggagctgatgtgagggccatggaggggtgctgcttacaggcttatcatcatggctggaccggcaggcttgctccccaccccatttcgggctgactttcaatagatggcagcgagggagctgctctgctacatacaaaaccccgacccagaagcaggtcgtctacgaatggtttagcgccaggttccacacgaacgtgcgttcaacgtgacgggcgagagggcggccccctttccggccgcaccccgtttcccaagacaacggctctccgcaccggatcccggtcccgacgcccggcggggggagaccccgcgccgctgcggggaggacgcggggaccccgccgagcggggacggacggggacccggctatccggggccaacggaggctccttcggcgctgccgtatcgtatctac

SEQ ID NO: 638 - DNA, 1617 bp, Mus musculus
ccgttccttccaataaaagcccggccgcagcaagcgagttgtgcagcccttctcctccaacggcgtccccggcatcataaaggctggtttaaccagcgcccgaggactcctcgactcggctcgcccagcccaggaccggggcgagcccccagaccctgacgctccgcacgcggtggcctaacttttcggccacggaggcggggatgcgggtgaagtccagccaccgtgtgacagggttctagtgtgaggtaggcgatcgggctcggagagcaggtaacgcactgccgaggtcgcaacgccgccgccaccacaccgccatcctccgaccgacctggctttccaactctcgcgagaccgggcctggcgcgcgccttcggcccccgagacttgcgcgttgccgctctctcccgactatggcggccagacggcgggagtgaagcctgtagttccgggtcggcgccccggaagcggaagtgtagactcggggctgtcaaagttgtagcgctcctcgagggtcggtcccgccacgtctcttcccggtctctctggctctggagtgctttccccccgcggagggtgggagcgcggggacagacgggcgagatgagcaccatgtttgcagacacgctgctcatcgtctttatctccgtgtgcaccgcgctgctcgccgaggtagagaagaagaaggaaactataacagagtcagctggtcgacaacagaagaagaagatagagagacaagaagagaaattaaagaacaacaatagagacctgtcaatggtacggatgaaatccatgttcgcgattggcttttgttttactgccttaatgggaatgtttaattccatatttgatggtagagtggtggcaaagctccccttcactcctctgtcttacatccaaggactatctcatcggaacctgctgggagatgacaccacggactgctccttcatcttcctgtatatcctctgtaccatgtcaattcgacaaaacatccagaagattcttggcctcgccccttcacgagctgccaccaagcaggctggtggatttcttggcccaccacctccgtctgggaagttttcctgaaggaaagcagaattctgaatttcctgtcatactttttagacattcacatcagacttacagagcacctggccacattctaggtttgtgttatttctcagctatggatatgatcaaatgagaacactgcttaactaatgggatagtgctatggtcacggatggcttctttagtaataagtgcactcactggttacatttggatggcttatgtaaccacaaacatcatctttcttgtctcacttgagtatttcagtgtatgtgccatatacacagaagcagactgtccatgaacattaggagaaaaatagtttatgtaacaacttcactgtaattagttgttgtgttttttaaaaagccaaatatgtcactttgtgttcgacaatgagccaaatttttagatgtttcagttagagaaatgtttgatttttttgcatattaaaaagagtattttctgtaatctgaacataaggataagcattggcccaaaaagctaaaataaagttttgtcatgttcttttaccagcct

SEQ ID NO: 639 - protein, 275 aa, Mus musculus
AIGLGEQVTHCRGRNAAATTPPSSDRPGFPTLARPGLARAFGPRDLRVAALSRLWRPDGGSEACSSGSAPRKRKCRLGAVKVVLEGRSRHVSSRSLWLWSAFPPRRVGRQTGEMSTMFADTLLIVFISVCTALLAEVEKKKETITESAGRQQKKKIERQEEKLKNNNRDLSMVRMKSMFAIGFCFTALMGMFNSIFDGRVVAKLPFTPLSYIQGLSHRNLLGDDTTDCSFIFLYILCTMSIRQNIQKILGLAPSRAATKQAGGFLGPPPPSGKFS

SEQ ID NO: 640 - DNA, 61648 bp, Homo sapiens
  misc_feature (1)...(61648): n = A,T,C or G
ggcaacctacagaatgggagaagatttttgcaatctacttatctgacaaagggctaatatccagaatctacaatgaactccaacaagtttacaagaaaaaaacaaacaaccccatcaaaaagtgggagaaggatatgaacagacacttctcaaaagaagacatttatgcaaccaatagacacatgaaaaaatgctcatcatcactggccatcagagaaatgcaaatcaaacccacaatgaaataccatctcacaccagttagaatggcgatcattaaaaagtcaggaaacaactggtgctggagaggatgtggagaaataggaacacttttacacgttggtgggactctagttcaaccattgtggaagtcagtgtggtgattcttcagggatctagaactagaaataccatttgacccagccatcctattactgggtatatacccaaaggattataaaacatgctgctataaagacacgtgcacacgtatgtttattgtggcactattcacaatagcaaagacttggaaccaatccaaatgtccaacaatgatagactggattaagaaaatgtggcacatatacaccatggaatactatgcagccataaaaaatgatgagttcatgtcctttgtagggacatggatgaagctggaaaccatcattctcagcaaactatcgcaaggataaaaaaccaaacaccacatgttctcactcataggtgggaattgaacaatgagaacacatggacaggggaaggggaacatcacacactggggcctgttgtggggtggggggagggggagggatagcattgggagatatacctaatgttaaatgacgagttaatgggtgcagcacaccaacatggcacatgtatacatatgtaacaaacctgcatgttgtgcacatgtaccctaaaagtataataaaaaaatttttttaatctacctatgacctggaagccccagtttcaagtgttcctgcctttccagattaaaccaatgtacatcttacatgtattgattgatgtctcatgactctctaaaacgtataaaagcaagctgtaccccgaccaccttgggaccacttgaggctgtattacaggtacatccttaaccctgtcaaaataaacttcctaaatggattgagacctgtcttggatacttttggtttacttctggtattagagaaatcatacactatttgttcttttgtggctagcttatctcacttagtgtatcttcaaagttcatccatgttataacacatgtcagaatttctcaaggcagaatgatatcccattgtatgtatataccatattattttatccattcatccattgatggacccttgggatacttccaccttttggctactgtgaataatgctgccatgaacatggatatataaatatcttttgaagtccctgctttcaattcttttggtagatactagaagtggaattgctggatcctatggtaattctttatttagtgcagtggcatgctcatggctcactgcagcctcaacctcctgggcacaggtgatcctcccacctcagcctcctgagtagctggaactacaggcatgtactattacacctggctaatttttgtactttttctagagacagggttttgccatgttgcccaggatgatctcaaacttttgggctcacaagatccacctgcctcagcctcccgaagtgcagggattacaagcgtgagccactgtgcccaaccttaggtttaattttttgaggaacaaccatactgatttcccatcccgactgtatcattttatattcatcccagcaatgcataaggggttgactttcttcacttcctcactaatactttttttttttttttgagatggagtctcggtctgtcgcccaggctagagtgcagtggcatgatctcggctcactgcaacctccacctcctgtgttcaagtgattctcctgcttcagcttcctgagaagctgggattacaggcatacgccaccacacctaatttttgtatttttagtacagacagggtttcaccatgttgttcatgctggtcttgaactcccaacctcgtgatacacccgcctcggcctcccaaagtgctgggattacaggcatgagccactgcacctggccctgttttgtttttttttaaataactgccatcctaatgagtgtgaagtggtttgttttgcaattccctagttagttatgttgaccatcttttcatgggcttatcagccatttgcttatcttctttggagaaacctttgtttaagtcctttgcccatttttgaattgggattttatttggtgagttgaaggattttaaaatgtatttataatggattttaatcccttaccagatatatgctttgtaaatatttctcccattccatgagtttccttttcactctgttgtgtcctttgatgaataaacatttttaattttgataaagtccaatttattttttgttgcctttgcttctggtgttatattcaataaatcattgccaaatccaatgtcatgaaggttttcctgttttcatctaagagttttagcactttcatttaagtctttgatccattttgagttaattttgcatgtggctatcttaaagataaatcgtgttgggaaaactggattatccacatgcaaaatacaccatttattgaaaagataaatgctgttgggaaaactggattttttttttttttgactcagtctcgctctgtcaccccaactggaatgcagtggcacgatcttggctcactgcaacctcagcctctcgggttcaagcgattctcgagcctctggctctcaagtagctgggattacaggtgcccgctaccacacccagataatttttgcatttatagtagagatggggtttcaccatgttggccaggctagtctcgaactcctgacctcaagtgatctgcccacctcggcctcccgaagtgttgggattacaggcgtaagccactgcacctgaccccaaaaaaactggatatttttagattatttattttttagacatttagatttatcatttaggttatttatcttttaaatacatggtgttgggaaaactggatatccacatgtaaaaatggagaaaactggatatcctttctccattgattgactggtcttgacaaccttgtcaaaaatcaattgaccatatatgtgagggtttagttctgggttctttattctatatgtctgtctttatgctaggactacagtgttttgattactgtagctttatagttaaattttgaaatcaggaagcatgagaccttcaactttgttctcttgcaaaattgtttggctatttggggtactctgagttttcatatacattttaggatgaatttttctatttctgaaaaaaagtcactgggattttgacagggattacctaatgaatctgtagatcactttgagtagtatcaacatcttaatattaactgtttcaatctatgaacacagtgcgtcattccacttatttctatattctttaatttgcttcagcaatgtttgtagttgtcagtgtacaagtcttgcctctttggttaaatttattcacaagtattttagttctgatgctgttgcaaatggaatttttaagatttcctttttaaattttacatcgaaatgcaactaaattttgtgtggttttgcatcctgcaactttgttttttagttctaacagggttttttgggtggaatctttagggttttgtacataaaagatcatgctgtctgtgaacaaatcattttaccttctcctttctgatatgatggcctttttaatttttgccaactgaacagactggtcccaaatatggttccctgatcactgatgaggctaaatatatttttataaggaagcattaataccagtcccataatagtaaaatttacatatgatgttcagataaatataaagtcctaagtttcagacttcatctctaaatcttagggtctcattccccctcttctgttcctaatgaatgctatggtagaaaacttttgaagactaatttgctacagcattaagcttaagcctttctattagtctttcaaatgcacaacatgattcttaacctttattggtttataaacacctttgagaattggatgaaaactatgaaacttcaactcagaaaaaaatggacacatgaagttttgcatgtattatcaggaggagatgtacggctctcctaaaattcaaccatgaggctgggtgtggtggctcaaccctgtaatcccagcactgtaggaggcctagacgggtggatcacttgaggccaggagtttgagaccagcttgggcaagatggcgaaacaccatctctacaaaaaatacaaaaattagccgggtatggtggtgcacacctgtagtcccagctattcattgagcctgggaagtcaaggctgcagtgaggatgattgcaccactgcactccagccaaggcgacagaacaagaccctgtctcaaaaataaatacaggtggctgggtgcagtggctcaggcctgtaatcccagcactctggaaggccgaggcgggtggatcacttgaagtcaggagttcgagaccagcctggccaacatggtgaaatcccgtctgtactaaaaatacaaaaattagccaggtgtggtggtgcaggcctgtaatccctacatgggaggctgaagcaggagaatcacttgaacctgggaggctgaggctgcagtgagctgagattgtgccaccgcactccagcctagataacagagtgagaccctgtctcaaaaacaaaacaaaaaaaaataaagttcaacgatggacctcttacagatacaacgtggattcactttagtcaatcctatttctattaaacacataatctctttctatattttagttgtttttactatatactaactcccacatcctaccactttgttcccaactcaatgcttttgatcactgcttgtgtcctaattgaattttaccctttcttcaaggtccacctaaaatttccaattcttccaagatatttctccaacccactgtcttctctcccaaaagtatcattcactcattcgataaatacatattgtgcagcttctctgtcctagacgatgttccaaaagctgaagattgcaacaatgaatacagtctgtcctaaaaaaaacagtgctcagccaggagcaatggctcacacctacagtcccactggtttgagaggtcaagacaagactgcttgaggccaggagttcaagactagcctgagcaacatagcaagacccctagctctacacctgtgcacacacatacacaaattagctgggcgtggtggcacgcattagttaatcagctactcccagctactcagaaggctgaggtggaaggattgcttgaggactgctttagcctgggagttcgaggtcatagtgagttatgatcgagtcactgcattccagcctgggtgacacagcgagattccatctctaaaagaaaacacaacagtacaggattatccaactagccgatgaaacatgtatttagggcacacatgcacagactcgagggaaaacatttggaaaaaataagttcaaaaataataattaaaatatatttcaccttagtattttatttttaattatatttgggaagagaccttatgatcttctcagtgcccagggtttctgaaggtcttcatctagtcctgctagcccagtaggaaaaaaaaaaaatcttctcctaaaaaccggattcctctcctgttttctctgatatgaatttattcaggtatctaagaaaaaaatctgcgagctgccccccaattccttcttcttcccaatcttccacacccagtcatctttgtatttgacaaagatcactactgcctaaatgagaagaatggcctgaaggggacaaaattgggtatacaattggagaccagttagaaagctgtaatacgagtggagataatgatgaactgaattgaagtgtagtagaggggactgaaagatgtgtaaaaagatatgaaaagggggaaatccatggaacttgcaaagtaaacgcgagataaagagggagttactgaagatagttcccttatttttggcttgaaaaccagttagatggtggtgctactcattaagagaacaagggaatattggagtttggggaaaagaacacaatagattgattctggtatatccacagacagaccatgtaccttctaaacactttccttacatatttttttaaaaataaaatcctttaaatttacatactattatgacattttacattccagaaaaaccaaggcatggtatggtgaagtaatttgcctaaaactgcacatctagttaaatggagaagccaggatttgaatacaagtagtctgactccagaactttgttcccaaccctatacaaacctcacggtaattcctgaaggtagatatttttacttatactttacagatttaaaacaatgaggctcagataaattaagtaacttgctaaaataaggtagcttacatgcagtggggctaaaattgaaacgtaaagttcatattgtttcaaatgtcagagtgtaagcaggtatttataattctcttataatcttttacaatgcctagcttagtattaaatgtgtatttaaagaacagtattgggctgggcgcggtggctcatgcctgtaatcccagcactttgggagaccgaggtgggtggatcacttgaggtcaggagatcaagaccagcctggccaaaaaggtgaaacgctgtctctactaaaaatacaaaaattagctgggcatggtggtgcatgcctgtaaacccaggtactccggaggctaaggcaggagaatcgcttgaacccgggaggcagaggttgcagtgaactaaaattgtgccactgcactccagcgtgggcgacagagtgagattccatctcaaaaataaattaaataaataaataaaaatgaagcacagtattggctgggcatggtggctcatgcctgtaatcccaacactttgggaggctgaagcaggaggactgctttgagccctggagttcgagaccgagcctgggcaacaaagtgagaccctgtctctagaaaacaaaacacaaccccaaagcaacaacagtattattattactaattctactaataatgtaagaacaggcttagctcccattcacctttcacagaaagttacttgaagatgtaccacaacatcaagtataaactagaaacaaaaatgtggtttcaagagaatagtaaaattaagtcccaggacaaaagtcttcctattgtactagagattggaggaggtcagtgagctttgggagagcagtcctcatggggaaagctttgaaatctaaaaattagatagtacaactaagagcttagagaatttgggaatataacaaagaaaactagtagaatctagaaaagatgttatctgaacttgtctctagcactgttcctttttttttttttttttttttttttttgagaccgagtcttgctctgtcgcccaggctggagtgcagtggcgccatctcggctcactgcaaactccgcctcccaggttcgcgccattctcctgcctcagcctcccgagtagctgggactacaggcgcccaccaccacgaccagctaatttttttgtatttttagtagagacggggtttcaccgtgttaaccaggatggtctcaatctcctgacctcgtgatccgcccgcctcagcctcccaaagtgctgggattgcaggcgtgagccaccgcgcctgacttctagcactgttcttaaacaaggggcatagtgtcatgacatcattaccctagaaaaggaagtgtatcctagcagtccatggttgtaaacatttacacaggaataacttaactgcttattaatatatttcatattttctcattttttcatattttaacatctctgaatgggattcttcttacaatcaatggtgtgtcatggtttaattagttattttttcctctttagtagtagataaaataatgatgcgtcttacaatgaatagcatgttgaatttgatgaattgtgtgtgccaagcactgcttgaaatgctttataatatacttttcctcatccagtcttcatagctgatgttaccaccattttgaaggctcaaagatgctaaacaataggttctaggactgctgtcaagtaagtggcagagcaagaatttaaaatcaggtctgatttccaagatcatgctcttattgttatctcagcacttaccttgggtgatacaaaggtgaataaaaacctatccttgtctgaactgctcaaataaaggtctagctcaaatatgatctttctgaaacctttccaactccccaggaagaatacatcttgttttcatctgtaccccctcaacattttaagaatacctctataatacctataatcttattatattatataatctccctgggcccttagaagtcaggaatattctcttaaccatccttttgaccctacagtgcctaccacagttcttgacatatagtagaagctcaataatgtttcttaaaaaggagacagggtctctgttgctaagtctaggagacaagaaatgcacataaagctaaaaaaaagtcaaaagtagtgtttaggagaattatatatttaagtgcagtacagtttaaaagaaccaatgagggccggccacggtggctcacgcctgtattcccagcactttgggaggccgaagtgggtggatctgaggtcaggagttcaagaccagcctggccaacatggcaaaaccccgtctctactaaaaatacaaaaaattagctgggcgtggggacgggcacctgtagtcccagctacttgggaggctgaggcaggagaatggcttgaacccggaggcagaggttgcagtgagccgagattgtgccattgcactccacctgggcaacaagagtgaaactccatctcaaacaaacaaaaaaacaccaatgataggaggaagtacaagaggatacagctcagccagcttccaggttttcacccatacacacacacaccccagtgtgaaaaagctgaaaccgtctacaatggctgaaaccacgctgctgagacatttttgaattttaattagttagcaacacttataaattaagtttcacataaaacccaggatttctggattttcctgagaaacgaagacatctcagaaactgggtgctcattctcctagagaaatgggttggatttgggtatcaaattctcctttcagatgaacttaatgctcacttatccatcgtagtaacttccaccatttgtttaggctcagcttgcataagataatttattttctctcgccagtctaggcatctgggtttaagaccccttctctagatacattactcactgcactatcacactatgaattttcaggcatccgtgctttgacttccactttgcctagaaagtcctttgctatctccaaaagtactcctactcccctaaggcactgcttcaattcctttcattagcttcttctgaccactctctcaaccgtgtcacgcagcactgtggtaatacctctattaaaacccttatcagagcgtatgcacaagcttctcctcttcgcgctgacgttcgctccttgaggccagcggcccacaactaactcatttcgcggttccagcttcacgtccatgccctggcacctacacccagtcgttcagtacgtttgcggaagtcagtcttcttacttcacggcaaacccaagctaaactaatattacgaccacagaagttgggctgaggtagaagtcaagactatcccaataactggattctggccgagaaaaaggcgcgcgccagcaccccagtcagtaaaaactaccgggcaaagttcgccgccgccactatcctcctctggctctgaaatagttccaattctcgcgagattcggcctgactaccagcccttcagctccagtgagttgcgggttggtttcctctagactctcgtggccacaccgttctccgatacgagcctttccggtgctatgccccggaagcggaagtgcgatcttcgggctgtcagagttggtctgttactcggtggtggcggagtctacggaagccgttttcgcttcacttttcctggctgtagagcgctttccccctggcgggtgagagtgcagagacgaaggtgcgagatgagcactatgttcgcggacactctcctcatcgtttttatctctgtgtgcacggctctgctcgcagagggtgagagcgggtatttctcagacgtttgatcagtccccgggaggaagggccccggggtcccctgtgccaccaggggaaagatcgcgagccttacttgcttgagaggctcatctactccacttcagggaatctctgggcaactcgtgaacaggagcaggaggggagtatggagtcgattgccgagttttctttggtctcaggtagatttcacttgcgtatttgtggagacaccttcacatcatgttactgttgttttggctgaagagtcagttgtattagcctttgaaaaaagttaactatgggtaaatacaaagcgaaaagttggaattcctccttctccaacagtaaccactttgtttgttgtgatcattccagtcatttctctattaacatgttgcttttaatgttttaggcataacctgggtcctggtttacaggacagacaagtacaagagactgaaggcagaagtggaaaaacagagtaaaaaatgtgagtatggcaacacattagaaataatttcaacacgtcaagctcattaagtccatgttcacaataaatattttaagagcaccagctgatacaaagatgaacctgacttgaagcctatttagaaatagaagacttttatgcaaaatgtgtaataccaactagagggaagtgaggggcgtagcagatacatgttatgtgctgtggtggttctaaagaagaggttcaatctggcgcagtggcttactcctgttaatcccagcactttggaaggctgaggcaggactgaacttaggggtttgacaccagcctgggcaacatagggagacctcgtccctacagaaaaaattagctgggtatggtggtacacacctatagtcccagctatttgggagactgaggcatgaggatcccttgagcccaggagattgaggctacagtgggccacgatggtgtcactacactgcctcctgggcaatagtgagacttgtctttaaaaaaaaaagaagaagaggcttcattcagttgtgaggaaccatggtagccttcataatgctgatggccttgcagttccttgtggatagttagaatttggatagagaatgaaatggggaaaggaaattccaggtaaagaaataacatatgagcaaaaatatggaaatcttaacatttaaggcatgtttggaggatgatatgtcattatgactggtgtcaaggtaagtggtgtcttcagagataagccgagtttcagttgggttagaaagttgaagaggtgtttaaggaaaagattaaaaacaagaagggtttgttacctttgaaataaagcaggaattccacaggactcagctaaaggtacagggtgaatggttccttataggcctgatttagttttctctcttctttttttccttataaggattaaatataacttttgtttcttagaattcctacaactttctgtattctgtgactttttcttatatcttcataggggtttgaagttttttttcttaaattaccatatttgatctacacagcaaccatttgtggttactcgtataaatattacctccatgtcataggaaagaaaattgagcctcaggatgataatgacaacttacgtcacagagcaaacaaagaattagagaccagactcaggcttttaaaattacagcttactgttccttaatttactcagtgttgattatgtacctcagcatatctgggccaaactcgttatctttaccttcacaaacatgatattcttccaggatttccctatcttggtgatgggtacctccatgcttccagtagtgtaagccagaaaccttgatatgctttattaatttggctccaggacaccatactttcggttttgctgctctccatcttactagtcatcctttttttattttttatttatttatttatttatttattttttgagacagggtctcactctgtcacccctcagagctcattgcagcctggacctcccaggcttaagcgatcctcctgcctcagacttctgagtagctgggactacagatgcacaccaccatgactggctgatattttggagagatgaggtcttgttctgttgccagggctgatctcaaactcctgggctcaagcgatcctcccggctaggcctcccaaagtgctgggattacaggcatgaaccacagtgcccagcccttactgatcattcttctgcaatttacttgatggtttcatttcttgacctcccgttgttgggagtgacacaaaatttagtttttttctctacattcacttccttggtgaacttatcttttggctgtattggccagtgactcccaaatttatgtctgtggccctctcttcttaatacaagattcatatatccacgcatcaatttgttatgtcagctagaatgtttggtggacagctcagtcccaacacgtcccaaattgaatacttgttcctcatgtctaagcctgtgtcatttgtagccttctttatcttggtcaatggcatttctgtccttccacttgctcaggccataattcttgtgtagttatcttttactcttcttacaacccacatctagtctgtctgcagatactgttgggtttcctttttgaagaaacaccccaaaccagtaaaggttcagaaagcttccgatatccagaatctgaccacttttcattagctccagtgttaaccactgtggtctaagcaccatgatcttttgcatggattattgcagtagtttccaacaagtgttcctgtctccctgaagtctgttctcaagatgacagccagaataatctttttaaaagcctatttgatcatgtccctttcactcagcagaaaagccagcatcctacagatgcttcctttttaccattctgatattctttcttctcacttaccctgcttcacccacactgtccagcttgctgttctttacacatactagccatactcttgtgctgggacctttctagtggtgattccttctgcttagaaatgttcttccctacaatatgtgctgggctaatcctattaccttcttcaaatctttgttccaacatcacctctgactcttaagttgaccactctatttaaaactgcaaggcagggcgcggtggctcaggcctgtaatcccagcactttgggaggctgaggtgggtggatcacgaggtcaggccttcgagaccagcctgaccaacatagtgaaaccccgtctccactaaaaatacaaaaattagctgggcgtggtggcacatgcctgtaatcccagctacctgggaggctgaggcaggagaattgcttcaacctgggaggcggaggttgcagtgagccgagattgcatcactgcactccagcttggccaacagtgcaagactcttgtctcaaaaaaaataaaaataaaataaaactgcaacctgcccatctcccctactcctaatattccttaccctgttctattttttctgttgcttttattactttctaatatactgtatgatttacttatttatcatgttattgcttattgtgtatttctacctgctagaatgaaaactccactagggcacggttctttgttgttgtttacctatgtatcctgtttacctagaacactgactggcacatagtaaatgtttaacaaacatttgttgacttgaatgctttcttcttttgccccatatatgcagtccattaccaagccctattgttgttttcctgaatagttttcagatcatttcacatctcttcatttctcccatcaccacctagtctaaacttctattatatttcatttaatctgctgcagtaacctcctctctggtccatctgcagccactcaaatttgccccctataatgcatctagggtaattttttaaaacacaaatctgattatgttacttgtctttcttaaaacctttcaatttcttcacattgctttaggataaacatgtggcctgtaaggtccagcacagcacagtaccaccctcccttctcctggctacatcttgtatcatattctctcttgctccctattctctattcattcatgccttttttctgtcctctgggctagtcttatggtttcctactacaggcactttgtatctgttgttcctcctacctgcgataagtttcccttctcattttgtttagtaaactcctactcattcttcagatctcaaagccttatccagtctcccagacagggccaaatcttcctatcatagtttatgatttatccacatacctctccttagagtggttgtcacaactgcagttttacctatatatgattatggtcatcagggtaatgtctctctcctcaacaaaactgtaattgctatgaggacaaaggccattgtatccacagtacctaatgcagtgcctggcacatattagatacttgataaatgtgtatttaataaattatctgtgtagcataacatcacatatattctttgtgaaaaattgttctgctatgatcctatgctagttggcagcatgcaatggcatccctgtatacatttcttcatgtcatttatatcattgagtagttttatgaaatacaaaacaaatttagcttcaaattggtttgaatattnnnnnnnnnnnnnnnnnnnnnnnnnnnnnnnnnnnnnnnnnnnnnnnnnnnnnnnnnnnnnnnnnnnnnnnnnnnnnnnnnnnnnnnnnnnnnnnnnnnnnnnnnnnnnnnnnnnnnnnnnnnnnnnnnnnnnnnnnnnnnnnnnnnnnnnnnnnnnnnnnnnnnnnnnnnnnnnnnnnnnnnnnnnnnnnnnnnnnnnnnnnnnnnnnnnnnnnnnnnnnnnnnnnnnnnnnnnnnnnnnnnnnnnnnnnnnnnnnnnnnnnnnnnnnnnnnnnnnnnnnnnnnnnnnnnnnnnnnnnnnnnnnnnnnnnnnnnnnnnnnnnnnnnnnnnnnnnnnnnnnnnnnnnnnnnnnnnnnnnnnnnnnnnnnnnnnnnnnnnnnnnnnnnnnnnnnnnnnnnnnnnnnnnnnnnnnnnnnnnnnnnnnnnnnnnnnnnnnnnnnnnnnnnnnnnnnnnnnnnnnnnnnnnnnnnnnnnnnnnnnnnnnnnnnnnnnnnnnnnnnnnnnnnnnnnnnnnnnnnnnnnnnnnnnnnnnnnnnnnnnnnnnnnnnnnnnnnnnnnnnnnnnnnnnnnnnnnnnnnnnnnnnnnnnnnnnnnnnnnnnnnnnnnnnnnnnnnnnnnnnnnnnnnnnnnnnnnnnnnnnnnnnnnnnnnnnnnnnnnnnnnnnnnnnnnnnnnnnnnnnnnnnnnnnnnnnnnnnnnnnnnnnnnnnnnnnnnnnnnnnnnnnnnnnnnnnnnnnnnnnnnnnnnnnnnnnnnnnnnnnnnnnnnnnnnnnnnnnnnnnnnnnnnnnnnnnnnnnnnnnnnnnnnnnnnnnnnnnnnnnnnnnnnnnnnnnnnnnnnnnnnnnnnnnnnnnnnnnnnnnnnnnnnnnnnnnnnnnnnnnnnnnnnnnnnnnnnnnnnnnnnnnnnnnnnnnnnnnnnnnnnnnnnnnnnnnnnnnnnnnnnnnnnnnnnnnnnnnnnnnnnnnnnnnnnnnnnnnnnnnnnnnnnnnnnnnnnnnnnnnnnnnnnnnnnnnnnnnnnnnnnnnnnnnnnnnnnnnnnnnnnnnnnnnnnnnnnnnnnnnnnnnnnnnnnnnnnnnnnnnnnnnnnnnnnnnnnnnnnnnnnnnnnnnnnnnnnnnnnnnnnnnnnnnnnnnnnnnnnnnnnnnnnnnnnnnnnnnnnnnnnnnnnnnnnnnnnnnnnnnnnnnnnnnnnnnnnnnnnnnnnnnnnnnnnnnnnnnnnnnnnnnnnnnnnnnnnnnnnnnnnnnnnnnnnnnnnnnnnnnnnnnnnnnnnnnnnnnnnnnnnnnnnnnnnnnnnnnnnnnnnnnnnnnnnnnnnnnnnnnnnnnnnnnnnnnnnnnnnnnnnnnnnnnnnnnnnnnnnnnnnnnnnnnnnnnnnnnnnnnnnnnnnnnnnnnnnnnnnnnnnnnnnnnnnnnnnnnnnnnnnnnnnnnnnnnnnnnnnnnnnnnnnnnnnnnnnnnnnnnnnnnnnnnnnnnnnnnnnnnnnnnnnnnnnnnnnnnnnnacagggtttcactctgtcacccaggttggagtgcagtggcccaatcatggctcactgcagtcttgacttcctgggcttccatgatcctctcatctcagcctcctgagtagctgggaccacaggagtgcaccaccatggccggctgatttttgtagttttggtagagacgaggtttcaccgtgttgcccatgctgatctcgaactcctgaactgaaatgatcttcccatcttggcctctcagagtgctgggcttacagaactgagccactgcacccgacataaaatgttatttttataacattttaaaatgtgaaatttgacatttttcttttatgatctctcactagtatgttcattcaaaatctttctctctctctttccatgtacatgatgttttgttttattttattttggcgacagggtctcgctctcgcataggctggagtgcagtgaagtgaacacagctcactgcagcctcaagctcctgggctcaggagctcctcctgcctcagcctcctgagtagctgggactataggcatgtgccaccacactcggctaatttttcaattttttatagagacagagtcttgccatgttgcccaggctgatcccaaactcctgggctcaagcagtcttcccacttcaacctaccagagtgctgggattacaggtttgagccaccatgcctggcctgtatcttacctttctatttacctagaacagtatctgttacttagtcttccagaacaaacacacacacacacacacacacagatacacaaaacacatattttattttggccagccttttaaatttcatttgcaatattggagtcaagttgaattttacaattcttggataaagcagtgataccaattttgcttttagaattcagggacaaacttcatgtactaagggaaagagttctacccgctaattctctttaatgtaggttttagaaatggtacctataccgtactgtttgctattagtatactaagataatatgggtaacagataatataaataaactaagtaaaggtaatttttgacatatccctagtccatttacaggtgattaaagatggtaaatataatataaatacattacactatttctttttctttcttttttttattttttgagatggggtctcgctctgtcgccaggctggagttcagtggcgagatcttggctcactgcaacttctgccttccgggttcaagcgattctcttgcctctgcctcccaagtagctgggactacaggcacgcgccacatgcccagctaaattttgtatttttagtagagatgggttttcaccatgttggccaggatgatctcaatctcttgacctcatgatctgcccacctcggccttccaaagtgctggaattacaggtgtgagccgctgcacccggcccactatttctttttcaaaagcttattgttatgtaatcatgatagtaattgaaatgcatcagaaaaattggtatttttttttttttttttgagaaacagagtctcgctctattgcccagactggagtagagtggtgtgatctaaactcactgcaacctccaccgcctggattcaagtgattctcctgcctcagcttcccaagtagctggaattataggcatatgccactacgcccagctaatttttgtatgttttttagtagagacggggtttcactatatgttggccaggctggtctcaaactcctgacctcaggtgatctgcccgcctaggcctcccaaagtgctggggttataggtgtgagccactgcgtctgtctggtcttagcttttttggctctcctgattttcctgcagtgtgcgtataactatcttgtcacattactgtaattgtcatttgattatttcccctgactagattattctttagaaggtagggatcatttttttttcatctgcttagagttatttaggcagccaataactgagtgaataaatttctaccttctgtcataagagaatggaattacaattaaccctagttatctgagagaatagaaatttgaaaattgtgctttgaaactagctaaggtaatcatcctcagctgatggtctgttttcattatgattatatcaatacaattctttatgggtatttgattaatgatgcttataattgttgtttcattcttagaatattgtatctaccttttaccatcagtagctatgagagtggaccagttaacttaatcatgaccataatcagtcagtgtgtaactttcttgcaagcttctttcattggttcagctgtgataaagcatcctttgtttctttagtataatccagttaatttttactgtgttactatgttgtttacagtggaaaagaagaaggaaacaataacagagtcagctggtcgacaacagaaaaagaaaataggtaagatgagatattagtcaaaatgaaatttgggttttcttaaaaaaattaattcttagataatgaaaatataaaattattaatagtgataactcacatttctatgattttatggtttataaagcacatgcatactttatctcacttgattcttacccattttgtgaggtgtacaggacaaatttaagcagttcctctatttttgctcttagctttggaatttgagttttgtaaaatgacagttgtggcttttgaacttggctgagggtttttggcatagtttgtaaaagcatgttgttttttatatctgagatgattatttccacttaagtcttacttgtattcattgtttccatggcttccttactgagtattgactagtgatggaaatccaccaaggggtaggaaattttctgagtaattttgatatacttggagaaataatgaccatatcatgtgtttttagttttttagtataacttagaatttaagtaattctgtttccaaaagacaattcgtaaaggattgtatatgatttgtttttatacattatgacatttcttgattctgaaattaggaaaaaaattattatgagattgtgtatttgttttagaaactgtgtctgtatccctaggtcactgctgttacaacccaggggagaattccatgcgattagactatgtcaattcctgttctgattaaagtttttcagttagtatagcgatcctggatgttttttaagtggtctgttcacttaattctatgagaaaatgctattgaacatttacgctgtatgtgtcagttactcctaacagcattggagaaacaaagtagaaaaagattctatttttatgagctctatttagagagggaaaatagaccagaaaataaatgattactatgcaggatgataagtacttttttgtttgtttgcttgtttttttctgtttttgtttttgtttttttttgagacagagtttcactcttgtttcctaggctgtagtgcagtggtgtgatctcggctcactgcaacctctgcctcccgggttcaagcgattttcctgcctcagcctcacgagtaggtgggactataggcatgcaccaccacacctggctaatttttgtatttttagtagagacgggattttgccatgttagccaggctggtctcgaactcctgacctcaggtgatccgccgcctcaacctctccaagtgctgggcttgtagacatgagccactatgccggccaagagtcttgaggaacagaaatttaaggaacaacagaagaagtaaagttctgaaaaagtattgccagataagttggaaagtagtagtgtcacagaagttgagaggagagtgtcagggaggaggaagggcctgatgatgatggtaaatgtctaagaaatggaggttattagtgcttctagcaaaaatggtttcagtggcatgatgggggacagaagccagatcatatagatgaagaagagaatgcagacattgagaatgcagacagtgagaaaatgaagacattcaacatggacaactctttcaagtacctttgctataaagaataggaaggatataaaaatggaaggcagattatcctctgtccttaaattggcaacacggtgtatctgaattcaaatgatcttaacatggagtgtaaccttgaattgtttgctcaccccagaaaaactcatcagaagttataagaaataatatttattgccaggcatggtggctcacgcttgtaatcccagcactttgggaaaccaagacgggtgggtcacctgaggtcaggagttcaagactagcctgaccaacatggcgaaaccccgtctctactaaaaatacaaaaattaaccaggcgtggtggtgcatgcctataatcccagctacttgggaggctgaggcaggagaatccacttgaatctgggaggtggaggttgtagtgcgccgagatcgcgccattgtactccagactgggcaacaagagcaaaactttgtcgcaaaaaaggaagtagtatttatgaagagttgcttatcaaaatcttattagaaattatgagatgtaatatttatgaagaatttcttgaaagatgatctatccattctctagatttgtacattttaatcttagattaagccagactatcagaaatctgtaaacctaaactggattattttggacttcataaaacgcttttactgtatttcgccttggcatttgcattgttaggcttattatgaaaaattcagccaggtataatacaatttgttatagtactactatggaatatattcaaaaacatccacaacattacacaattgtcttttgataagaaattgtggaaactgtttctattagttttcaatatcaggaaaagtagcagttctcataagtaattgatttattttatcttacggacactgtgctcgaactgatttttgttttcctttgaatcggctgctgataagcctggaatgagacttgctcattctcatgcaagaaaatcatgagatttgctcatttggtgttcatctccagcaactttataggaccaattaaatgtatttttatgtactgatcctatatagtttcattattatctaacccttactttttcttagcccagattcctcacttgagcttatttacaaatatatactatatttgtatatatagtatatatttgtaaatatatatatagtatctggggaaaagggagtataaagagtaaagccactgcactgaaagaagggagttttcagtaagagggaagcagccagcaatattcagtgttccggagaagcaaaatgtcattgatttcactaggtgaagctctttgataacaatccttgagagaaccattaatctgcagtggaagcgtcctttgctttttaactgaagatttgatgttcccaattcttaatttcaggagcaaatgttttgactattttgcatttccctcttataagaagaaaaatgaatttacttttggtatatgaattttatatagtttgttttgttgtattccaaataaagaagtcataaggggtttatttgaaggatatacgtgatgagaaactcaggcaaagctgaactaagtggttacaggaaggcaggaaccgtggtaaagcaagtcctgcaagcagagcaagtcttgagaaaaagctggacagggatcttcactgtaagacttcactaatttttttggcattcagcttttgtcttcacctaaccttccctgtgtccttccccactcccaaccccttaggaatatctgctccagatgcttgtgtccttgggttctatctcagtattttcataatgtgatccatagattacctacatcaatattgcttgagatacttgtgaaaaatgaagggttctaagtattactcccagactttactgaatcaggatctctggatgtgggacccaggagtctacttttttctttttttttttttttaaacaagctgcccatataattcttaggcaaattaaagtttcagagccagtaccatattataacttttctatttctgttcccatagttaattgatttattttcccaaaattttctagcataaattcctgagagaggaatctaattggcccagctgatctttttatgtcataggtcatgggagagcctatggtttggctgctacttgggtcagcagtagtaggacagagggtgttataaatcttcatgaggctaacccttcaacaaggtatnnnnnnnnnnnnnnnnnnnnnnnnnnnnnnnnnnnnnnnnnnnnnnnnnnnnnnnnnnnnnnnnnnnnnnnnnnnnnnnnnnnnnnnnnnnnnnnnnnnnnnnnnnnnnnnnnnnnnnnnnnnnnnnnnnnnnnnnnnnnnnnnnnnnnnnnnnnnnnnnnnnnnnnnnnnnnnnnnnnnnnnnnnnnnnnnnnnnnnnnnnnnnnnnnnnnnnnnnnnnnnnnnnnnnnnnnnnnnnnnnnnnnnnnnnnnnnnnnnnnnnnnnnnnnnnnnnnnnnnnnnnnnnnnnnnnnnnnnnnnnnnnnnnnnnnnnnnnnnnnnnnnnnnnnnnnnnnnnnnnnnnnnnnnnnnnnnnnnnnnnnnnnnnnnnnnnnnnnnnnnnnnnnnnnnnnnnnnnnnnnnnnnnnnnnnnnnnnnnnnnnnnnnnnnnnnnnnnnnnnnnnnnnnnnnnnnnnnnnnnnnnnnnnnnnnnnnnnnnnnnnnnnnnnnnnnnnnnnnnnnnnnnnnnnnnnnnnnnnnnnnnnnnnnnnnnnnnnnnnnnnnnnnnnnnnnnnnnnnnnnnnnnnnnnnnnnnnnnnnnnnnnnnnnnnnnnnnnnnnnnnnnnnnnnnnnnnnnnnnnnnnnnnnnnnnnnnnnnnnnnnnnnnnnnnnnnnnnnnnnnnnnnnnnnnnnnnnnnnnnnnnnnnnnnnnnnnnnnnnnnnnnnnnnnnnnnnnnnnnnnnnnnnnnnnnnnnnnnnnnnnnnnnnnnnnnnnnnnnnnnnnnnnnnnnnnnnnnnnnnnnnnnnnnnnnnnnnnnnnnnnnnnnnnnnnnnnnnnnnnnnnnnnnnnnnnnnnnnnnnnnnnnnnnnnnnnnnnnnnnnnnnnnnnnnnnnnnnnnnnnnnnnnnnnnnnnnnnnnnnnnnnnnnnnnnnnnnnnnnnnnnnnnnnnnnnnnnnnnnnnnnnnnnnnnnnnnnnnnnnnnnnnnnnnnnnnnnnnnnnnnnnnnnnnnnnnnnnnnnnnnnnnnnnnnnnnnnnnnnnnnnnnnnnnnnnnnnnnnnnnnnnnnnnnnnnnnnnnnnnnnnnnnnnnnnnnnnnnnnnnnnnnnnnnnnnnnnnnnnnnnnnnnnnnnnnnnnnnnnnnnnnnnnnnnnnnnnnnnnnnnnnnnnnnnnnnnnnnnnnnnnnnnnnnnnnnnnnnnnnnnnnnnnnnnnnnnnnnnnnnnnnnnnnnnnnnnnnnnnnnnnnnnnnnnnnnnnnnnnnnnnnnnnnnnnnnnnnnnnnnnnnnnnnnnnnnnnnnnnnnnnnnnnnnnnnnnnnnnnnnnnnnnnnnnnnnnnnnnnnnnnnnnnnnnnnnnnnnnnnnnnnnnnnnnnnnnnnnnnnnnnnnnnnnnnnnnnnnnnnnnnnnnnnnnnnnnnnnnnnnnnnnnnnnnnnnnnnnnnnnnnnnnnnnnnnnnnnnnnnnnnnnnnnnnnnnnnnnnnnnnnnnnnnnnnnnnnnnnnnnnnnnnnnnnnnnnnnnnnnnnnnnnnnnnnnnnnnnnnnnnnnnnnnnnnnnnnnnnnnnnnnnnnnnnnnnnnnnnnnnnnnnnnnnnnnnnnnnnnnnnnnnnnnnnnnnnnnnnnnnnnnnnnnnnnnnnnnnnnnnnnnnnnnnnnnnnnnnnnnnnnnnnnnnnnnnnnnnnnnnnnnnnnnnnnnnnnnnnnnnnnnnnnnnnnnnnnnnnnnnnnnnnnnnnnnnnnnnnnnnnnnnnnnnnnnnnnnnnnnnnnnnnnnnnnnnnnnnnnnnnnnnnnnnnnnnnnnnnnnnnnnnnnnnnnnnnnnnnnnnnnnnnnnnnnnnnnnnnnnnnnnnnnnnnnnnnnnnnnnnnnnnnnnnnnnnnnnnnnnnnnnnnnnnnnnnnnnnnnnnnnnnnnnnnnnnnnnnnnnnnnnnnnnnnnnnnnnnnnnnnnnnnnnnnnnnnnnnnnnnnnnnnnnnnnnnnnnnnnnnnnnnnnnnnnnnnnnnnnnnnnnnnnnnnnnnnnnnnnnnnnnnnnnnnnnnnnnnnnnnnnnnnnnnnnnnnnnnnnnnnnnnnnnnnnnnnnnnnnnnnnnnnnnnnnnnnnnnnnnnnnnnnnnnnnnnnnnnnnnnnnnnnnnnnnnnnnnnnnnnnnnnnnnnnnnnnnnnnnnnnnnnnnnnnnnnnnnnnnnnnnnnnnnnnnnnnnnnnnnnnnnnnnnnnnnnnnnnnnnnnnnnnnnnnnnnnnnnnnnnnnnnnnnnnnnnnnnnnnnnnnnnnnnnnnnnnnnnnnnnnnnnnnnnnnnnnnnnnnnnnnnnnnnnnnnnnnnnnnnnnnnnnnnnnnnnnnnnnnnnnnnnnnnnnnnnnnnnnnnnnnnnnnnnnnnnnnnnnnnnnnnnnnnnnnnnnnnnnnnnnnnnnnnnnnnnnnnnnnnnnnnnnnnnnnnnnnnnnnnnnnnnnnnnnnnnnnnnnnnnnnnnnnnnnnnnnnnnnnnnnnnnnnnnnnnnnnnnnnnnnnnnnnnnnnnnnnnnnnnnnnnnnnnnnnnnnnnnnnnnnnnnnnnnnnnnnnnnnnnnnnnnnnnnnnnnnnnnnnnnnnnnnnnnnnnnnnnnnnnnnnnnnnnnnnnnnnnnnnnnnnnnnnnnnnnnnnnnnnnnnnnnnnnnnnnnnnnnnnnnnnnnnnnnnnnnnnnnnnnnnnnnnnnnnnnnnnnnnnnnnnnnnnnnnnnnnnnnnnnnnnnnnnnnnnnnnnnnnnnnnnnnnnnnnnnnnnnnnnnnnnnnnnnnnnnnnnnnnnnnnnnnnnnnnnnnnnnnnnnnnnnnnnnnnnnnnnnnnnnnnnnnnnnnnnnnnnnnnnnnnnnnnnnnnnnnnnnnnnnnnnnnnnnnnnnnnnnnnnnnnnnnnnnnnnnnnnnnnnnnnnnnnnnnnnnnnnnnnnnnnnnnnnnnnnnnnnnnnnnnnnnnnnnnnnnnnnnnnnnnnnnnnnnnnnnnnnnnnnnnnnnnnnnnnnnnnnnnnnnnnnnnnnnnnnnnnnnnnnnnnnnnnnnnnnnnnnnnnnnnnnnnnnnnnnnnnnnnnnnnnnnnnnnnnnnnnnnnnnnnnnnnnnnnnnnnnnnnnnnnnnnnnnnnnnnnnnnnnnnnnnnnnnnnnnnnnnnnnnnnnnnnnnnnnnnnnnnnnnnnnnnnnnnnnnnnnnnnnnnnnnnnnnnnnnnnnnnnnnnnnnnnnnnnnnnnnnnnnnnnnnnnnnnnnnnnnnnnnnnnnnnnnnnnnnnnnnnnnnnnnnnnnnnnnnnnnnnnnnnnnnnnnnnnnnnnnnnnnnnnnnnnnnnnnnnnnnnnnnnnnnnnnnnnnnnnnnnnnnnnnnnnnnnnnnnnnnnnnnnnnnnnnnnnnnnnnnnnnnnnnnnnnnnnnnnnnnnnnnnnnnnnnnnnnnnnnnnnnnnnnnnnnnnnnnnnnnnnnnnnnnnnnnnnnnnnnnnnnnnnnnnnnnnnnnnnnnnnnnnnnnnnnnnnnnnnnnnnnnnnnnnnnnnnnnnnnnnnnnnnnnnnnnnnnnnnnnnnnnnnnnnnnnnnnnnnnnnnnnnnnnnnnnnnnnnnnnnnnnnnnnnnnnnnnnnnnnnnnnnnnnnnnnnnnnnnnnnnnnnnnnnnnnnnnnnnntttttttttagtgtaaaatgacaatttgttcgtctcattacaggttcgaatgaaatccatgtttgctattggcttttgttttactgccctaatgggaatgttcaattccatgtgagtgtccttttatatgcttttgactaataactattactctatatttgtatgtatgttagcatgaactttttgggtaaaatattttattttgatgtaatttcaaacttaaagagaagttgcaagaatagtatatccattacctacattcacagttgttaatgttttgcttcacttcttttttttctttttctctcttttctttctctattatatgtgtgctcatccatacattatttatgtatttttcttaatcatttgagagtatgttgtaggctgtatgccccgtttcccataactacttctctgtatatttcctaaggacattttcttatataacttcaaaacaattatcaaaatcaagggaatttttgttttttgggtcttttttttttttgagacggagtcttgctctgtcacccaggctggagtgcagtggcgcaatcttggctcactgcaacctctgtcttcctgcgttcaagcgattctcctatctcagcctcccgagtagctggtactacaggcatgcaccaccatgcccagctaatttttgtatttttagtagagacggggttttgccatgttggtcaggctggtctcaaactcctaacctcaggtgattcacctgcctcggcctcccaaagtgctgggattacaggcgtgagccaccacgcccagccagaatttaatttttataaaatacaattacacaataacttttttacccttttaatattgagggtgttttatgtataagacataaggcgtaggcattatgggttctctatagagaatttaatatgttccctctttttcagttgcttactaacatgctgcttcaaaatgaaggtagtcataaaaagatcttttgcttcttaaaatagagtcttaataactataatcttgtttaatgataaggtaaattactgttgtctaaaccagcatatagcagaccagagtaattatggaactgagtttgacagaaaatatccaacgatgatagtaatttattatctttttgttgttgttgttcgggacagagtctctctctgtcaccaggcgggagtgcagtggcgcgatctcagctcactgcaacttctgcctcctgggttcaagtgattctcctgcctcagcctcccgagtagctgggactacaggtgtgtgccaccatgcctggctactttttgtatttttggtagagacggggtttcaccatgttggccaggctggtctcaaattcctgacctcaagtgatcctcccacccaggcctcccaaagtgctgggattacaggcgtgagccaccacgcctggcccaggctaatttttaaaaagttttttgtacagacaaggtgtcactgtgttgcccaggctgaatataaactttaatacagaagaatggttgttttgtaacctgctataatttttgtccacacaaaagtctgtgggcaatttttaaaacatgatatatgtattaatttctgtaacttactcttttttgaaatgtctttataatgttccattgaatggatgtacttttttttttttttctttttttttttgagacggagttttgctctttatgcccaggctggagtgcaatggcctggtctcaacacactgctatctccgcctcttgggttgaagccattctcctgcctcagcctcccgagtagctgggattacaggtgcgaaccaccacacccagctaattttttgtatttttagtagagatgggttttcaccatgttggccaggctggtctcgaactcatgacctcaggtgatttgctcaccttggcctcccaaagtgctgggattacaggtgtgagccattgcgcctggccaggatgtactctgtttaactaattttttattaatcatcataaagaatttttagatagtatgtataccaatgtatacttattattcccttagggtatatcctagtatttcgtgagttaaactttggtatatattgttccttagaaagattttattaatttatatctttagattattgccatcagtacttgtgaatggatctttctccttatacttatcatcactggaaattatgatgtatctgcttaaaatttgccaattgaatagttgaaaaataatatttctttcaaattttttcatttttttgataatttgtgtgagatttaacatcttttcatatacttactatgtttttccagttttaagttcctagttcattccctccacttgctccctgccttcttttttttgacgtttattttttatgttttttatttacaaggagttttttacatatagaggctattaaactctttttttggaaaatattttttgttgttaaagctgttactcttttccattatgtaagtaatgccattcgtcatatcagattatagaaaaatttttttcctgtttttttctattttcttatttatttatttaaagacaggttttcactccattacccaggccggagtgcagtggtgcagtcattgcccactgcatccttgaactcctgggccccagtgatccctacctctggcctcccagagtgttggggttacaggcatgagccactgcacctagcctacttgttatatttaaatatttgtttcgtctacaatttattttggtatttggtttccaactttactaagtttttaaccattgtcaatatcacgtagttgaataaatcatcttttccctgatgatttgaaatgacttgtttattacgtatcagtagcttcccaaaacttaggcagtggatcttaaccaggaatgtgcatcagaatcatatacgggggaaaaaaatcatatatggagttttataaaataattttcttatatgagtaatatataaaacttatttctaaaaaattcaaacacttatatagaataaaaagtgaaagtgaacccaaatagattgaaaacttagatccacacaaaaacctgtacacagatgtttatagcaggtttattcataattgccagaagttggaaggaatcaagatgtctttcggtaggtgaaaggataaacaaactgtggtacaactagacaatgaaatattattcagtgctaaaaagaagtgagctggtaagccatgaaaagacatggagaaatcttaaatgcataattttaagtgaataagctcttccaaaaaggctgtatactgtacgattcctgctgtatgaaaaaggcaaaactatggagacagtaaaaagatcaatggttgccaggagttaggaggaagggaaggatgactaggcagagcacagaggattctttagggcaatgagattattctttatgatactataatggtagataacatgttattatatatttgtccaaacccatagaatgtacaacaccaagaatgaaccctaatgtcaaccatggactttgaaactcacttggaaccaattgtgttccctgtgaaagcagcattctcatccatatgttttagtggtactcaattctcatcaccaggaattcaaaccttttttgtttcccttcctctccctcttcttttcattagacattactccatatctgtcctgtcccaaatttaatgatatgtactggattaaatctgaccctttcaactttctcttcctctcagttaacagcccctgttttctgtctgtgtagtcattcattcatccctccctctcttctcattcatcctagcaccagctcccatcctagtttcaatgattatttccttttttctcctttgctattactttttgcttggtatcacaatagcctgctttcgctccctcaggtgtctcctctctatccaacattgttaagttagccatcctcagaagcctgttactcattgcctaataacattatctgctactgattaaatagtaacccatgttggggactgtagtgaactttttatatatgttacccttttactggtttttttttttttgaaatggagtcttgctgtgtcacccaggctgaagtgcagtggcgtgatctgggctcaccgtaacctccacctcccgggttcaagcgattctcctgcctcagcttcctgagtagctgagattacagggactcgcccccacaccaagctaatttttgtatttttagtagacatggggtttcaccatgttggcaaggctggtcttgaattcctgacctcaggtgatctgcctgcctcggcctcccagagtgctggtattacaggtgtgagccaccacgccctgccttcccttttacttttaacagtcttctaagataagaattctaatctttattttacagatgaggacgtgagactctaagtcacttaacttgctcaaggtctccaagctagtaaatgttgagctggggtttaaccctgtctctcagactctaaagtccacacttatcaccatgcaaccctgactattgattttagtcagactccttaccctggctctcatgacattccatgctttggccccagcctgtttttcaaactattttcttatcattgcctactacgtactctgttttaactgtattgttcactgttcctggggcacttattctttcaaatgaattttagaatcaatcaagtgtcagcttcctctaaaataatcccttctgagttttgtctgaaattttattaaatttgtacattaattttgaggtattaaatacctttataatttttagtattcccatccagaaacatggtatttctgccaagtctattttatatactttctgtagtttctttccaaataagtataagtaatatttcatattttctagtttgctactactgtctataagtagcttatcaattttttttttttttttttttttttttgagacagagcctcacactgttctctgttgcccaggctagagtgcagtggcacgatcttggctcattgcagcctctacctcccgggttcaagtgattctcctgcctcatcctcccgagtaggtgggattacaggcaggcatcactacgcctggcttatttttgtatttttagtagagatggggtttcaccatgttggccaggctagtcttgagctcctgacctcaagtgatccacctgcctcagcctcccaaaatgctgggattacaggcgtgagccaccatgcccagcaggttatcaatttttgtgattttattttctaattggacatcttcctgaactctcctagcttttaatttgattctctagttttctagatagataatcatatgatcagacaaataatattgtcatcttttccaaattctcttttccctccatcccttcctttctctccatcactgttctctagttctattgtgcaatgaattagaacaaccagaagagggttaaatactcaaaggtaaaataccaacgatactgcagtaaagatgggaacaagatgaagagaatgcccatatcactgctatgatatttatgaaatttttaaagaatggaggttttcaaagctatatgcaagcatatgtgatatgttatccttaatagagttaataatataataagcacttatcaaatatttggtgattaagttattagaccttggaccagtattgaaatgccagattatttttgcagttcatcaatataaaatactagatgctgtgtgtgtgtgtgtgtgtgtgtgtgtgtgtgtgtgatataggtcttccaagctatagaagtcaaagaagtcaagtagagtatcttcaaggaggaaaattatatgaaagcttcattataatcaggtttcttataaaaggatatgttggcaggaaagaaggctattttttttttttttttttgagatggagtctagctctgtcgcccaggctggagtgcagtggcacaatctcggctcactacgacctccgcctcctgcattcaagcaattcttctgcctcagcctcccaagtagctgggactacaggcatgcaccaccatgcctggctaattttcttatcattgcctactacctactctgttttgtattgttagtacagagggggttccaccatattggccaggctggtctcaaactcctgacctcgtgatccacccgcctcagcctcccaaagtgctgggattacaggcgtgagccaccgctcctggccttctttttttgtttttatgtatattattttcagcaactttcttattcagaacactggcaaacaatagctttttatttgcttgttttgttttcccaaactagtggaggttcgcataatatattttaccaatattagtgctgtattcatgtttttgttctggtctttgtaccctgtacatttaaaaaaaatattgtgtcttagatnnnnnnnnnnnnnnnnnnnnnnnnnnnnnnnnnnnnnnnnnnnnnnnnnnnnnnnnnnnnnnnnnnnnnnnnnnnnnnnnnnnnnnnnnnnnnnnnnnnnnnnnnnnnnnnnnnnnnnnnnnnnnnnnnnnnnnnnnnnnnnnnnnnnnnnnnnnnnnnnnnnnnnnnnnnnnnnnnnnnnnnnnnnnnnnnnnnnnnnnnnnnnnnnnnnnnnnnnnnnnnnnnnnnnnnnnnnnnnnnnnnnnnnnnnnnnnnnnnnnnnnnnnnnnnnnnnnnnnnnnnnnnnnnnnnnnnnnnnnnnnnnnnnnnnnnnnnnnnnnnnnnnnnnnnnnnnnnnnnnnnnnnnnnnnnnnnnnnnnnnnnnnnnnnnnnnnnnnnnnnnnnnnnnnnnnnnnnnnnnnnnnnnnnnnnnnnnnnnnnnnnnnnnnnnnnnnnnnnnnnnnnnnnnnnnnnnnnnnnnnnnnnnnnnnnnnnctctacaaaaaaaaaaaaaaaattagccaggcatggtgctatacctctgtaatctcaccttcctgggaggctgaggcaggaggattctttgagcccaggaggtcaaggctgcagtgagccatgattgcaccactgcattccagcctgaatgacagagcgagaccctgtgtgaagcaaacaaaaataatatcccttacactcttaaaatttgttaacagctggcagatgctttaaggaaaaaaatctatggttagactaagaagggaaggacttgaactcccagactgccagaaaaaggactagatatagctacttatttagtagctgtatctactttttggcatctcttcctgaatcatttacataaagttgaaataacaggattttagaattgaaattttttttttttttttttttttgagatggagttttgctcttgttgcccaggatagaatgcaatggcatgatctcggctcaccacaacctctgcctcgcgggttcaagtgattctcctgcctcagcctcctgagtagctgggattacaggcatgcgccaccatgcccggctaattttgtatttttagtagacacggggtttctccatgttggtcagctggtctcgaactcccaacctcaggtgatccgcctgccttggcctcccaaagtgctggaattacaggtgtgagccaccgtgcccagcctgaaagagatcttaaaagtcatttaacacataacttctctcctaatacagaaagctcatcactaatgtctctaacagataatttgtcatcctttatttccaacaatgaggagcttagtggtttctgagataactagtacttttattgagtagtttttagagtttgaaaataattcgttttactgggccaaaatatgcctccctatatctgtacttgtgagcagtgatcctgccctctggagtcatagagtaagtgcacttaaagaaataatccacctattgtaaatcatctctctctttgcaccttccttcttctcttcccagtttttttctttattgtgctagacaccaatttctgttccttataacaagcttctattcctgtaggactttgagaggctgaggcaggcggatcatgaggtcaagagatcgagaccatcaaggccaacatcgtgaaaccctgtctctactaaaaatacaaaaattagctgggtgtggtggtgcacacctgtaatcccagctactcgggaggctgaggcaggagaatcgcttgaagcaggaggtggaggttgcagtgagctgagacggcgacactgcactctggcctgagtgacagagcgagactccatctcaaaaaaaaaaaaaaggaattatcagaagatttttcagatttgttgctggtttaaagtctcatgcatgttcaacttcatataattaaataacttatatataaagatataaaagattttatatcgcttgaacccgggaggcgaaggttgcaatgagctgagattgtgccactgcactccagcctgaccgacacggcaagactccgtctcaaaaaaaataaatattaaacatttctcatttttaatttctaatacagtaaatattaataactataagctacagaaacacaaagtttttagggtcctaaataatttgtcagtatataaaggggtcttgataccaaaagaattgagaatgactaatttaggaaaagattgatgagaataatctaggctcttctttacatcaccgtacatcaggttcatgtgtatttttagcatgtcaccctctctttgtttttcagagatcagagacttaaagctctatttctgtcccagattcttctttggaagtaagaaagttgtcagtcttccaaagataacaattctttttttttttttttcttttagatttgatggtagagtggtggcaaagcttccttttacccctctttcttacatccaaggactgtctcatcgaaatctgctgggagatgacaccacagactgttcccttcatttttcctgtatattctctgtactatgtcgattcgacaggtgagtgatcacatctaccatttaatatgtatatttttcccttgctgtcataccaattagcttttacttttataatactagaaatgtttacccattgttcctgagttctttcagttgctcattttagaatttcagtgtatcttccaaaagccattttaaatggctgtaggtctagatgactgatccttagggatgagaagtagtgataaaaccaaacatggattccacatcccattcttagagctctcaggctccttctttattacaactgcctaaagctgcaaaagtagagagtgggtttggtcttcccagtaccatttcttcattatataccagcaccatttagcggctcaggagcacaagtaagtttaacaatgtggtaattttaggttattcacagttgagataaagtttaggttatagaatttacatttggccaacttggtgatttgacattcgtagtgaaaaagagtgagaactaaggagtaaaagggttatgaaggcccggaagagagctataacattcgattagtggggaaaggttcaggcagaaaggtttagagaatgaagtggctttcgagatgggcctatggaagtgaaaaggtggccaggtgccgtggctcatgcctgtaattccagcaatttggtaggctgaggcgtgagaatcacctgagctcgggaatttgagaccagcctaggcaacattgtgagattccatctctacaaaaaatttaaaaattagctgggtatggtggcatgtgcctgtagtcccagctaccctagaggccgaggtcggaaggtcacaaaagcctgggaatttgagcttgaagtgagacttgattacatcactggactttagcctgggcagcagagcgggaccctgtctcaaaaaaagaaaagggggggagccgataattaaggtctctggctgaacaattctttattttagggcattattcagtttctgaacatattgccgttcggcaggctttgtagtggaaaggtttgcacatgcagtaaataggaacataaaattttccttacacttacacaagtgattctctttttctcccctccttctgaatactgtctgtggcagaagatttttggttgccctgtgtattagtttgttcttgcattgctataaagaaatacctgagactgggtaatttataaagaaaagaggtttaattggcttatggctctgtagattgtacaggaagcatgatgctagcatctgctcaacttctgggaagtcctcaggaaacttagaatcatggcggaatgcagaagggaagcaggcatgtcacatggcaagagtaggaacaagagagagaggtgggaggtattacacacttttaaacaaccagatactcgtgagaactcactcactatcacaagaacagtaccaagggggatggtgctaaaccacacaatttgacatgagatttggatggggacacagattcaaaccattatcaccctggaatgtgagaatcaatgggaaatcaaattatagttcatggctcaccaagatctttgtcattgtattgcttaatattttttcccaattcatatcccatcacatccccacaaatacagcactttgcccattctggcttgcttaatagttttcatgttacactcactcagatgtactttttgcttctgtttttccttatttctgaatgcctccctcttcttccttttaaacacaatcaagttttaaggcttccttttctggcacatattttctggcacttactgcattgtgaaggttagctataagaggagcatgactaaaatacagaaatatcaaaagactattataatagtgtagcaaaaaatcattatgttataaactataacagtgaaaagagggatgaaaagaatgggaaaagattgagaaataaatagaaggggaaaccagctgaacttagttattgatttaatgtgaaggagaaaggaaaaactaagaggactttcaggttttttattttggtgaccaaatggggactagtttcactaagagactgggaatagaagaaagaagagtatgttggttagaagacacgctgagtttgaggtgtttgttgaatagctaaatgattatgtccaccaataagttgtactcttgcttagctgaggtatatacttaaatttttgaaatggtctctgtaatagagctgccctagcccattttctgttgctgtaacagtataccacagcctggctaatttataaagacaatttagctcacagttctgcaggaaggccaagagcatggtgctggcatctactgagggccttcctgctacatcataagatggtggaggacatcacatggtgagaaggcaagagcgagaaccagagagaactcacttttatagcaaagccactcgtgataaggaacccactccagtgataatgacattaatctattcatgagggcagagggattacatttccaccacatgaacttttcggggacacattcaaaccatagcaggagtttattgtgaaagctaaggtaatgacaacacagatctcttttggtttagcacagatcctttgatctctgtggaatattggtctttaatttgttaagtctgaaattttaaaattgtggcttgggttgacatcttaataaaacacaatatgatgggccaggcgcggtggctcacgcctgtaatcccagcactttgggaggtcgaggcgggcggatcatgaggtcaggagatcgagaccatcctggctaacacagtgaaactccatctctactaaaaaaaatacaaagaaaattagctgggcgtggtggtggtcacccgtagtcccagctactcgggcgactgaggcaggagaatggtgtgaacctggaggcggagattgcagggagccaagatcacgccactgcactccagcctgggcaacagagcaagactctgtctcaaaaaaataaataaataagtaaaacataaaaaccacgatgtatatatttcactttaagcaacaaagagcaattctgagtttgttgttgttgttgttgttattattttgagacagaatctcactccgtcacccaggctggagtgnnnnnnnnnnnnnnnnnnnnnnnnnnnnnnnnnnnnnnnnnnnnnnnnnnnnnnnnnnnnnnnnnnnnnnnnnnnnnnnnnnnnnnnnnnnnnnnnnnnnnnnnnnnnnnnnnnnnnnnnnnnnnnnnnnnnnnnnnnnnnnnnnnnnnnnnnnnnnnnnnnnnnnnnnnnnnnnnnnnnnnnnnnnnnnnnnnnnnnnnnnnnnnnnnnnnnnnnnnnnnnnnnnnnnnnnnnnnnnnnnnnnnnnnnnnnnnnnnnnnnnnnnnnnnnnnnnnnnnnnnnnntacttgtgatggatcaatagtaatcttagatgcaccaaaaagtcaccatctaaaactgtagagttttcaaaatgaaataaatgttgttaagaattatcatttagagccaggcacagtggctcacacctgtaatcccagcactttgggaggccaaggcgagcaggtagcttgagcccaggagttcaagaccagcctgggaaacatggtgagaccccatctctacaaaaaatgcaaaaatttaactgggtatagtggtgcatgcctctactcccagctacttgggagtctgaggtgggaagattgcttgagcccgggaggtggaggttgcagtgagccgagattgcatcactgcactccagcctgggcaacagagccagaccctgtctcaaaaaaaaattatttaggaagttcaactcaagctggtctttacactccttttaattatttctaaaaatgtgatgagttgtgtgtcagttattttatcaggaatgcaaagctcattttcagtgcggatcggcaaactgtttctgtaaaggtctagatagcaaatattttaggctttgtggagaactgaagtgtacggtatatgctattaagttaaaataagaaaatctgcagatcctagactggtacagcctactgaaacatgcttgctgaatacaaaaaagagggggaggtgggcagcaaaaaacacaaaaaattttcatatgtttgttttcagttaaggaggatatatactaacactttttatttccacttgtccaggtgtatgcaaattcagtgtctagtgagggcctgtttcctgcctggttcatagagagtgccttctctctgcatgacacgcatgagaaaaaaagtctataaggactatagtattgcatagctaatgtaaaactgttgtatttgaaggatctgttcttttggtatatagttgtcttccccaagatcccagctgaattctaactacttattgcagcatcctcagtgatagtcatcttgcagataattttattacttaaattctaaaaacaaaaatagtctgaaatacttaaagcttggaaaaatcacagaagtcacctacctttatactttttgttttattaattgtaaattgtttctctacctattactcactgttagcttatgcacaagagaattatgaacatattaatatatccagtctgaaatgccttaacagcatttgaagtgttatcatggaatatatgcttcttcctttgaactaaaatccttattagcctgctatttccacatgttttatttgctttttaagatcttaggttacatgttgttgttttatttgctttttaagatcttaggttacataagaattgactctatggttgcctgcgaaatgaatagtcagaatatgaggatttcagaaactcaaattgtagactgtaccgtgattttcccatgaatgccattggcaaagaaataggcctggtttttcggttgttttgttgttgtttgtttgttttggagacagagtctcgttctgttgctccggctagagtgcagtgacgcaatcacagctcactgcaaccttcacctcccaggttcaagcaattctcccatctcagtttcctgagtagctgggattacaggtgcatgccaccacacccagctaatttttgtatttttagtagagacagggtttcaccatgtcggccaggcttgtctcaaactcctggccttaagtgatctgcctgctgtggcctcccaaagtgctgaacgcctggcagctttccaatcttaagtgttcttggcataggaaacatggaggcatgaacgtttgtaatggatatagggactactgaatctagagctgttggtgggctgtaacaggaagtgaagcttgtcactgagaaggattgcctgaatcttcacctcatggtatagcattaaggaatttcatttttctttcttgtgcttcttatagtgcaagtctgctggtgacaaattctcttaatcttcatttatctgaaaatatctttattttatcttcattcttgaaggatattttcattggacatagaattctggtttggcttttttgttcgttttaacctttaagcattttaaatgcctttccactgttttctggcctccattgtttctgaaaagttcttcatgtctttgtgtcctcgtaagtaatgtcacttttctctagctactttcagattttctctttgagattggttctcagaaatttgactgtgatgtgcctagagtatttttatttaaagtttttcctgctaggacttatggttttcattaaatgtagggaaatttcaatcattatttctttaactgttttctgcctcattctctctctcttcttcttctggaacaccagttgcttatatattagtcattttgggtattgtccaacaggacactgaagctatgttgaatttttttaaatctttttttttttctgttcttcagatgggataatttctgttgatctgtcttcaagttcacagactcctctaatctgtgttaaccctaagcctacccaatgatttttgaattttaggtaatatttttcagtttcagaatttttgctttatttggcatccttcctgagatttcttgtttgttaatatattatgagccatattttatgtccataattatttagctgctttaaaaaccttgtctgctgggctggtgtggtggctcatgcctgttcagcatttaggaagctgaggcaggagttcaagaccaagagcccaagagttcaagaccagcctggataacagagcaaaatctcatctctacaaaaaatacaaaaattagctgggcacagtggcatgtacctgtaatcccagctgctgggttatggggacttaagtgggaggattgctttagccctggagatcgggtttgtggtaagctgtgatcgcgcctttgcattcatgcctgggcggcagagcaagactctgtctcaaaaacaaaacaaaaaaaccttgtgtgctaattccaacatttggaatttggactccattccctgttctcttttttttgttttttgttttttttttttttgagatggagtcttgctcttattgcccaagctgtagtgcagtggcatgatctcggttcactgcaacctccatctcccagttcaagtgattctcctgtctcagcctcctgagtagctgagattacaggcacccgctaccatgcccggctaattttgtatttttaggagagaccgggtttcaccatgttggtcaggctggctagtctcaaacacctgacctcgggtgatccacctgcctcggcctcccaaagtgttgggattacaggcgtgagcccccgcgcccggcctgttctcttaagtaacagtatattttccagtttcttgatatatctagtaattttggatcatatcctggataatgtaaacgataggttgaagatattctggattcttttattctttggaagaagtgttgatatttttgtataggcaggcagttaacctggcatttgtcttagtccattagggctactataacaaaataccatatacaatagaaatttatttcttactcttctagaggctgagaagtccaaaatcaaggcaaattcggtgtctggtgaggtcctgtttcctgcctggttcatagagagtgccttctgtctgcatcctcacatggtggaaggcacagggcagctcttcgggaccttttttttgaaaggacaatcccattaaagagggcagagccctcataacctaatcacctccaaaagttcccaccttctaacaccttggtagtttggattcaacatatgaatttgtaagggaaacaaacattcagaccatagcagcactcaaactccaaactctcctttgtggtagatggcagctgaagtctcaggtcagttattttagtcttaactgggctgcttattggctgccttgtacatagtttaagaattaagcagacccaggcgtggtggctcatgcctgtaatcccagcattttgggaggccagggcgggtagatcacttgaggtcaggagttccagaccaaccttgccaacatgttgaaaccccgtctctactaaaaatacaaaaattagccaggcatggtggtgcatgtctgtaatcccagatactcaggaggctgaggcatgagaatcgcttgaacctgggaggcagaggttgcagtgagctgagactgcgccaccgcattccagcctgggtgacagggcaagattctgtctccaaaaaaaaaaaaaaaaaaattaagcagagatttgggggcagagtttatatgcaaaatttgaggctccttttttgttgtctctctgttttccaggattctttctctatttccagtagctgtggttttccagtagctttttgattcttcaaaccagtaagattatagtttattctgagttttagacactcttcacagtgccaactggggttatgccctccattatgagattttcaaaaaataaaacattttgtctttctgcactaagctaaaattcagaatattctccttgactgatcctcaaagaaggagctaaaagagatctagggacattttcattggaaagatacgggagaaagaggaaaggaaggaggaagtgagagggagagaaagagattgtcacttaatctcctgaccgcagcagaaaagacctttattacaaagagggcctttgatcaacctaagacagaaaatattcattcatcattacaaaggaagtgacattactctagtgcagatttgatgtgcttatctttcagaatttttatttccactttataagatatgtgttaagaaggtcccagaagggagcttccgttttctaccctattttatttgttttctgtattgggcttttatacatcacattttatttttcaaaaggcttctgttaatctctgtgaattgtgtgcaaaaaaacaaaacaaaacaaaacaaaacaaaaaacgatgggccgagcgcggtggctcacacctgtaatcctagcactttgggaggccaaggcaggtggatcacgaggtcagaagttcaagaccagcctggccaagatggtgaaaccctgtctctactaaaaatacaaaattagccgggcatggtggcaggcgcctgtaatcccagctacttgggaggctaaggaagagaattgcttgaactcaggaggtggtggaggttgcagtgagctgagatcacaccactgcactccagcctggacgacagagtaagactccgtctcaaaaaataaaaataaaaaagaatagaaatttattttaaaaattaaaaaataaaagagttattaaaggctttaagggtctgaaaatgattgatctagtcaaccctcttttttctaacagtaaggacattgagatttggtaaaatgaaaagatactcctattgttttattgtctagtttgtcagcactgtaacccaagttttctgattgctaacccaataatatttcagcgatatcaagcttgtacgataaggtttttttagtaaatatttaatctctacattatttttcccaaatagtctagtcagatataatgtgagagccctggtaatattggaaagggtcgttttgaagtgattagattttatatacagctttgttgatagagtaaagattacattgtgggaattaatgagatattgcgattaattggaagtgaagactggttgccagatgtcagagaaactaacagagtgaactgaggattgccataggtgtgttattttagctaaatgactaaggaataaaattcagcagaatgtgtttattgccattgacctgggtcttcccaaaatatccagttagcaaccaacaacttccgtttcttgatcactggttcttaatcatggtaaagaggaaagaacacaaatcctgtgtttgtatttttcaggttttcctgccagtagaagacacaattatgggaaaatgtttttcctttgtttttctcttctgggtatacattcttcatttgttaccctgttatacaggactggacaggaattcaaaataattgttttacatttttccaaaacttgattgcatcttactatattttgcatttctattttctttcatagcatctttattatatattaaaactcctatcttttagctaaatgcatatttctttctttttttttgttttttttgagatggagtcttgctctgtcacccaggttggagtgcagctgcacgatctcctacaacctctgcctcccgggtttcaaatgattctcctgcctcagcctcccaagtagctaggattacaggcgcatgtggagacgggtttcaccatgttggccaggctggtctcaaactcctgatctcagatgatccacccacctcggcctcccaaggtgctgggattacaggtgtgagccaccactcctggcctaaatgcatatttctaaactaaatcttgctaattaacaaggcctgaaaacttgacctcaagaagaaagaaaaattgagagattataggaaagcagtcaggttaagtttaatggatgagattgttgaaagatgtaatgagataatatatacaaaagtgcctgctgtacagtgtggtattcagtgagtatttattgaattacagcctgaccattggtatcttatttttcttatctacatgcaaggataatgatgtccacctcattaagttgtgaggatttaaatgaggacatacatataaaggtcttagaacaatgccttgcagagtgtaagtactcagtaactgttaaccattattattgttgttattcttttttttagcttcatactatgaccttcactttaaaatagcacccacaggaatatttttctttattttaaaagtattccatttagcagtatttcaaaaagttggggaaggcaagatatgagaaaaagtatacaactattattaatacaactgttatcttactatatattcttaaatactttatattcccttttatagaccttattttttagaacagttttaggttcacagcaaaattgagtggaaggtacagagatttcatatatatgccttgcccccacatatgcatagcacacccctctatcaactttctccaccagagtggtacatttgttacaattgattaatctacactgacatataattattacccccaaatccatagtttatgttagggtccattctttgcattgtacattctatgggttttttgcatagcaactatattttatatgtgtatgtttatatatatatatatagagagagagagagagagagagagagagaaaccatttgctcatttaacagcataattgtgattttttaaaaaaataggcctgttacacgattttttattcctttttttttttttttttgcttctttatgtgatttttttattcctaagataacagtctgttacagagaggtggcttaataaaggaaaactgcactttgagttatatcagttcactttctgacttgtaacctctccctacatcaactttctcatctcaacagcagggataactaaggactactatctagtccttagaactgtttgcaaactttaaagtgtgtagaaatgtaggatgttactactgtagagatattagtgacgtctggtccttttacctgtggctcttgcatcttgagaccatcacttagttcctacatgggttttaggggaaaagatttcactgatggaaaagcaggggaaatctgtctgagaaaaatggaagacctaggtttcacctgtgagactataggaatttaaacagattagtttagaatttcacgaaaggataaaattgcatgcagtaaatgcagaatgtttgtgttaaaatacaaatacctgtgtaatgtaacaccgatacatttaatttagtgttcccaaaacgggtctgtggcaagagccacaaggaaaggaaagtatagagtaaaggaaagtatagagttgcctggatttccatgtactttggctgtggctactgaagtgtctcatttttaacacttttttgttgctgctattgctatttgagatattcccgtctagagcagtggcttaccctcagtagtcatttaaatattttgagttagtaaatgaaattcaacagactaccagttcagtttcttgtttcttcaaaatattattttttattttttcaatcatcttctttaaatcacggtaaacctataaagggcatccaacatttttacattggtttttaatctctaaaatgataaggactcatctatttgacccttcagaataactgagcaagaatcccttgtgtattttgtctaggctatattactgtatttgttaactagacaaatatgtttatcagcagctaattctgtatgtcttactgtttcaaattttatctttaaagcaatttcccttaatgcctagcttagtgctaaatacattgtaggtgctcaggaaatattaattaaataaagaaattgcaaactagtgacatcatttggtctttttactgctttgtgtaatgggttttttagaggtgagctttaaggagctatttttattataaaagtaatgcaggccaggtacggtggctcatgcctgtaattccagcactttgggaggctgagacaggcggatcacgaagtcaagagatcgagaccatcctggccaacatggtgataccccgtctctactaaaaatacaaaaaattagctgggcatgatgatgtgcccctgtattccctgctactcgggaggttgaggcaggaggatcgcttgaacctgggaggcggaggttgcagtgagccaagatcgcaccactgcactccagcctggcgacagagcgagactctgtctcaaaaaaaaaaaaagtattgcaaagtaggccgggcatagtggctcacccctataatgccagcacctgggaggctgaggtgagcagatcactggagcccaagagtttgagaccagcgtggccaacatggcaaaaccccaactctattaaaaatgcaaaaattagctgggcatggtggcatgcctgttagtcccagctcctcgggaggctgaggtgggaagaatgcttgagcccgggaagtggaggttgcagtgagctgtgatcacaccactgcactccagcctcagtgacagagcaagaccacgtctcagaaaaagaaatacaaagtctgatcattctccatctttactaaggagaggtatcctaatgtactaacgattgatttttttcttcactcatttcagatgtcttcttaaagaatgagctatagtattgttgaatgtatgtactgaaatattttatggtaaatataatttagatgagtccttaaagttatgtcctccatatttaaacattctgttgtattctaacagtgttacctcaatacacattctttttttttttttgttttgttttgtttttgttttgagacggagtctcgccgtcgcccaggctggagtgcagtggcgcgatctcggctcactgcaggctccgccccctggggttcgtgccattctcctgcctcagcctcctgagtagctgggactacaggcgcccgccacctctcccggctaatttttttttttttgtgtgtgtgtatttttagtacagacggggtttcaccgtgttagccaggatgatctcgatctcctgacctcgtgatccgcccgcctcggcctcccaaagtgctgggattacaggcgtgagccaccgcgcccggccgtcctcaatacacattcttatccatagtagtcatcattcttcatgatgaaggattgagggtgtgtatgcttgtagagaagcctggttatggatattctcacagtatcttatatctagtaggtactcagtaactactggatgaatagtttaatgcatgcaaacctgcctaccacagaatggagtttgttctgaagagcagaactttaacacagaaactactgtgtaagagaatccattagattaagggtcgaaacacaacaggtttaaattctaactgtgctcttaatttagctttgtaattctggataagccatccatcatacctttctgagttttagtttcttcaaatataaaatgaaggaactgggcaagaataatcaggatctctaaggtttttttcctcttataaaatgctacattggctgggcgcagtggctcatgcctgtaatcccagcactttgggaggctgaggcaggcggatcacctgaggtcaggagttcaagaccagcctggccaacatggtgaaaccccttctctactaaaaaaaatacaaaaattagctgggtgtgatagcaggcacctgtaatctcagctacttaggaggctgaggcaggcagaatcgcttgacccaggaggcagaggttactgtgagccgacatcgtgccactgtactctagcttggatgacagagtgagactccatctcaaaaaaaaaaaaaaagaattatgagaacaaagtatgtttttaaaaactgaataaaagtataaaagtgagtttcttaaaaaattgcattagatgtaggtgaaacaatggaaaaagatgacagggtcctgaaaatttaggagaattctgaactcagagtgctttgcaggtttctgagtactttcaacactgtaaagaaattgaaactggttttttttttttttttttttttttagacagaatctcactctgttgcccaggctggaatgcagtggtgcagtcttggctcacgcagcctctgcctcctaggttcaagggactctcatgcctcaccctcccgagtagctaggactacaggtgtatgccacaatgcccagctaatttttgtatttttctactaaaaagtagagatggggttttaccatgttgtccaagctcgtcttgaactcctagcctcaagtgatctacccacctcagcctcccaaagtgctgggattacaggcgtgagccaccacacccggccgaaactgaaaattatagacagtgcagtaatgacaaatccagccagcagacccgtactcaaagaaaatgcccataagaaatagctaatgaatattcttcatatgcttcttgttaaaaaaattatctccttttatgattctctactcgaaaaaaatcaaccactttcattagtagaccaaggtctcatcaggtaaggaaggcttttactgttctatgattttcattacattgtaggcctttttaaaaaataacatagtgattgccaggtgcggtgactccctcctgtaatcccagcactttgggaggccgaggtgggcagatcatgaggtcaggagatcgagaccatcctggctaacatgatgaaaccctgtctctactaaatatacagaaaattagccgggtgtggtggcgggcacctgtagtcccagctactcgggaggctgaggcaggagaatgacgtgaacctgggaggcagagcttgcagtgagccaagattgctccactgcactccagcctgggtgacagagcgagactccatctcaaaaaaaaaaaaaagtgataatcatcctattgcaggtcataatggttcctttaatctatatgagtatgagttccctttgcctgagagctacataaaacacatcttctgtatatttgatattaaaacccaatccttactgtgctttcttcacagaacattcagaagattctcggccttgccccttcacgagccgccaccaagcaggcaggtggatttcttggcccaccacctccttctgggaagttctcttgaactcaagaactctttattttctatcattctttctagacacacacacatcagactggcaactgttttgtagcaagagccataggtagccttactacttgggcctctttctagttttgaattatttctaagccttttgggtatgattagagtgaaaatggcagccagcaaacttgatagtgcttttggtcctagatgatttttatcaaataagtggattgattagttaagttcaggtaatgtttatgtaatgaaaaacaaatagcatccttcttgtttcatttacataagtattttctgtgggaccgactctcaaggcactgtgtatgccctgcaagttggctgtctatgagcatttagagatttagaagaaaaatttagtttgtttaacccttgtaactgtttgttttgttgttgtttttttttcaagccaaatacatgacataagatcaataaagaggccaaatttttagctgttttatgtacaaggagagatctgtttcattttgttttgccgtatttctagatataagttttagcatgggccaggaaggactaaaataaaagtttttaaggtactgtactttttgccatacttgactcatatactcaaaatacagagttgtcttggtgtaggaattggaaagcaagagtggaaaggaacgtaataactcgttggagtttaaaaatgagggtcttggcaagtaacactgatgtctgaaaaaaaattaaatataaataaataaataaaaatgagggtcctcagctgttctcttcatatcctattacagtctctcagattcttgtgggggcactcttagatctcccttggagacaaggttatagttatatgttgttaatctcgcagagcttccttttagtcacaatagccttcattttctgccatgccccttcataagggagaaggatgtttgtaccatgatcctccccgcataatctatggaattaggagtcctgtgtggagtcttatcaataaatatgcacattcatcaaatgtctacttaaatgtgagtattctaccagtgagaaaaaacacataattttcaaggtaatcattgttaaaccaacagcaaacttctttcttatcagcaccataaagtccagaagacagtagaaaagtatcttcaaagtgctgaggaaaataagtatcaacttagaattttatgtacaatattggaggcaaaataaagacatgtttagacatacaaaactaagagagttgaattattaaaggttatattccaaggacaaaaaagaggatctgcccaaggtgaaggtatggcatacaagaaacaatggtcaacagagaaataaaatatatggatgaatatatggataaatttgagtgttttatggattatctaatttaaggattatcccaagacaaccctacaaggtaattactgttcttaccttcatttaacagatgaggaaactggggcaggggaggttagtaacttgctctgcatcacagagctattgagtggcagtcaggatttgaattcaaccagtgtaaagcctaatagtccaggctgtcaagctctatattacagcctcctcatgggtatgtggtgattctcttctcatcccatctcctcaactagagtgtgtgagctctctaaagttggactttgtctttttttttgttctccttattacaaagtagtcaacgtgggtggaaacacagcaggagctcaataaaagcagatgaaagggaacagaagtccctattctgagactagttttatcagaaggatgtctgataatggatggtaatgacttttaatggtcttttctccatatcattgaccactctaagcaaaataataattcgaatgataatgaagaaaatgatgcccatgataacaataatgacaaatatgaaatggctaaaataaaacatgaaaccatcctcaaaattctgccatcacctttttaaagtgagaatatatagcacactctatcactcataccctgaggctttgaagttggtgctttctaatcagacttcttatggaccaggttttcatatacaaattatgtttccatggtaaggaataaataagagggagaagttaaaaaggagagattacatctattcaccctattcattaaaatttttttaaatttttttccaaatatgttctgcttatgtatattcactctattcttaaaagcacaataacaaagatatattacagaggaaataaaactatcacaagaattaaattcaaggagttattaagggctactgcagcctcacaattagttttttaaaatttcttgtcctgaagaaatttcaagactagttatttggatgacactctaggtccacagcatcaccggatcattggagatgacatttcaagacaggcctctgaacatctctcataacacataatttggttattttccctatgtaagatggattgtctcctgtctagggaagaaaaacagccattactaatatctgcattagtctactcaggttgcaatcataatatgctaaagtagtaaacttttaaaaatgacagtaaacctgagtttattaacaggttacattctaaaagctaagctagtttggaaattggaaagcaaatgtgtgtagatattcatatgtccttgaccagactgggcctttctcttcccaggtaagtcattctctccaatggggccagttacttaaaattacatcagacaattgatagagcttctagatcccccttctaaaacaaaagcattttgccacaaactaggatggagtaggtttttttcagactatttatacttattttatgtatttcaatactgccctttaagtaaaagtactatatactttctctttttttagattaattctgcttaagtcagtcttttaatttattctagtttgagtttttaaaaaattttagaatgaaaaatctcaaaaatatactattatgtatatacactattttatatatatatatatatatatatagagagagagagagagagagagagagagagagagagagaaagagagaataaagaacacctaggtaacccatcctccaccttcgacaattatcagctcctagctaatttgtgtcatctgtaaccccacctgcttctgccctttctgtattattttgaagcaaatcttatcatttatctgtaaatatttcaggactttaaaaaatatgtgtaatctgaataccatttttacacctaagaaaatggacaattccttaatataatgtgttgtctatagatgtcaaaaatttttgcagttttttggaatcaggaaccaagtaaggtactgaatattgcagttagctgatacacatcctaaatttcttcaattgttgtggtcctcaaactagagtgtatcagaatcactagagccttgttagaacacaaactgctgggccccaccccagagctggtgatctgtaagtctgctgtggagtctgggaatttgcatctctaacaaattcccaggtgatgctgaagctgcaggtttggggttcactcacctattggttcatcagcatctctctgccctcttacaatatatttgttgaagaagttgtgttgtttaccttgtagagtttttcttagtttggattttggtgatagcatgctggttttttcatactattggttgtctctgtaatgcgagcagcttttgatctattaattaatgagatattaaaagtgatggtattctaattgtagtattccttcatttatgatctaaaatacctctaaataggaacttcctctcatctactttttgggggaagttaagaataaatgcctaactccttggtcttcaaaataatgagctgtttattaacatcctccaatagtgaataattaatgtgtatgtcattagcaattcatgcatttaaacatatttgatgtacttcagtccactgaagctatttctcttatgaatgctcaaattgtcccatttttggccagcgagagcctctttcatttggctcctgagtctatttgcatgaccctcgttgtcattggtagcatccttgctaagtgatataacaagatgttctaaggctcatcttgtgtatttcctgcatgacttgaaaacaacaatttctccaaagaggcttgtttcatctttactggaaaatggcatttggagattgtgatcagagcactaggaatggtgagactgggtttttaggtttctaggcctttctgtggactaacattggtattatttgttgttgttttaatacaaaatacaacatgaagttatactgatactcagggctacagaatttttacttaatttctttggtctgtgtctcgtttatcaaaccatactaagaattccaatttgcagcagccggctgatataattagaatattacataattattcattagtacaagctaagaatatacactcagaagtctcagatattaacataaacattaccaacaatatagttaatgaaaatagttcaagttttgttttttgtggagtaaaggacagggaggattgtgtaaggtatatcacactatgagttcacagtccaaatactgagatttcaagttatctggaattatttctttaaggttattgccaacagaatacaatttacatttgtttgattttgtttccaactttagagatttctctttaattttactttatatagtgttttgaggggtttgcacaaaaaagcatatttaagctacatagagatgggtacccattatcacacttctcttatgggtttaagcccactcataagccccataatgtgtgaaaagatgggcaggtaaaattcttaccagaaacaatttaatttttacctaatagtggggctggcagggacactctctgcagtgacattgcccccttaacacttcacacttgttgactaaagggaggagacctattgtgaagagaataccatgtggggatgtcaccaacactgactcagatccttatcactgtccccttaatttttctgcaatagcctaccaggtagtttcctttattctagtttccctgactccagttcaccctccatcttgctgtgggatgatttttttttttttttttttttttttgagatggagtcttaccctgtcgcccaggctggagtgcagtgtggcattatctcgactcactgcaacctccgcctcccaggttcaagtgattctcctgcctcagcctnnnnnnnnnnnnnnnnnnnnnnnnnnnnnnnnnnnnnnnnnnnnnnnnnnnnnnnnnnnnnnnnnnnnnnnnnnnnnnnnnnnnnnnnnnnnnnnnnnnnnnnnnnnnnnnnnnnnnnnnnnnnnnnncgccgcgcgaggcggcgtgcaccggagaacactgccacgcgggaggctgtggcaggagcatcacatgttccacggaggcggaggttgcagagagccctattcacgccaccgtcccccagcctgggcaacaagagcgaaactccatctcagaaataaaaaagaaataataatacatctgattgtgttgctcctcaaaggaaagttgttcaatggctcccagtagcttttaagtaaatttaaactagttagcacacaaaaccatcccaacctggatctccagccttttcttatctctatatcccaccatatcttttttttttttttttttttgagagacagagtcttgctctgtcgctcaggctggagtacagtggcgcgatttcggctcactgcaacctccgcctccttggttcaagtgattctcctgcctcagcctcccgagtagctgagactacaggtgcccaccaccacgcgcagctaatttttgtatttttagtagagacggggtttcatcatgatggccaggatggtctcgatctcctgacctcatgatctgcctgcctcagcctcccaaagttctgggattacaggtgtaagccaccacgcccacctaccccactatatcttgtcctctagctaagcagatttcttaaacaaattctgcatttttcatgttcttttttatttttattaagctagagatgaggtctcactatgttgcccaggttggtcttgaactcctgggctgaagtgatcctcccacctcagcctcccaaagtgctaggattacaggcatgagctacagtgctcagcctttcatgttctttttggactttactacctttgttttctcggcctagaatgttctttgtcttatttgcctgatttttcttctcttacttttcctacttagcatcaccttttacatggttgagttagatttctctttcctgtatttctgttagagcctttcttatatgagtcattcatttaaaaatggacaattaactttctaagcttcaatagcctcgtctggaaaatggagttaataactcagtcaaagctcccttatctgatttccacttacctgagtcttcagatggatcctcccagttccctgtgaaaagcttgatgaccagcatccacatcacgctgaatgctctcaaccatgcttgtgcacaactcttgccagtcaattgtgtaacataatttatcttacttgttattgtaattaaatgcatggactaaatatgttaaattatgaaatatgaatacaaaagaaggattacttctgtgaaaattaaactgaatgacttggaataacaataaaaaaagttgctaaaaataattgctgttggtgaaataacaaagactaaaaaagtaacaaaaaatttagaaagattcagcattatttcttagtgttttaattcatgctccactttaaagaaaccaaaactggaaatcagaggtgatgggtttggtttatgcagaaaaaaaaacggtattgcaatcagtagactcatactcaaggaaaaggccttggccctacataaaaagtgaacaagtatatatttgtatgttttaagttaaacatgtctaaagtatgtatatatgtattttttcataactgtaattaaatttttagattaacctataaattactggttctagtcatatcagataaataggtttttacctcatagtgttcttgatggattctgtaaagcaattgatactatgcctggcatattaaaggcatttgtttttcaaacacaggaatcctatgagggagatagggtatctttttattatttccattttacaggtgacaaatcatgatttatccaagatcctacacgagtaagtaacagaaccaggaagaacccagatccttagttttcagggtccacgctctttctactgcagcacccagtagggctgtctccattggggctacaatataaaactgcttaacttgaatcccatctggacctgttaccctacatgcaaaagatcttcaaaatgtctttacataagacaagttggggtcttcagagtatcatttagatgattatcactgtctctattccatttttttacaaagctttcccacattactctcattgtctaaatagtatattttaacaagactttttgaatattagaagaaatttaaaaattattccaccatcaccagatgagtgaggaagaggataaacctaagtctacttaagcctactaagagatgatatttcaagtttcaaatggccttctgcagttggaggctaagcacattttaaaacccagaaacttatatttggctccagaattcatctggctgctcaggaatccttcaatataattttttttctttcctttttttttttttttttttgagacggagtcttgctctgtcacccaggctggagtgcagtggcgcgatctcggctcactgcaagctccgcctcctaggttcatgccattctcctgcctcagcctcctgagtagctgggactacaggcgcctgccacaaaacccggctaattttttgtatttttagtagagacagggtttcaccgtgttagccaggatggtcttgatctcctgacctcgtgatccgcctgctttggcctcccaatgtgctgagattacaggcgttagccaccgcgcccagccaatataatttttgttaatacaaaagtgattttggggtttatagctatttcagccatttgctgaacagtcaattggatcttaaacagaggtcatacatatcaagaaagtagaaaaagtctgaaagcttgatctggtgacagatttttccattctagagaacattttacatttttaatcaaactggggcaatactttagtgcagtggtcttcaaacttttttgaccacaaccccacagtaagaaacacatttttattattgcatcccagttatagaagtcccatgaaacaatacctcttttatgcactttggtattttatttcattcttcgaaaaatgtggtcataatccattaattttaccactgactaatgggttgcatcaggcagcaagccattggaaaaaaataaataaagttctctctggaacttgaagaataaggaaatttgagtgaagtcaagtttggaacactaaagaccactttaaattagatgtggtggacttatctaagattttgactatattatagcaatgaataactcggtgaaaataatcaagaacaaccaattttccagaaagacattagccaagagtgtgacttcttttctcagatatactttctggaggatcagaaagggcaagaacctgacatttgtatcatgctataattgcatacattcgttcacccatttaccaagcacatttaaagcacgacctctgtgcaagaccctgtgctacgggcattgtggacacaaaggtgagttgagtagaaatctgctcagaaatcttacaactggtagctactgtaagcgtcagtttccttgtctaaaaaaagaggacaataattcctgcaatggcctgcatactcataaaattgttacaaaaatgaaatgagaataatatatgtaaagttcctttgtaaattataagggaacattactaaaagcagttgaatagtgaagtgttcaaaaaatttagattcatattgtttctatatacactaagaaatcatttgacaatttgtttttctcttttcccctgtaatcattaatttataatgactctagattggagttagattatttttcttaagattattttcatttgtctgaaagctttaactttatcaagtaaaatcttgctgattaagcactagacttgtggatgaacacatttcattttcctctagtcttggctgtgcttcatgttcactggataatttaaggtgatcccactggataatttaaggtgatcctggcactccagcctgggtgacagagcaaaactctgtctcaaaaagaaaaaaaaaaactgtggggtgggggggaatgacttttggataatataaaaatactaaagaatatgcacaatgatttagagaggccattcgagatagaagtgggctgcccaaaagggtgattaagcccttagttcctttggcttgttggcttctcttagtccatgttttgctttttgctgccacctggttcagggatagttctttctatcactaccaagtactcagcctgaagttgtggggcacgaaaaaaagcaagttggtgataacgatttcaaaaaggcaatttaaatatgtttacctcattcttgaagttccttctttgttgttgaatgggtttgctttttctagttttccttcatcttttctgcaactcaactcactgcttatatgtgcatgccacctagtgacaaaaattggccctgcctgctttttagggagatgaagtgttttgtatccactgtttaggggaagggagacaggtagagtagattacacactgaggaaactttagaatgggttccctgggctaagtgcggtagctcacacctgtaatcctagaactttgggaggccgaggtgggcagattgcttgagcccaggagtttgagaccagcctgggcaatatggtgaaaccccgtctctataaaaaaaatacaacaattagccgggtatggtggtaggtgcctatagttccacctactcaggaggctgaggtgggaggatcacctgagcccagggaggtcgaggctgcagtgagccaagaccatgccactacactccagcctggtagacagaatgagaacctgtctcaaaaataaataaataagaatgggtcctctaatggggccaacgggaggctccctgtggttgaacatgaagacatagacctggtaaatgcacagcaagtattattacatttttttattcctggactctcctgccactcctcaagcttctcaatatacttccatgtaaaaacaaaacaacaaaaaaacaataaaaggctttgtttccccctcgacaaggtgagaaatcttaaaaataggagagaaagagagcaggtagatctgggagggtctctctggcatgccttttgacccccttgtccctcttctcctgggaccattgtctttcttatcgcatgtctccagtctgccgaggccttcctccatcctggctcacctttgctctgtatttaattttcaatgtgtcctctgcagcccctgttctttgctgagactttgctagattctcaattttatcatagaatactaccacttgaactaaaaacctaactttcttatgagggaaatgtcaatgtaattacacaaatatatctgataatccatgataattcacaacccttttgagcagacgctgctgtttctcttctcttgtctgaggaccaagaggcagggtcgatgtgctcctagctacccactgcctcatcctctttttcaaaaagcctttttttggctgggtgcggtggctcatgcctataatctcagcactttgagaagccaaggcgggtagatcacctgaggtcaggagtttgagactagcctggccaacatggcgaaaccctatctctactaaaaatataaaaatcagctgggtgtggtggcgtgcgcctgtaatcccagctacttgggaggctgagacaggagaatcgcttgaacccaggaggcggaggttgcagtgagctgagattgcaccactgcactccagcctgagcaacagagtgagactctgtcacaaaaaaaagaaaaaagaaaaaaaagggccttttttcttttcaggctcacatgttcaatccacaaagttctgtctttcttattaaaaataacaattgtaaaaaagcaatatacacatttggtacaaatacaaatatctgtgaaggtataaaatgaaaagcaaaaatctgtgcctctcttccctatgccgtcctcatgcaccttcccttacttcagattccaaaaggtaaccattgtcaatatttggttatctgtgatggtcaactttgtgtcaacttggctaggctatg

SEQ ID NO: 641 - DNA, 2126 bp, Homo sapiens
ccagcccttcagctccagtgagttgcgggttggtttcctctagactctcgtggccacaccgttctccgatacgagcctttccggtgctatgccccggaagcggaagtgcgatcttcgggctgtcagagttggtctgttactcggtggtggcggagtctacggaagccgttttcgcttcacttttcctggctgtagagcgctttccccctggcgggtgagagtgcagagacgaaggtgcgagatgagcactatgttcgcggacactctcctcatcgtttttatctctgtgtgcacggctctgctcgcagagggcataacctgggtcctggtttacaggacagacaagtacaagagactgaaggcagaagtggaaaaacagagtaaaaaattggaaaagaagaaggaaacaataacagagtcagctggtcgacaacagaaaaagaaaatagaggttcgaatgaaatccatgtttgctattggcttttgttttactgccctaatgggaatgttcaattccatatttgatggtagagtggtggcaaagcttccttttacccctctttcttacatccaaggactgtctcatcgaaatctgctgggagatgacaccacagactgttcccttcatttttcctgtatattctctgtactatgtcgattcgacagaacattcagaagattctcggccttgccccttcacgagccgccaccaagcaggcaggtggatttcttggcccaccacctccttctgggaagttctcttgaactcaagaactctttattttctatcattctttctagacacacacacatcagactggcaactgttttgtagcaagagccataggtagccttactacttgggcctctttctagttttgaattatttctaagccttttgggtatgattagagtgaaaatggcagccagcaaacttgatagtgcttttggtcctagatgatttttatcaaataagtggattgattagttaagttcaggtaatgtttatgtaatgaaaaacaaatagcatccttcttgtttcatttacataagtattttctgtgggaccgactctcaaggcactgtgtatgccctgcaagttggctgtctatgagcatttagagatttagaagaaaaatttagtttgtttaacccttgtaactgtttgttttgttgttgtttttttttcaagccaaatacatgacataagatcaataaagaggccaaatttttagctgttttatgtacaaggagagatctgtttcattttgttttgccgtatttctagatataagttttagcatgggccaggaaggactaaaataaaagtttttaaggtactgtactttttgccatacttgactcatatactcaaaatacagagttgtcttggtgtaggaattggaaagcaagagtggaaaggaacgtaataactcgttggagtttaaaaatgagggtcttggcaagtaacactgatgtctgaaaaaaaattaaatataaataaataaataaaaatgagggtcctcagctgttctcttcatatcctattacagtctctcagattcttgtgggggcactcttagatctcccttggagacaaggttatagttatatgttgttaatctcgcagagcttccttttagtcacaatagccttcattttctgccatgccccttcataagggagaaggatgtttgtaccatgatcctccccgcataatctatggaattaggagtcctgtgtggagtcttatcaataaatatgcacattcatcaaatgtctacttaaatgtgagtattctaccagtgagaaaaaacacataattttcaaggtaatcattgttaaaccaacagcaaacttctttcttatcagcaccataaagtccagaagacagtagaaaagtatcttcaaagtgctgaggaaaataagtatcaacttagaattttatgtacaatattggaggcaaaataaagacatgtttagacatacaaaactaagagagttgaattattaaaggttatattccaaggacaaaaaagaggatctgcccaaggtgaaggtatggcatacaagaaacaatggtcaacagagaaataaaatatatggatgaatatatggataaattt

SEQ ID NO: 642 - protein, 248 aa, Homo sapiens
MPRKRKCDLRAVRVGLLLGGGGVYGSRFRFTFPGCRALSPWRVRVQRRRCEMSTMFADTLLIVFISVCTALLAEGITWVLVYRTDKYKRLKAEVEKQSKKLEKKKETITESAGRQQKKKIEVRMKSMFAIGFCFTALMGMFNSIFDGRVVAKLPFTPLSYIQGLSHRNLLGDDTTDCSLHFSCIFSVLCRFDRTFRRFSALPLHEPPPSRQVDFLAHHLLLGSSLELKNSLFSIILSRHTHIRLATVL

SEQ ID NO: 643 - DNA, 2182 bp, Homo sapiens
tgttactcggtggtggcggagtctacggaagccgttttcgcttcacttttcctggctgtagagcgctttccccctggcgggtgagagtgcagagacgaaggtgcgagatgagcactatgttcgcggacactctcctcatcgtttttatctctgtgtgcacggctctgctcgcagagggtgagagcgggtatttctcagacgtttgatcagtccccgggaggaagggccccggggtcccctgtgccaccaggggaaagatcgcgagccttacttgcttgagaggctcatctactccacttcagggaatctctgggcaactcgtgaacaggagcaggaggggagtatggagtcgattgccgagttttctttggtctcaggcataacctgggtcctggtttacaggacagacaagtacaagagactgaaggcagaagtggaaaaacagagtaaaaaattggaaaagaagaaggaaacaataacagagtcagctggtcgacaacagaaaaagttcgaatgaaatccatgtttgctattggcttttgttttactgccctaatgggaatgttcaattccatatttgatggtagagtggtggcaaagcttccttttacccctctttcttacatccaaggactgtctcatcgaaatctgctgggagatgacaccacagactgttcccttcatttttcctgtatattctctgtactatgtcgattcgacagaacattcagaagattctcggccttgccccttcacgagccgccaccaagcaggcaggtggatttcttggcccaccacctccttctgggaagttctcttgaactcaagaactctttattttctatcattctttctagacacacacacatcagactggcaactgttttgtagcaagagccataggtagccttactacttgggcctctttctagttttgaattatttctaagccttttgggtatgattagagtgaaaatggcagccagcaaacttgatagtgcttttggtcctagatgatttttatcaaataagtggattgattagttaagttcaggtaatgtttatgtaatgaaaaacaaatagcatccttcttgtttcatttacataagtattttctgtgggaccgactctcaaggcactgtgtatgccctgcaagttggctgtctatgagcatttagagatttagaagaaaaatttagtttgtttaacccttgtaactgtttgttttgttgttgtttttttttcaagccaaatacatgacataagatcaataaagaggccaaatttttagctgttttatgtacaaggagagatctgtttcattttgttttgccgtatttctagatataagttttagcatgggccaggaaggactaaaataaaagtttttaaggtactgtactttttgccatacttgactcatatactcaaaatacagagttgtcttggtgtaggaattggaaagcaagagtggaaaggaacgtaataactcgttggagtttaaaaatgagggtcttggcaagtaacactgatgtctgaaaaaaaattaaatataaataaataaataaaaatgagggtcctcagctgttctcttcatatcctattacagtctctcagattcttgtgggggcactcttagatctcccttggagacaaggttatagttatatgttgttaatctcgcagagcttccttttagtcacaatagccttcattttctgccatgccccttcataagggagaaggatgtttgtaccatgatcctccccgcataatctatggaattaggagtcctgtgtggagtcttatcaataaatatgcacattcatcaaatgtctacttaaatgtgagtattctaccagtgagaaaaaacacataattttcaaggtaatcattgttaaaccaacagcaaacttctttcttatcagcaccataaagtccagaagacagtagaaaagtatcttcaaagtgctgaggaaaataagtatcaacttagaattttatgtacaatattggaggcaaaataaagacatgtttagacatacaaaactaagagagttgaattattaaaggttatattccaaggacaaaaaagaggatctgcccaaggtgaaggtatggcatacaagaaacaatggtcaacagagaaataaaatatatggatgaatatatggataaattt

SEQ ID NO: 644 - protein, 125 aa, Homo sapiens
MKSMFAIGFCFTALMGMFNSIFDGRVVAKLPFTPLSYIQGLSHRNLLGDDTTDCSLHFSCIFSVLCRFDRTFRRFSALPLHEPPPSRQVDFLAHHLLLGSSLELKNSLFSIILSRHTHIRLATVL

SEQ ID NO: 645 - DNA, 103471 bp, Mus musculus
  misc_feature (1)...(103471): n = A,T,C or G
taagaggaaattaagttactttgatatgactcaatcttagtaaacccacagagggttttaccgagaacttttcttcttgttctgtctagttacacataatctccatattttatctgagaatttttcttaggatcgctatcacctgtttgtctatatcttttgaagtatattttatttttatttttgaaaattgaaattatatcctctcatctctaactgtgcagtcaaaagtcttatgtacaggttccacatccttaagagtttgaggatcagggctggagagatggctcagcagttaagagccctgactgctcttccagaggtcttgagttcaattcccaacaaccacatggtggctcacaaccatctgtaatgggctccgatgccctcttctggtgtgtctgaagacaactgcagtgtactcatataaataaaataaataaatctaaaaaagtttgaggagcaaacattcttttgtgcagactctaccatggtgtacacatgcacacacacacagacacacacacacacatgagttgtggtgggaaattgttattattagcacttttgagtattgagcagggctttatttaaattccaaaactgaaattattcagagctgtagtgcttcctttttgcttcagaggaaccaaggccatagagcagtgaagagcactggggggtctggctgagtagcagtcttccgtggacaaacacttcaaatggtctccgggctggtaaaatgggcaggctggctctggaggttcccagggccctcattcattggtgatcttcggttcggttccctgcgtgggcaggagtttatggacaggctcgtatgacttagactcttccagagacaaggtagtgggagaatggaatgatgatgagatgcaacggttcagacatatgaggtgggggtgcgatgggctgttccgatacccaaagatccccaagtcccagaaagcatctgcattcttctcaggagttccagatgtcagactcagagtctaaatgactaagtttttctctactggaaaagtacaaagttacttttggggcaggaatgccaggcaccttgtattatgtgaatggtctcctctttcaatcccttgtcccactttctactatcaggacaaataggcatcttgaatttgagcctgtgaagacatagctactaacgactatggagtccaccctcgcttcattcactcaaggcagttttgctgcctacaacccggtgtcacctccaacccatagagagatgccttggggctggcgggaagcagcagcctagtgcttccttcctgcttcctgcttttgctcagaccccgtctgtgctctctccaacatcagcctagaccctgacccagatgccacgtctccttggtagtgcaaacaaatgatgacagtaatggtggcagtgaaggaaggagcctggatgcccgcagggtggaaggatgcattccttctgccattttctccccagtggccattgacttggggttaagagagacagtagtgaaattgaagacacatacacatcttaagcagtactatcctagaaagatttcagtgggatatattttttttgctttaatgttcattcgaagggaggggtttttattataagttaggtatctccacaggagtggttgtgtgggtgggtgggtggaggtgtgggagtgggtgtgcgtgtacatggacacacacgtgttcaatggagatcagtagagctctcgtccctcccattcctcctttcagcaacctgtgaacttctttactctttcttctctgctacacctcttccccaaatcacagagctcatttcactgcattgcatgtattgcaattatgtgtctaattcacatgggtctgccggggtgggggtgggggtgggtgggggggtgtcttagcaggaatgatgtcattttcatgtttgacttataggacctcacgctgtcccgggcatttaacaagggttctgcaaatatttgctaagatcaatgccatcaaaaggaaggttagaggctgtctagatgacactcacgcagcaaggaaaggcatttgccaccaggcttgaccacctgtgttcaattcccagggcccacatggcaggacaaaacaaaaatcctgcagattgccctcagcagtgacactgaagcaccccaccacctccaacatgaatgtaacacatttttaaaaggacgttagttagtttctcttctcactgggtggaggctaggaattagctggattttggcaataactttctatatgccatcttgcttcctgcagatgacgtcggtcgctaaggtctattacagtcagacgactcagacagagagccgccccctagtggccccaggaatacgccggaggagggtcctcacgaaagacggccggagcaatgtgagaatggagcacattgctgacaagcgtttcctctacctcaaggatctatggacgaccttcattgacatgcaatggcgctacaagcttctgctcttctctgcaacctttgcaggcacgtggttcctctttggtgtggtgtggtatctggtagctgtggcccatggggacctgttggagctgggacctcctgccaaccacacgccttgtgtggtgcaggtgcacacgctcaccggagccttcctcttctccctggaatcccagaccaccatcggctatggcttccgctacatcagtgaggaatgcccactggccatcgtgcttcttattgcgcagctggtgctcaccaccattctggaaatcttcatcacaggtaccttccttgcaaagattgcccggcctaagaagagggccgagacgatccgcttcagccagcatgccgttgtggcttcccacaacgggaagccttgccttatgatccgggttgccaatatgcggaagagtctcctcattggatgccaggtgacaggcaaactgcttcaaacgcaccagacaaaggagggtgagaatattcggctcaaccaggtcaacgtgactttccaagtagacacagcctcagacagcccctttctcatcctacccctgactttctaccatgtggtagatgagagcagccccttaaaagatctcccgctccgcagtggggagggggactttgagctggtgctgatcctgagtgggacggtggagtccaccagtgccacctgccaagttcgcacttcctacctaccggaggagatcctctggggttacgagttcacgcctgcgatctcactgtcagccagtggcaaatacatagctgacttcagccttttcgaccaggttgtgaaagtggcatctcccagtggtctccgcgatagcaccgtacgctatggagaccccgagaagctcaagttggaggagtcattaagagagcaagctgaaaaggaaggcagtgcccttagtgtgcgcatcagcaacgtctgatatcctgttctctcctccccagccctctggccttttcctcttccagtgctctgggaaaaggatacaatctgggttcgctggagagacccggaagcacccaccctcaacttccccttagcccggtggcctgtgagcagtcggggcctgctggagcccttccttttcctctcactgtccccttgtaccttcctctaccactacaccaatgtatatgactcttaagccagcttgggggaaagagagggaagatgaggctgacatggcttggaaggccgcagccatgcttggagattcacattcagaggaccatgtgactggatggatagactcccccccaaacgcccaccactagaaaatttgatggcttgagactggagcttcctccttttctcttccatctagctaagttccctgaggcagaactctctcagagagtcactctatgggctctgccctcagaagtactgggatctgaaatcagttttccctgggctatcaaatcctgaagaaagaagccagagtttgtcatggtgttttaatttcagctggtaactcctgacagagcctggactcttggtcaccacctaattttccctctccagttctcaagtggatcttctcagcaaagccggttctctctcagcttctgtttctgtagaactggggttgactcgagaaacacaagcagccacctttcctgcacccatcctggattctgagaaattcaattttggaaatactgtctaatactctggccctgtcctttgggcagctctgtcctggaaagatatgttttagtgtttcctgggaataggaagaccttaaccaatgctctctctctctctctctctctctctctctctctctctctctctttctctctctctctctttcatgggctgtccttgaatttactatgtagactaggctggccttgaactcacagatacctagctgcctccgtctcccatatactgggattaaaggcatgaaccactatgccaagcccccaatgttctcttgaataagtccattgcacatacctcacgaaaatatctaaaaccatccagattacactgtaccagttccattgcttccttttctcccaccccagaccttcccttaactcaaccttttgaagtaagagagggaaacatggtcatttgcctttcttaacatcgatctattaaaactagtcacagggcacagattccccaggaaagctgaacccacttctcagatttccagattgctgtacagagcctcggggaatttgtgatgttttgttatggtttgggctgaggcagaactctggctgacagccactattttgttccatctcctggtgcccttctgagaagtgccagctattttatgaggcaatgctgagaggagaggaacttacattctgatctctgccattctgacacctggcataaaatgatgaaaaccagcgccatctctcctcttttctgcctacgggccagttccaggcaaattacaaagacagcttaagatcacacccaagccattcctagttctctggtgagggttgtggcaggggtcatggaagggcatttgaagcaccaggtcctgtcctagtgagctttggctccacttgggtacccaggaaacctcgcaaggtagtttggcaggaatgacgtaagctgtaaggtggacttgacagatgacaagcgacacatctatacagaatgcatgcccggatctctgggcaaagccttgcagagaaactcagaagatcccaagactgagtggatctcaactgtgcacagtctttttacgttggtcttcccttgaactcaattaactgtagcctgaaaacgaagagcctttggtctctccttactgtaaagctcaccgttagcctccaactctcatcaacaaccagaaccagaagaacctgaatgtctgaaacaaagagcagaaggcaagagccagcttatgtgctttcaaatacattcaacgctgcgcttacctgatgtgtccagtgtgcaaggaccatgtgtactgctgtgtgtgtgtgtgtgtgtgtgtgtgtcttcttatcctgtggcaatttatcctctgtcctgtttcttcttcacattgctgcttccctcctgagggaatgaccctcgtcccagagccttgccaaggcccaactctcttcagaatcttggataacaatgtgagagagcatttcctgccttaaccccttttgaacttcctctacaatcccaggctttgctctaagttgcactttaaaatcatttaaaaatcattaacatctgtcctgttaattcagaattcagaacggcacctttctccaacaagccttatgttctgcagaacaactcccactcacaaccctaagtggttctttagatcccagcccgactctctgacctgaaatcctttctcaggatgcagggcaagctttactaacagccatggctgatgagaaatgggttccctgtctgtaccagctagagacttggaatgtcaggagagtaacaggtgcgctgattctaagtgggatgggagatttcaggtgagcaaaacgaccaatggggaaggatctccagagtgggaaaaaagtgaacgacgaggctaaggggcctagggagatgaagcccagagtcttacttacttatgactgacacacaggaggtggggggaaacttgggagattgagatatgatatatatgtttatctaaggagaaaaacagagataatatatacagagaaatgtacatagatgtacgtatacccaaatatacagactgtacagaaggaagtattcagactttaacaaagggacaaatattttgccttggtttgggggagcaggatagctggatcttctgtgttatggtccgaagaacagtgacagtagctgatggttttaagtttgcttgatggaaaagggagggctagaccctgcccttttcataaataaaggagcatccgtcgaggtttgatgaattgtgctggtaggacaagaggaaaactaggaggaaatgggacacagggatgctccactcatggagaagtaggaaaatctaccactcacacaatccctggccaacaacctgccgctgaacaagttctaaaacaagcaagcaagggagcaagtaagcgatcgagcaagcgagcaaacaaaagcatccttccattttcctctcttcttccaccaagatgggagctgtaggtctaggccccatcattaaaaattgagaagctgaaattttagtacgggggggtgtgtcaaatgcaaacactagaatgcaagccctaggactgatgagctgttgagctcaagatactctcaaggcagaggcccaagcctatatagagaaatcctaaagagggtacttcatctgtcatcgtctcagccccggcgtggaggcaggtgaatgcgatggctacaaggctccttgatggaaatgcagaattctgctttcctcttccccagaggctgatgcagttctatgcaaagcttctgaaatccctaacctgggcttcacttcattctggctgctccctactgttcctcccactctctgaaacccacaccagctagcacgactatgcagggatttccctgaggtcagcagaaaaagaaaagcagtcgtaatgtggctattagccagggacattgcacattctccaaggcttgctaccacaaacctttacccatgctagctaacctagtttctttgcaaaataacacattacctatgctgtgcatagctgggcttgcaggcccagtattggccagtgctactgaaacagaagaatctagggatgatttctctacacgctgcattaaagactaaaccaggtcaaatgtatttagaaaaaaaaaaaaagatgtgtgaggcatttttggtttatttttgtctgttcagaacaaactactaaataaactggatgcatctcttgttctcactgtgtctccttttagaaagggaaacctatcttgttatcaaggtttgaactcataggctgaatttggggagaggagggttcaactaggctctgttggaagaacttcccatccagtggccagcccttcctgctgacttttcctcacactggaacatttcaataatggtttcacccagtccttttcttgctccttcccttgttaaggtaagatcccttaacagatacattgcaaattcaggcaagccaggggaagcgagccagtaaggaacatccctccatagctctgcatcagctcctgcttccttatagaacccagagatagtgccactcacaaggggcctgctccccttgatcactaattgagaaaatgtccccagagctggatctcatggaggcacttccccaactgaagctcctttctctgtgataactccagcctgggtcaagttgacacacacagccagccagtacagtggggaacacttcccaggttccgaccccacggcaggaaatagtatctgttcaaaagctctgccactttctgcagctcgctcatgcgactccagggagagactgattcttttgattagcagtttcctttccttcctgaattggtgtctctcctacttattaggccagccatagagggagaattagctgaggcttttctgccagaatacaacaatcacaacaacaacacctaccaagaagaaccctttacttatattcagacatctctcttatattctttatggagactgagcgtcacttacctataactcacaaaggaagagaaatatcaaaccagggatataaagcataacaatgagagagaatatcagaaagacttaaagaagagattgagaaaaagaaatggaaattagaattccatatcagcgttttatttgaacgtttgtcgcacaatcattgttatcctgggctagacaggcctactttcaattccagttctgctactagttggctatgttttatttattctccataaatcctgattttgctcattgatacagatagggatatctactttacattaaaaagtagttagtatgtctgacaactgggaataagtccttaacaaataacaattatgataatttaggccacgtatactgtgataacacagtatcattcaaataactcttgacaggctcgacttctaagatcaagccagacagtctgtgtcagttaccatgtgcctgcaactgtaatgcaaggaagtacaaagaaatacatactttctactctcaagaaccctacaatttagttataaggttatttgaatggtaatgtgttatcacagtatattatgggcaatgcatagtaaaaaaaccaatagaggtagttattaatctacaccatgtaattacatcaaagcacagacataccagactatgactagaggttaatacggctcactcaaaggataaatgtgaagtgtaggatgagagatgtctaggccgaatggagccacttctatggtaatctagaagacattccctaggggcaggctcagtttgtaagatcaaggcagtctgcgtcagttaccatgcgtctgagactgtaatacattacaagaaagtacaaagaaataaagaaatactttctactctcacgaacaatttacttgaaactgaaaacattgtaaaataaagtatgaagttcttggcccggcgtggtggcgcacgcctttaatcccaccacttgggaggcagaggcaggcgaatttctgagttcgaggccagcctggtctacagagtgagttccaagacagccaggactatacagagaaatcctgtctcgaaaaaccagaaaaaaaaaaaaaaaagagtatgaagttttaaaaagtcaattataagtgcagtaagaaatcaggaaaagaatgaaagagttggagtctttggcaagaaactaatagtggtagggtgaacggagtgggttgacggccgattttgacctagttgaagagttcttgaaaagaacggagttgacagtactccaggggagacaatctagacgtatttcggtaggaggaaccttcttatcagggtaaaaagactattttattttaggcttattctttccatctgtatttcccactctcagtcctccaagccagttgggcgggatgtaagtagcagcaggtagcagctcactgtgttcagcgtcctcctccgtagatctgagctgggaacgcggaagctctggttactaaaaacaaagttcacccaggtcccaggtccacgacttctcagccactccgggatttccggacagcggaagcgtcgccaataagggaccggaaatcccgccttcgccggaggaagctgcggacgctagacagccaatcccgaggaaggcaatcgttccgcggagacagctgagagcccgcgcggggctggaggccggaagtaccgtgggggcgggacttggggtgccggaagtgatcattcctcggttcttcctgtcggtgctgtagcagaggagatgctcccggcggctgagaggcgtcagcccgaggacggttagcgagaggggcgcagtgtggacccggggccgggccgggccgggcgggtggcccgcactcggaccatgagctaccccatgcactggggggaatggatcctgaactttcgggtgccgcccgccggggtgttcggcgtggccttcctggcccgggtcgccctggttttctacggtgtcttccaggaccggactctgctggtgaggtacaccgacatagactaccacgtgttcacggacgccgcgcgcttcgtcacggaagggcgctccccgtacctgcgggcgacctaccgctacaccccgctcctgagctggctcctcacccccaacgtctacctcagcgaactcttcggcaagtttctcttcatcagctgcgatctcctcaccgccttcctcctgtaccgcctgctgctgctcaaggggctggggcgccgccaagcctgtggctactgcgtcttctggcttctcaaccctttgcccatggcggtgtccagccggggcaacgcggactccatcgtcgcctccctggttctctcgaccctgtacttcatagagaaacggctcatcgcgtgcgccgcggtgttctatggcttcgcggtgcacatgaagatgtacccggtgacctacatcctccccatagcgctccatctgcggcccgagcgcgacgatgacgagcgtctccggcaagcccggttctctttccaggctcgtttgtacgacttcctgaggaggctgtgtagctgggcagtgctgcttttcgtagcagttgcagggctcacgtttgttgccctgagcttcggtttttactataagtacggttgggagtttttggagcacacctacttttatcacctaactaggagggatatccgccataatttctctccgtacttctatatgctgtatttgactgccgagagcaagtggagttttactctggggattgcggcgttcctgccacagttcatcttgctgtcagccgcatctttcgcctattacagagaccttgtcttctgctgtttccttcatacgtccatttttgtgacttttaacaaagtctgcacctctcagtactttctttggtatctctgccttctgcctctggtgatgccactggtgaggatgccttggaaaagagccgtagtcctcttactgttctggttcataggacaggccttatggctggctcctgcatatgttctagagtttcaaggaaagaacaccttcctgtttatttggttagccggtttgttcttccttctgatcaactgttccatactgattcagattatttcccattacaaggaggaccgcctaacggagagaatcaaatacgactaatgtgttctggatcttctgcaacattctgattttgccgtatggactaggaggctttggaatttttctcctccctgaacattctaagcactctagtgaaagttcctttgttccaatagaaattaaaaccagtgttggccttatatataaagggggcccaagaactgaggtccatggtccatcctttagaagtcttagggctcatttgcttgatgagaagaaaaccattcctgtttcacagttgagaagccggtgaagctagaagatgctgaaatatttttgaacagtagaggaataaggtctctagcagcgtttgttcctgtcacatggtgctactgttgtaccttcagcccctgccttttttgtttttcctgcagttctgacagcggtggaagttgacaaaattcctaaagtacaacatttttacgtattaagtattaacagttccatgctcggttggggaagtctgaaatttttgtagtaagtgtgggggcttagaagagaactaatccaaagaatctaaattgtgatcatgtatttgttttgtaactgagtttttcagtattagtaccagtggtattcattttatataaaaagattaaatttaaactcatccactgtagacctgagtttaagaaaacgaaatggagcattattaacatgtatatgcttatcctttttctaactgctaggaagacttttcctctagagtttaagctgagagcggtctgttgtaaaagtggtaaaatttagatgctaaagcctaagttttgagtataacttcacttgctctcttctggttttatcatctaaattgttacaaaggagaacattgtttataaggcataaatcctacactctgaaaattccaggatagaaaggaagactgcttgctgtaaagcatgagtgctgcgtgctgtcattggacaatcaagaggtggtaagggatttgaggaattacagaaatgaggctgtgaggagcaggtctttctacttatcacttgaagtaaacacagtgaaactgtatgaataaactttctcaactgtatgaataaacattctaaaatatttttagaaaacatagagcctgtctgtgttgagggttttctaacattcaaagatgcagtagcaatagatgagtataattttttttttaaagaataaaattatcatctttaaatgcaagttcaagagaagataggatttttgtttgtttgtttgttttttttttggtttggtaggggttggtttttcctttgtctggttttttttgtttttttgttttttttttttgacccagggtttctctgtgcagccctggctttcctggaactcactctgtaggcaaggttgactcaaagatctgcctgcctctgtctcctgagtgctgggactaaaggagtgtgtaaccacactcagcaagaagaaagttttaacaggctttaatttatttttacttttaataagaatgttgattttgaatgtttatcagctagttctgattgttttatttttctttgagatagcactccattctacagcacaggctggcctcaagctcactgcactcttcttgcctcagcctctgaagtgctaggtctacatgtctgagccactataactggctttctgattgttacttctaaagcaagattttagggttaagagaacaactgctgaaagttgtcctctgacttccacgagcatgcagtgacgtgtgcttgtgcacgtacatgggtgcacacacacaaactaatgagtgtattctctcaagaaagctatttaaaacatgaaaaggtctagatgttttcagatataaaataagttgtctcaatgctgatgtctaacgacttttagcaaatgtggtagtaaacaatcacataaatatgtttttggctttaggaaaaggactttgttttttggagccaaagtctcactgtggtaaactcggatgcctcagactcagtgtgcaatcccgaccaacctccaactcattctcctgctctagcctcttgggtcctgggattaaaaatgtgccaggccagtttttactttgactgccatatgcatatccttaccatgtttttctctttctttgtaaagttccagcttccatgcatgtacctgggtgacatgagaattctaaaaaaaaacaagctagaaaatagttctgtctccagcctgcataagcgtagatggcgataatacagactctctcagtaggtcctctagccgcttctgttattccacctttgacttcgattcctcttccagctgcttacccagcctttcactctgctccgccttctgctggacggcatccaactcagccagggcgagctttagcttttccttaaagacattcttttcggaagtcatttcctcttagagcagagcatcagagtgtcctttcctaaggcgctcctgaaaagattcaatgacccttcgggttgtgctccatctccaggtgcttatgatggtaaaacttgagaagcaaactctccatgaatataatttttgtgatcatgatgattttgtttttaaattggattcttttccagggtcagcaacaacaaaacctcctgaaaaataagcactactccagaaaagtagtattctttccccctgtcacggcaagcctagaaagcctttgaggataaaatctttataggctggtcataattaaaaattctcttaggggcagcatttctttgctggattccttttgggattggccttagaaagaagaataggtggcttttctgttgcttactgtatgtgagaaaagtggtcaattgtagaaaacagtgacctttcctaaaatggcaagatccatatttctatttagctcctaacagcacactgcttaagacagtttaagaagtggctttccaattatggtacatgaaccttttaaaattattatggtgattgaaacccctattctaggcaagcagtctgccactgagtaatgtacccagccccaagtgaatatttgaaattgaaaatttgagcaaggaaagtatatattcatgtgtttgtataggcttgacttttgttgttcttttagacagtcttagtccaggctggccttaaactttgtttgcccaagataaacttgaactgatcttcatgcctctacctcctaaagagctgagattacagtcctgtgacactgtgcttggctcagaaattctttatcaaagaaatgcaagtgtttcttaagggatgcagaagatattttgccgttagtctgctgcaaacctttatttttttaatttgctttatatgtataggtgttttgcatatatgtctgtgcaccatgtgcattcctagtgcccaaggtggccagaagagggcattggattcctagaatagatggttctgagccaccatgtgggtgggtactaggaattcaacctgaaaatctccgggaagagcagctagcactcttcaccactgagccaactcttcagccccatgctgcagagacatttagtaagttaagcggagaaaagacctgatttgatcttttggcttttacttctgtgttgcagcttttaaagttttatttggggaagaggcgcacataccttgtcctgtgtatgcaggtcagatgcacttgtggacggcagaggacttgtggtagtccatttccctctttccattatgctggccctaggatcaaacttgggttgtcagtcttggcagctgtacctttttaactgcactgtctggtcgctttgtcttttttccgtttatgatatcttttgtttccttataagtccttaaataataccttaaaattgtgtcgctctttgacgtattttctgtgtaattctcttgttcttatactacctgcattatctttatgtcactgtagcaaatgcctatcataagtcaactctcaggagccataatgggacaagctaataactagcaggtgatcatcctgaagtggcctgcctcggattattatataatctgcgacaggtgcgcccttattaagaaaggctgtaagggactcattttaggaaagatgcctgctattaatgtgcttttcctgttactattaaacatatataacaatcactaagtagtagcacacccctgtggagcagatctctgcagatccacaaaaagcttgtcgtgttgctatatagacaaatagatgacttaagtcttcatgatgatcctataagaattcctaaaattatatctgtgtttattaagctcttttataacaggactgctattaggtccttttttgatagtcaaagctgcaatgagaactctgcccaagtgtccccagttaattgctcttagatagtaaccagactttatcctattcagagtacactccaagaagttgtaaaacaattaaccaaaggtcataaaaagggaactaatgatttattataggtgttaggacagaagataaaatatctattgggcttatctatacaaaacttcactgataacttagttatggttttaaaccttcagtgaccctgtggagctgagacaagtgacggatgtttagccatataattactcctgttaggagcgtgcatgtaaacattcactgttgtaaacttctatttcagtttatgatttgatttttatgtgtgaacttgtgatgaacttgtaacatgtgatcatgtattctggaagatatataagtactgaggacagagagatgaggggagagaaaggagaattttttccctttccccacttagagaactttttccctttccccactcaggatctttttgcttagatagctttcataggaaacttttttacaacttagtaataaactctataactacttttctaagtgtccttttttctccctgcaacttccaactagcaggctgaaagttagagcccagcagcaattcctgctgcgatagaacaaaggctattaacttaatcctttgtggtttgaggaagaggtgctaagtgccagaaagtgcagtctctggccttagaggatcacagaaggcagatcagctacaatagcatagtaacttagaattagacaggtaaactttttagtatatagcaaccctaaatataagaaccaagaaccctccgcctacgcactccccctctagaagaaccaagaagaaagagcaaaacccccaccagagctgccccgcccccccaacagtcaatttatagagagaaaagatttatttggggccatggattaaaagtttaactttgagattggttggccttgtggccacaggcctgtggtaaggtagcacactgtagcatgaggacacgataaaacaaactgttgacgttattgtgggtgcagaagacaagagtctgagacatgggtctctgagatccttttgagggcacacccctaatgccttaaaacctcacactgggctggcctaaagtttccacagtttccagtagtgccgcagtcaaggaaacaaacttttaacacctgggccttggggagagttcagatccatactatagcattaactgtgtaggacagactgactgacaggcaagcagtcattattagattaagaagaatgtttctccacacaggttgtgattttttttttctgtaactgcttttctgatgtccccaaaatgtcattaaaggtctcaagttccctggattgggatcattattgtctgttttgttttttagttgtaggagatagggtcttatatagctcaggctggtctcaaacttgttatgtaacagaggctggccttgaactcagcctcttgagtctacctcccaagtactagaattaacaggtgtgctggaccatgcctagtgtggattaggttctttggaaaagctgtgagaaatatgtacactactgggcaactcagcaaaaggattcttaaaactgtagatctcagtcactgacatctcgccatctggattttataagctgtataatgatgtttcataagttgtataaaacttgaactttaatttatggctgaatatattgttctttttttctcttaacatccgttattttatattcctacctacactctcttgccatctgtgatgtaagttatcagtagaaaagaaaaacctgaaaaattctacctgtggtggtctttaaatccaatctcttgtcgtttccctcatgctttattatttgtgtgtgtgtgtgtgtatgtgtgtgcgtgcgcgcacctttgagctggtcagattggctaggttgactggccagcgagccctaaggatctgcctgtctttgcactgggattctaagtatttatctccatacctggcttttgttttttctttaaacattagccatataaccattacttttctcagtctaaacagaattggcagctaagtaacctttccccttcaccagagttgaacacataacttttgtggacaattctgtctccctcctaagaaaaccaatttatcatccttgtgttttatggcaaacttcaagatgagaggaaatttccatctccatccttcatctccattcttttgtcggtgacaataattgcttagctgattttgtagcatggtgatggttttttcattgttaatcaatttctttactctgacacaagttaatttttatgacaacacttcagatttggtgtttggacttacttttatagacaagcttagtggtttaaagattaaatggctggctgataaagccagccagaactagaatttaagtgaaaatttctgactaaactaacatgcccttttcactgttttagacgtttgttttttttcccagagtgcccagctccagcagatgatttctgcaaaataaatgggactcaacacttaagtctggcagatgtcctgccaatcaatttgaccttcttgatgtgtaagggacagttcttgtaaaggacagttcttcacttctaccaagttcctgtgtgtgcttgatgctctcagaggccgaaagaagagatttggctcctctggctatgggattacaagtgtaaggtactgggaactgaacccaggccttctggaagaccagcaagggctcttaatttcaagcctatttctattgttcttaaacatttctcttagtgacttctagatatttaataatttttttcacatgcaaatcctcttgtagctggtctttgctactttgtgggttctttttcctactctttatgcccctggtttcactcccatcactagataggagagaaaggatagaggaaggagagagtgtgtgagattcctgaattgaattccctaattagatgataacctaatctttcttctttgagtacaactactaacgaaccacaaccaaccctgcctctgggggcgctaggatttatacaccctcggaaaaagatccctgaattccaaatgtcacacagtctcagaaactgtctgcagctgacaaaaccatgcctctacacgaggcaaatcatagctgctggagtcagaagcagccccagatccttacacctgggattaaaacaagcacatgcgtatgctgtttctgtatcttaaagaatcccaaattgtcactacatcctcttgcacctagttacatctttgttactgttctttccctccattcacccagcctatgaagtcaaatcagtgaattagatctgatcttagctcattgtaaaccaagctacaggtagtatgtggttataattccctacatttattcagttttttttgtgtgtgtgtgtgtgtgtggctgaataaaattccagtgtgtgtatcacattttctttattcactggttccactttttaaatcattgtaaattgtgcagcaattaacaaaaatgagcaaggatctctgtggaagaatttaaaagtcctagtttgactttggacctaggaatatatagttgattcctctggtggctgtatttccgtttgagacaccagcatcctgatggccacagcagctgccccagtttactgttacaacagtttacaacctcacctgcatccattttcttgactttcgccattctgaccagggtgaagacaaattacattatacactgcaatgctgatttgtataacaagcctccatgtggttaaaagaatgttctaagctgattaagaccctaagagctcgtggatctacacctaaagagcttaggttagatcttgagcaagatctccacatctagatatattgttttccatctgtaaaatgggggcaaacatataatcagaaaattgcttggtaaggaattagagaggcaggcagatttctgagttcaaggccagtctggtctacagagttccaggatacacagagaaaccctgtctcaaaaaaaagagaagaggaggaggatgaggaagaagaagaagaagaaaagaaagagaagaaaagaagaagaagaagaaattaagccaggcatagtggcacatgcctttagtctcagcacttaggaggcataggtggcagatatctgagttcaaggccattctccaggacggacagctacataatgagaccctatcttgaaaaaagagttaatatgcttaacattcttgtgttggtactaaatattgaaggcaaaacaaacaaacaaacaaaaacagtcaaatctcgtcagtaaatgggctaatgacttgaacagcagttctcgaaaggagaagcaaacggacaataaaccctgaaagggaaatgcatcttaaaagtgaggcttgtcctcacccgggacagaatggcttaagtcaaaaaaatgaacgcaggtgaggaggcagactgctgggacagtaaactggggcagctactgtgggcatcaggatgcgggtgtctcaaacagaaatgcagctaccagaggaaccgactatcccactcccaggtccaacatctaattctacagagatatggttttatttctgtttattgctgcacaatttacagtgatctaaaaggcagaaccagtgaataaagaaaaggtgaagtctacataccagagttttattcagccatgaaagttatggcattatcaaagcaaaggattcgattggaattatatgtatatattatgtatatgtgtgtgtgagttgggattatatattatggatgtgtgtgtgcggacacaggagcacacatgcacacacacacactagatggtggaataagaggagggaattattctagagttccaaaggaaatccagacaggatttctctgtgtagccctggccatcctggaactagctctgtagaccaagctggcctcgaactcagagatccacctgcctctgtctcccaagtgctgggattaaagacttgtaccactaatgcctggcactaatcagtggaggtttggcttgggccgccaatctgcatagcatttttttctccattgtgtggtactggggggcggaggttgtcgttcaaagcttagtgctctgtggatggaagcacatatcttctgcctgggtcagaagtatcacaatagcatgagcacattgtattcagcaccactctagcagaaccattcatttagtcaaaacgcattcatattcattatggtgaataaaacccagactaaatggcaatgtttctagctgtgcagacacagtgctaattgcagcgtctgctatctaaagtgaaatgacacttacagtgactatttaaaataatttggagcatgaatatttgaggttcagttcatttcacaaaggaacattttaacctgctttgctctccattctttgggcagttatttatagatccttgccatgtgtcaaatatggtcatagatgattcaaataaaataaatgttctgattttgaggaatagcagtaacattagaaacatactctgttagtaaaacctatgtgagaccccattaagcttccataaatatactgtgttttttaagatgagggtgggtaaaggcttgggtggaggatgttcctatgtttattttacagattttaaaaaagtctactcagaaactagtggctttccggaactaaagagcagtttgacgcaaggccagagttggaccctgccaccactgatcccagttctttattttctaattattttgcaagtttctcttaatgcttcatgaaaatggctgatttcctagggaaatttcatttgtgtagaatggactaaacttttgaactgtaagccagccccagtcaaatattttcctttataagggttgccgctgtcatgtctcttcacagcaatgaaaccctgagacaaaggtcatgtttatttttttaaaggtatgtttaatcactggctgattttttttaattttaatttcatttattttacactccaaccaaagtttcccctccctcctcccagtctcttccccccaatgtcccctccaccccatccactcctcctctgatacccacgatagaaccaaacacaattggaaaaaaagtcaatgaaatgactcttaatgatattctgtaacactcatagattggtggttagcccagttgtcaccagagatgattcacgtaggcttagagttttcaaaaccttcttcaataagggttcttaaatgcttcaaccttccttctagcccatcagccaccagaggtagtagaaaagaaaggttaataggaaacaggggttgtggacctgttcagaaatagttcactggggcagttccaatcctctagcaatcagcagctgcagtccagtccactcagcaatcaccactcaggaattagcacggcccgagaggctctgccaatcggcccgggtttgaagaaatgtcaagaagcctctggaatatcacgagaagttctttggtgagttagtttctacaaggtcatgacaagccaagatcagtgacacactacaaggatgaccaatgccagagccaccttccactgtctgtggagtcatatttatagtctttctaagcatcatgtgtcctcttacatgtctgcttcagcaaaacatcttctcacttatatctgcttcagcaaaacatcctttcacctatttgccccaacaaaacatcatatgacatagaaaccagaaatttccacttcagctttacccagcaactgatggaaacagatgcagagacccgctaaactttaggcagagcttggggaatcctgtggaagatgggaaggaaggattgtaggggccagaggggtcaagggcaccacaagaatacccacagaactaacttgagcccatggggcagacagagactgagctgccaaccaaagagcctgcatgggaatgacgtaggcacttcacatgtatgcaatttcagatgtcattctattgacctcttgatcctcaagacccacacactacaaagagaactgacttgggaaagctgtcctctgacctacacatatgcactgtagcacatatgccaccccccaaaatcaataaattactaaaaatatatatgctttgtccaaggtccaagatagtatatttaggagggctggaacccagatcttccaggatggtcctcattccttcctctggtgaacgttttgctatggtgaacagaaaatgatccactgggctctagaagtctggaagtgcaggaaaaaaattagttcaatgattattcattcatagtggatagtgctaggtatcaactttggtttcatactcaggctcttggaataaagacgataaaaataacagttctctcttcaagggtttcatagtctgatgcaggcaactgatgggaaagtgattgtaactcacaattcaatggctgaaataaatgtccacataactaatccatcctcggtctggataaagctagtgtagaacctgggataggtgggtactaagatgttatctgcttccctttaatactggataatagcagtggcttttaaaaatttccttcttaaaatcagtctcctagcaacaggggatacagtgcctgaaccagccatctcctgtaaccaggtaagacttctagtggagggactgagacaccaacccagccgtaaaacctttgacctacaatttgtccagcctacaagatgtgctgggatgaaggtggtgcagaaatttgaaagtggccaactagtgactggtccagctcgagacccatgccatgagagggagcccacccctgacactgcccaaggggtcaggagccagaggctagatagcccagagacccaccagagaaccaaacacgaatgggaaaaaaagtcaatgaactgattcctgatgatattctgctatactcatagattggtgtctagcccaattgtcatcagagagacttcacccagcaactgatggaaacagatgtagagacctacagctaaacatctggcagagctcgaggaaccctatggagggggtgcagattgtaggagcgagagggaccaaggaaatcacaaaaagcacacagaatcaattaacctaggcccgtaaggcccacagagacttagccatcaaccagagagcctgcatgggctggacctggaccctttgtacatatgttacagttgtgtagcttggtcttcttgtgggactcctaacagcaggagctgtctctgactcagttacctgcttttaggacccttccccttaccgggttgtcttgtctagccttcatagaaaaggaggtgccgagttttactgcaacttgatatgccgtggctggttgatatccatccaggccagcccttttctgaagagaaacataggggagtgaatgggacaggaagggggatgttgggagggaggtcctaggaggagaggatggagggggaagccatggctgggatgtcggtgattaaacaggcctttacaaaatcaacatgatcttctttgtcttagttaaggtttcactgctgtgaagagacaacatgaccaacagaaacccttataaaagaaaatatttaactggggctgacttacagatcagaggtttagtccattattattactgcaagaaacatggtggcatgcagggagacaaggtgctggagaaggagctgagagttctacacccaggcagcaggaagagaactggtttgagtttctgagccctcaaagcctgccctcccagtgactcacttcctccaataaggccacacctactccaacaaggccacacctccgaatagtatcactccctgtgggactagcattcaaacacatgagtctataggggccacacctattcaaaccaccacaacctttaaaagagagagagagagagagagagagggagagagagagagagagatagcttcatgaagcccagcttgaccttgaattcactgtatcaccaagaattatatatgagtgcactattgctctcttcagacacaccagaagaagacattggatcccattacagatggttgtgagccaccatgtggttgctgggaattgaactcaggaccattgcaagagcaggcagtgctcttacccactgagccatctctccagcctgccaagaatcatcttggctcctgacccacgacttacatgtaggtatgtgctccgtgccatgtttacacatagtgatgactgaacccagggctttgtgcgtgctaggggaacactccacccactaagccattgctcctcacccgacctttatgattggttcttccctgttctgcttcatctacctcctcccaaccaccttacccaaatttgccatctcttcacgctttgaaaacatgtgctgctcctgtggtaaaatgcccttcttgtctctctcaccagttcctgtttaagggtgacctttgcaaagcatcctccggtacagcacttttattttacagtgcaggtcatcttgtcctatagtttcagtgcgtgactatgccttgagttctataaggactggcattctctcttactcccttattttccaggggtttcacagacccaagcaaagatgggcgagagtagtcaacgccattgagctactgaggtgctccacctactctccctggtttgttgaattgagttatacaggagtacatcaagtgggaggtggggacagttgagttcttcacagggtgtccatggtgacagctgtgcaaagggaaagaaagcactttcttactgcctgtcatttccaaatgccatcagggtctgcctagttttctaagttagaagtttataatcacctcctattccttctcttactaccctgcccccgtctaatcagtcactaaatcctgtcggctctaccctttaatgtccccagagcccgctggcatcttgccatcgcccgttgccagttctccagcgcaggccctcattatcccgcacctagaatcgatagctctgactggtctcgctttccatctctcttgcccttcatcccacctctcatctatcctcccctctgctgccaccgtctgctttctaaggcacatctgttcctgtcaccattctgatgaaagcaccggggaagctccgtgacctgcaagaagtccaaccgccgctgcagcgccttctgtctcccactgctttccctccctccacctcactctggctcaccggataatgcagttttccggaatgaccccagttgcaaagccctcatttgtgctgtctctctgtcaagtgggcttgcctgtctcctggcgttcagaccttgtgccacccactcttcaaggcctaactcacaagcctcttttgagcgataaaaactccagttataaaaaccggagaggttaattagtaaggaaaaatgtgggtgtaaggctaatatttttgaggtattattatatttcactgggcttttatttctttcagatagattagctcctgaggacaatatgtgttggtatgtatgtgcatgcatgagtgtgtgtgtggtgtgtgacagtgtgtgtatgagtgtgtgtgtagtatatgtggtgtgtgagtgcgtgtgtgtgtgtgtgtgtgtgtctgctgcctgggtgtagaactctcagctccttctacagcaccttgtctccctgcatgccaccatgtttcttgcagtgataataatggactaaacctctgatctgtaagtcagccccagataaatattttcttttataagggtttctgttggtcatgttgtctcttcacagcagtgaaaccttaactaagacaaagaagatcatgttgattttgtaaaggcctgttattnnnnnnnnnnnnnnnnnnnntgtgtgtagtgtatgtgtgagtgagtgtggtatgtatgtggtatgtggtgtgtgtgtgagtgtgtgggtggtgtgagagtgtgtgtatgtgtgtagtatgtgtgtgtggtatatgtgtgagtgtgtgtatggtatgtgtgtggtgtgtaagggtgtgagtatgtgtgtgtgtgtgatgtttgctgagcaccatttgtgaacctatgtatgtctcatagtttcctttaactgccaaaataatttcttaaaatataactgctattgttaacaaaaataaacaaataaaataagtaaataactaagtaagttcagaggaaataattctgccttccacaaggttaaaggctgttttttgtttgtttgtttttgtttttgttttaaaggactggtttaaaaaaaaccccacaaggggctggagagatggttcagtggttaagaacactgactgctcttctagaggtcctgagttcaaatcccagcaactactgggatcacaagcatttgtaatgggatctgatgccctcttctgttgtgtctggagagagtgacagtgtaatcatagacataaatttaataaattttaaaaaccccacaaagctgtccagtttctgacctgtatgcagttttatgattctttttctttctagtctaccgagtcttttttctttccatctttcttctccctaccctttcttttctaatttatcttggagaaggcaatccagagcgcgccgatgttttcaaacctctttttctaattaaaaggaagaggcggtccataagacgctgcaggtttcagactgacaaggtctctagaagctgggaacaaggccaaaaatgtcaccctctgaaagtgacaacgagaagtcgatgagattaatcactatgataatcttcccaggaaataaccacctaagaaattcttgttaagtctgttgctggtaggatttggctgttttgtaatctcagctagggcccaagatgtctccctaccaaggaaagcatttaagatgcagcttgtgtgaggtaaactgtaatctaggaaattacaagtgtttgtcctggggttattaatgggagcgccagttagggacttctaagcatgactgtaaatgttgcagacagtctgtaaatgtggctttagtttctgttgttctttcttatcagggtaataaaccccaggaggtagaaactagttttgttttatcagcaggggtattgctagaaaaagagggattagtagggctgttagatgctgttgtagttccgatgcttcctccacccatgtaccagggtcggaacctcaggcttctgtagctgtggggtgtggtagggaccatagagaataggggaagtcttaggaatagggcagccacttggtaggactgtgggaccctcctctttggctcctactgtgtgacttctctcctttacctacattcttggtgtgacttgacacagccagggtggtcaccaagctgagccaaagaaacctcttgtctttgtacagttagctcgctttgagtatcttcttgtcatgaccaaaaatgagctgatacagctgggaatgtagttattaattagaatcccagtatcctggttgctatgcataattttacatgcacgtgtcttcatttttccccccttaggaaaatgtctgtagctctaatcaaaggaattcctgacctctcggaggttaagcccttgctttgatgattaaagttacaaggaacaataaaacaggagacaagggaaagacacagacatgagatcctccttggagagagaagatgcctttttagaactccgatttattggctttgcacgcacagggccctgttgtgtatacagagagagttcccaattctctcacaaaaacttcgagtgtgtggggaaatgaattgtgcgcagcaagggagagcagggatccaggattaaggctgaaaaagacgaaagggtgctgaagggcttggggaggaagctcttgtgttctcgtgcgcgtgagtgcaagcacatgcacacacaggtacatcttaaactgtcccacaagtgctaagttaatgcagagtttagatttcatagacagtctggggtagccaacagtcatcactaagaaaagagctcatgagactaaactctaggtaacagataattaaaggaattaagacgaggttccctctaaggctttgcagattataaattacagaacctaactttagctaaaggatgtatttaaacactacagggcagttaatgaacttgaaaggcgtgaacgagcaagcgtgggaaggaagaaactgatcggtctgtagacttccacatcaggggacaagctccagagagccccagtttctagatttctattttaggttttaaaatttcaagaacagagttcaccattggcactgatctcagaaaagatcagctccttagccagggaatggctccagctattcaccacactcatgaccattactggtatcctgtcttgaaaatgatgggagactgatgggagactagcatacaggcacccaaatcttcagattacgggcttcacattgcaagttttcaatatactttctctctttttaaaaattgaatatatatatatatatttaataaaatatattctgattatagtttcccttccctcgtctctgcctggatcgcgtcgggtagtggttggttacttccacagcttttgcgccgctgctgcaccagcatatcatgtaggcaggtcgacactgtagatcaaagggtttctggatgggttggtgtttagtctcttctggtaacatcaatgcacttttttttttttttttttgagtttaatcacttttttttttttttttttttttttgggtttttggagacagggtttttctgtgtagccctggttgtcctgggactcactctgtagaccaggctggccttgaactcagaagtccgcctgcctctgcctcccgagttctgggattaaaggcgtgcgacaccacgcccggctatcaatgcactttcttaacttctacagttcaaaacctaattgttagccacttattctttctctcttgagaactgaatccaatgcatttgcccatttactgattgggctatttattctattggtgtctaattgtttttttaatccttcatataaaaaaaatgtgaacggctaacaaatacatgaaagaatgttcagcatcctcaaccattggggaaatcaaatcaaaacagccttaaaattctgtctcactctcgtcagactgtctatcagaaggaaaataggggctggcctgatggctcagtgggcaaaagtcccaaatgaaggggtcaaagcactaattgcgcaagtccaatgacccaggcttgagccccaggacccatctataggtagaaggagagaaccaactccacaaacctctgcacagcgcggcaatgtgcaccctactcgcctctcatcattgtcaccatcaaaactaaaaagaagacggaagtgcaggagaatacgtggagggcaagagaagccttgtatactgctggtggaaacgtaaatctgtccagctactatgaaaccatagatgtcccttgaaacactacaaacagaagaaccacatagctcagctaggtgcatgttcgaaaatgtcatattgaattttgtgcaattaatattttgctttaaaagcccctaattaatatagagaagggggaagaaaggggaaggagggagggagagagacagagacagagagacagagagagaaacagagacagagacagagagacagagagaggagggagggaaggagggagggagggannnnnnnnnnnnnnnnnnnnnnnnnnnnnnnnnnnnnnnnnnngggaggaagggaggggagacttgaaatttaaatgctaagttgccagggagcatcaaaacaaaacaaaacaaaacaaacaaacaaacaaacacccctcaaattaattggagttgctcttctgaaaaccagtacaatagttagctctgctcttggaaatataaaacctagagatggaaagggagagctgggggtggggtggggtcatgagagctgttcgcctgctgtggagagccacaaacctgccctcgggttcccttcttgcttactcccttcgctggagctagccagcgttctttaaggaagtccttcggcagagggcggaggcgtgaagaggtgtgctggacttttagaagcagcagctctcagggaagacgaacctggctggcattccggaaatggaagaaaaccctgggatagaaggaaggcttggcttcaccctgttggctgtgggccaaggtgagaaattcaggcttgttttttgttttgtgtgtttattttttatttcctctcaggcctaataaaaagccactggagagatttaaatagaaaagagttctgtttttcataaggctccgccccctagataacgagccacaggcaattaatgtctgctgagagagagggagaatcggtctttcccttggatgcacttcctcatggctatccaataccaagtgctcatctctgaagcatgcgtatgaacaggagcactaaacagactcaggaggttgtctcatactgtggaggttgggataacagttcagtggatcacgtttttttctgcacaagccaaaaaaaaaaaaaaaaaaaaaaggagttagaacctccagcacccatgaaaaagccaggagagtgtggccagccacttgtaatcccaccactgtgaggcagtgactgggaagctctgaaacaagctggctagctagaccaggtagaatcagggccccaggttcagcgagaaacttcaataaagtgcaaagcagttaaggagggctcctatcatcagcttcaggccttcacacgagtgtgctcgcatgcctgtacactcacacccacacacgtgtacacatagagattcgaacgcgcatatgcacctgcaagcacccgccagacacacaccgctctgaagctgagtataatgctgcatgcttgtaatctctatacttaggaggtggaggcaaaatgattccctgggctagataatgagatcttgtctcaataaaccagaactgtccagaccaaccaaacagagaacacgacgatgacgacaacaacaacaacaaaaatggggtgtggttcagtagtggagcccttgtctagcgtgctagcatgtgcaggcccttagggtggatcccttgccctgcaaaaaataggaaagaaagaagggcagcgttcagaatcactgtagatgcttactagagtgtggatcctgctaagacccacaggaaatacccagataagagaccatgatggtagctgtcctgactactttagtgtctgtttgactcaagttgaagttatttgggaagagcgtgggaggtggggctgggggtggaggtctcaaccgagaaaatgtctccataaaatccatctgtagtgcattttcttagtgatggatgttggagggagaagcccactgtgagtggggaggccgtggtcctgggatatataaggaagcagtggtgaccagccaggggagcagcaatgctccatggcttctgctccagttcctgccctgggttcctatcccggcttccctcagtgatggtcttattagctgcaaaatggaataaaccctttcttcctcggttgcatttggtcatgttgatttatgccagcaatagagtccccaagacagtggcttaaactcaagtagaagcaacggctgggtttagcacacgtttgtgtattttggagcgagaaccatcaggacttgcccaggtgaaagagaaggaaaaaggctgttggtttgatcaatgagatggttagtgatgtctttcactgaactggagctgggaagggatagatttagggaggaagacagagtctagaatcgatcccgccaggtttgagatgttgatatcttggttaaaatcagggggcagtcagatagacatctgggaaccaccagactagttgtacttacacacaagggccggaccgaacttgtgcgcgagggtgtgtatgaatgatctcagggcactctaacgttaagaagtctgtctttcttgggggttgggactggggaggtggctcagttaggaaagtgcttggtgcgagcatgaagacttgaattcagatctccagcccccggctcccaccccgccctcttgtgaaagctctataactccagagcctgtgtgggtgggtctggagacagattgagatttaaccattgcattctagccagtccagtaagattggctcagtgagaaatcttgtatcaaattataaagtatggggtcagcaggatggctcagtgggtaaaggtgctttataaccactgcttagccttataacctgtgtttgatccctgggactcacatggtggaaggactccagaaagttgttgtcttactgtcttacttctataattatgccatgacacacatgtccctaaacacacatacacacacatacacacactacacacacacatcacacacatcacatctcacacacacatcacacacacactcattacacacacatcacacacacacacacacacaaacccagctttctgggccaacaacgagcaaaggagggtggctggttagacaaataccatactattttagaagagtaggctcttaccttgatatcttaatgtgcagaaatgtatttgatgctttgtttatctccgacatcaacattcttatttacgagtggactcttagatgggtgtaggaaacatcacagcctttggagggcagacttttccttccttgaaccaaggaaggcaaaatctttctggcttttctttccatatatttgaggagttgacaggaatccactgttcactgtgactggaacgaaggctaagtctgtcaataagtctctttgggcctacatatttgtgggagtccattagctgtactaactggccatggataaaccacatattttacttacacacaactctagtgagccacaggcagagaatctactctgtggattatttgcaataaaatttaatttttttcatagtgttaaattaaagcctgtctaagctctctttgggtatttcatatatttctggggaggctttctttattaacagtcagcatatgagtttattttagaagtggtctaagcaaaatacaagtagaaagatgggcctgctgcttataaatagtgtatatatttagtagaaataacacacacacacagagacagacagagacagacagatagacagacacagagagacagagagaacaaagttatataaatggtatttagctctttctagcacagctaagtaaccatagcaatcaattagttcatgtgataactccagcttgctttatttttaaataaaaataaaagtccctcttggtatcaaaacaatatgttcactatgaaaaacaggaacaaaatttcttaaaagaattatttaattatatatatacacatatacacacatatacatgcatgtatatacacatgcatataatatatatacactgtagctgtcttcagacacatcagaagagggcatcagattccattacagatggttgagagccaccatgtggttgctgggaattgaactcaggacctctggaagagcagtcagtgctcttaactgctgagccatctctccattcccaggaacaaaaattttaaatgaacatttagaacacagaaacataactccacagtccactgaaacctgctgctaataccttcggtccagatcattgtatataatctaactataattctaaataaaactcaagtcatataggctcaaaggctctcaataacagagtcttgaagacctccttcagaccttacgtgctaagcatttcgtcatccatctgggttggttttgtgggcttgtttcgttttagtattaaactagtggcattcttgtgtgctttgtttctttagactaaacttttagaaatgggcttcctgagtcaaagtattctgacgtgtattgtcaaattgctctacatggtttattaaggtagaccactaccaacaacaaacgcctttgtcgacgctaaaccgaaaacataattttaagaaatctttgtgaagtcagtagggaaaactcaatttgatttctttgattactagtgagggttgaacatttcactcactggcctttggcacttcttatgattcactctaccacagcctgtgttcagtattccctgaagacacctgttattgatttccaaggccagcttcattatataaggaatattgatcttttgtgtttaaatatttttcgttacatgaattcttttatattttgacctgaaatgctgtgggggaaaatgtatatatttgggcgggagagacgacttggtgcttaagaacactcattgcgcttccagaggtcctgagttcaattccgagcaaccacatggtagctcacaatcatctgtaatgggatgccctcttctggtgggtctgaagagagtgacagtgtactcacatacataaaataaataaataaatcttttttttttaagtgtatattcaaggtctgttttcccttttatgattttttgtatctatggctacttttaggaaaccttttttcatctattgtatagatgtttatctacatatttttgctactgacctctcctcctcctccccctctccctctttgtccttctttttcttctgagattaatatcacatagtcagggtaacctcaaatttgctatgtagctaatactggccttgaactcttgactgcacctcctaagtgctaggatcataggcaatgctccactattcctggcctagtttcagtttctttaacttacaaattttatttggtgtgacataagaaatgcttgattagccgagtggtggtggcgcacacctttaatcccagcacttgggaagcagagacaggcggatttctgagttcaaggccagcctggtctacaaagtgagttccaggacagccagggctatacagagaaactctgtctcgaaaaacaaacaaacaaacaaacaaacaaacaaactgaaacaaacaaaaaagaaatgcttgattatatttatttcagatggtccgctattaaatcaattttgcttcatttcccctttctcctaagatattgacacattagttacataataaagcacatttaatttaaagttgcacattactagggcatggtgacacacacaccttaatcccagaggcaggcagatctttgtgagtttgatgccagcctggtctacatagtaagttccaagccagctaggactacatgtaagaccctgtctcaaaaaaaaaaaaaattgcaccttagaggcccatgatcatatctagcctatggaaatatatgtgtgcatgtatgctcatacatacatatgtgaagatgtatgtattctgtgtatatgtatgtgcacttgttcttgtgtgggtgtgaatgcctgtgcacatgtgtgttgccttagttagggttttgattgctatgacaaaacactgtgaccaaaaagcagataagggaggaaaggatttatttggtttacacttccacagcacgattcatctttgaagaagtcaggacaggaattcaaacagggcagcatcctggaggcaggagctgatgcagaggccatagagggatgctgcttactggcttgcttcccacggctggctcagcctgctttcttatagaacccaggaccaccagcccagggatggcgccaccctccatgggctgggccttcctccactgatcactaattgagaaaatgccttacagttggatctcatggaggcacttcctcaaaggaggctacttcttccctggtgaccttgacacacaacactagccagtccacgtgtggaggttagtcagtgtcaggtgtctaccccagtcatcgtttactttgttttttgagacagggtctcttgctgaatgtggaacttgcaggtttagctagactttctagtcagcaagccccagagagcctcctgtcctctgtctccaaaggactgcggttacagccttacccttgcaaactcaggccctcaggcttccgcggcgagcactttgcaggctgagccacctctcaggctcctaacctacagaagagtttggttcaggtagtttttgaattgcttgtctagaggtaaaaaccaggaagttttattccaaaatccggctttacaaatgtctctggaagaaactaccctgtctggcaatacagtggttgttgccggactcgaaatcactccggacaaacacacagagctggtgacagtagattctaacagtccccatgagcttcattcatgtctggcgtctgctggttccttgtggcatttaagattacaaccactgctgttaatgtctacgctcatcttggcaattgaacaaattatgagaattaggaaaaactgaagttagttctgagttttcaagtaaactacacaaaaattataatacttaccttttcagtttgtacactttctcagtctttcttcttgctgtattacacttggctagaagctttgtaacaaaggccaagcatgctagcccacacctttatattatacctgtcttgatgtctgggcatctgacttttaagtatgcagtaaacattttccactgtcaaaatatatgtgttctatgagtttctgatgccctgtgttttattaatataagctgtgcttgttgaatcttaccacatcaaatgacttccatatgtattgatatcctgtggcttttctctaaatttaatgctttataataagattttctaatgttgaaccacatgcattcttttaatataaatcctaacaacatttaacactacctaatgtaccctaatatacttattaatctaatttgccttttaaaaataattaggaaatttgcatctcatttcaaagtaagatttgcccattgtaatcccctcgctcatccctctgtactctgccaacgttatcctaaatgtacatagtcaagtcttcgctgttgctatggtgaatttttttttcttgtattaactgatatgttccctaatttctttgaaagttaattttcatgtatacacatacatatagcagtgactaattttacatgtcatttgactgagtcaaaattgcagaggtagctggcaaagtgacatctctaggtctcttgggcctttgaatcagtcaaccgagtgtagttctccctgccaaggtggagccgtcaccagcgagttaagggcctgcatagaacacaaagagaaagaaagagtagaattgccaaggggtgagagtgagagtgcctatctttctgcccctaggcatggtcttggttcttttccacgtggaccaagactgggactaatacctttgtggggcctggttctcaggtctcaggctttaactaggactacatacttcatgggactctagccaaagaaggcagctactaggacttttctgattctccagtggttcgagccagtccctcatgagaaatcattttcaccgcacatcttttccctgtatccatccttgccgccctgtgtctctgaagaaccctaatagatactgttttctatttgattgacaaataatagtttgtgttgtttgtttgtttatttattgtgtgcatccgagggtgtgcaagcctgtcacggcacatgtgtagaggtcagaggataatgtttggttcttttcctttgaccacgtggattcaggggttcaacttcaggttgtcaggcttggtcagaagtgcctatatccactgagctgtctcatcagtcttttaaagcaaaattataatgtgaaataaatcatatgtatggaataacctatgggatgcaattatgtaatttattactttcttctctgagacagggtctcactgtttagccctctctggtctggaacttgtcattcagacgaggctggccttgaactcataaaactccatctgcttctgccttctgagtattaggattaaaggtgtgggccactatgcttggccatttatataataatgataataacccataaatcactacccagcaaagacatatcaccagtacttagaacttgcttccaactgtaccccctttggatctcccaaaggaaaccactatactgatttttgaaacaatgtgttcttgattgctggttacagtttttacatcttacctgggtatcctttaactaactgtgtcttgtcttatagattcgtgtttgtaggagactctttttgctcagtattatgtgtttgcctctcacctgcactgcctcgcatcccggactgcactcgttttcacagctgtatcattttccattatacagatttgttatctgttctgcgattgagtgacactgttccattcaaggttgcagaagagaaatctgctatttttctcggcgtgaacagcttattttgttttgttttctatctggatgatcataggatttttttttttaaagtgccgttgtcatcttttactagaataaattcagacagctcttttaaatttgccgggcgctctcacggtggctctcatctcgtgcctgctcagttttctctgtgctctctccctcacaatggacgagcttcgtctgtctagatggggacggatggtggggtctcctggagatgatgggtctctgcggaaatgtttcagtctcaacatgggaaacaaatttataatgtcctcactaaaaccacccttgaagtgacattgcatgtgagaggtgggcggcctcacctaaaccaaaagggacctcttaagactatcatggaacactcctgtgtcccacctactctccaccctcaccccaaccctctcacgctctaccagcacccatttaccctccacccacaccctccactccaccccaccctccacacccccacacccccaccttccacccgatcccacccacaccctccaccccatcccacctccaccttctcattccttgccctccaccctccatctgctatctgcggatctgacaaggcagctttgcctggaagcaaatctccactcttttctcagtggtagctccaacaagcctagagcagcctggggtcgcgagcgagtgagctatcgagcaagcactccagccccaggtggtggtggtgtttgactttgacagcccagatggtggtggtgttcgactctgggcgacagcgtgactcgtgactcgcactcctctctggactctgtcacacaatgatttgtttgttctcttctaccctgtaggtcggttcatcagagaatccccaagggaaagctttaaatgtattggcttgggttgcccctgtgggctggaaataccacctatttagcttgtattgatcctcaaattgaaaagtgggcctcttgtgcagcaagctgcctccctgagccgggtaggagggcagagtggacggagagtgatgggcagcctctgttttcccgtcggtaccttgagaaaaactcgcgcttatttagcaggttggcagggaaaccgaacactacccaagatttatagtcgcccgagggacaagctcttgtttgtggtgttgaataagacagtctcttcctcaaagtctctgtacaacaggcagggaggccaatcatttgccaaacatcttgtagaaaagaaaaagaaatgcatcagatgggagactggacaatgtccttaatattcttcctttccagaaatcttgtgactagtgttttctttggatgctcagggcatgtgtgtgtgtgtgtgtgtgtgtgtgtgtgtgtgtgtgtgtgtgtttatttctccagtcctgtagtcctgagttgtttctgctttaatgtcacctaaggatttgtagtcagactgtggtgggtttacctcatcgctgcatatgcaatattttattgccttaaagggtctgacaaattagggatagcattctttttggaagacttctggttcagttctcctctgtgggccttgaagggcctgtattagtcactcagcaagcagttaaggttttctcctttcctcctgggaaacaaaagtgattaggaaattgtgactttgctattgttctcaagaaaattgcattaaaatttacaggtacctttccaaaagaagacaaattatacacattacaagaagggaagaaaagacttggtgattatgtcattcctctgagagcagctcattgttttgcttgctacagaatgtatccatcggagcagacctgtccttctgtgggtctgtgatgctggtaaattctgaccgggagaaccaacctactggccccatttctgggaagataattgaaaagttaggacaccaccccccccccttgagaattgtctgtgcccttggagtacgggtcttcctccttgattggagacactggggggggggagggtgcggggggggggtgtcccgtggcagtgctcttaggttaatcagatatttgagaaaaaaactttattttcagccaggacctgcaaaccacatatcctgtctagtgtttcttgaactatctaggatagggaagaacaggagaggtatcgtcactctggttctgtgcctgttagaatgtggcacctgccagcacgttctttctaacaccacccaagtgggcccaacctgagaaagaaaacgagctgattggtgaagttacaatgcatactaactattccctttggttgtaatagggcacaatgggcagatgctaagagacagggacgtgaaagctgttgactgactctgtgtccttgcataccacgctaggcaacagccaagttgctcctctgcggttcctagatttgtgcaggaggaggcttctctggcttgtctgaatggtcagggagcctgcagctggagtcaggacataactgtaacttcatggtttatttaataagtgtgtttcagtctcttcttctggaaaaggggaacaaaatgggggcactttctggcaatgctgtgaataataaataagctgtagttgttagaaaaacctcaagatcagagaaaatgattaatagtaattagttggaatatgattattgccttacttgaatatttgaaaaaataaattccttcccaatctccagtagaaatattttttagaaatcaaacaagttggtcttttaagagaaactgaactatcgtgggacacttgctgttattttatatgtatgcccttggtgataaagagtggatatttgtgttaggacacctgaatcttatatactttgcttaacgcaatagataatgcccacaaatctcttaatcgcttcagttcccacgagaagaaacagagctacacggtgatggcctccgagctcagctctgtctcgagttctccccccagagactcctgaaacactagttttatagcaaagatgccttccagctagattggctataaaaagatctctttctctctctctctctccctcccaatctctctctctcttcccccattgacttttgttataaaatcagagataatatctcatgggggggtcctccaattgatggaccagattgttaaagaccgggaagatgacgcacttgccttatcctgcagccaacatctgagttcttcgctgggactcctgtttttatagctcataaagatttagtgtggagccttaaaaagttgtaggtgcagtaaatgttgatatgggctgaccatatctgtataacagaaactacacactctacacacacacacacacatacatacacacacacacacacacacacacacacacacatgcatagatgaaatttattgaagcactgtggaagtctttgcgaaaagaacttcattcaaaaacttgtatatgtgaaagggataagacatgcctgaatttgggtctgaagaggaagtcaccacacgggctaaccttttgtaaaggggtctggcagtgagcttagtgttttgaagaacataactgaaaaaagcctcgagacaaggtacttaagatggaacgacctacccaaatctgtacagctaattatggaaacccaggaccaggactcagtactttggctgtgctgggagatattaaagctacttttctgttttctcttcaggaaaagaatttgttactccggagatcatattatttagtcccaacctgctccttttagttccaacccaagatggctgcaatactacaaacataccagtaggtgatgctacaggctacgatattgtatgtctgtcccgagctgacttttacttggaatttcatcatttgggcgttctgaagactccttagaattcctgcaaatatttgggggaatccaaaagaaatatgaaaattaaaaacaaaactatactataacagtgattgaaaatttaaaaggttatatgactagtaatacatacaaattttagttgaaatcagtttttaacagggagaaaagggggcttattttatgctaagctccccagatagaagcagagtttcgctgctccaagtggctcacatcttcattttgttcagcaaagccttccactgtgtcagagacggaactctgaggaattagagaacgaagtgagatccagaacacattgcctagctgtgctatcctggactggttctttaacctcctctggctttgacctaataacacgattacaccctgctgtgagaatgaatgagatgacgtgtgaaaacaaagattagctgtcaccattaactacctttctttctttctttctttctttctttctttctttctttctttctttctttccttccttccttccttttttccttccttctttcttcctctctttcttctttctttctttctctctttctctttctttctttctttctttcttctttccttccttccttccttcctttctttctttctttctttcttcctctctttcttctttctttctttctctctttctttctttctttctttctttctctctttcttctttctttcttcctttcttcctttctttctttttcagttagaaacatttgaaaaatactgacgactttaagtttttctctttaaaaatctgcgaactgggtgggggggaggacttaagaggctgtgtggttgggttctcaaatcaggtttcacaatttcatgatacaatacaattatttatgtaaaaccggacactccgctcctaatcttctacaggtgcaccttgcccccctccacttagggggaacctgatatttcttctttgggtttaagaaactcgcggaatgcaaagccatcctttttatcatttatcgtgcaaaacattccgctttagttttaaatgtagtattcgtttgttctatttataaaagtaatccagaacaaatttgttaaattccaccaagtgatgtgcttatgcaaggattctattaacacggccaaagaagtttaatcagtaaatacagatgttttcctaactttccagccagtgagccaaggctttgatttacctgatccgatgcttagaaaaaatattttggttagaaaagttccagtttattaaatagccgagcaggctactgagccctggcttccaagaagtagcagtgtttggtgtgagaccttatggtactgactgctttgatgaattattgacgggtctctcagttttgtgggcccaccctcatttagttttatctctctaatgataaaaaaaaaagtctaccatgtagatatgtaaccctagcttattttgaattcatgattcccctgcctcagcctctcaaagtgatgggattaggtcatgcaattttacagtgatagaattccatcccaatgccataaactctaatcacaggagaatatatagattctggaaacaacaagccaagggtaagttagttgattggatcttggattttctggctattttgaagatttccatacagagaggctatcaagaaccacgggccccaacacttttttacaaagtgaccaagacttccctgtggtcctagagaccgcttttgctgcttctaccggcagggggtgcagcaagtgtttccctttcaagatacaagggccacattgattaacatgtggtctagggaccaaagactttctaggggaatcatgaaataattttaagtaaaaataagtgtaataacgaatatgcaaccaggatttcagcctagattacatttgcttttatatgaacacataactgaattagaataatagtttttgctaaaggaggaaggaaaacacaaataaccaaagtgtctccggcccatgagcagaataactaaccccaaattgtacctccaaactcagagttctaaatttactgtaaaaggcaggggaagcagagactgtgggaggggggaaattcccaccttctcctgaggctgacactcttctatatgctgggctctggaaggctgtagggaggaagcctggaccatccacatagttttgagttgtttggcccaaactgataggtcaaataaagatatttctgaccttacggctatctaactcttcatctctgactccttcctgaagcagaaataggctctaaaacaaaacaagtctgggctagacaatgcatggtcaagaaactggatgcctcctccccatccaggcttcaggcaacactacttcaggcaaactatagatgagtcaaactatagatgagtcagtttccccctcctcagggagttactcaggaggtctcagagatttctctgaaggacacacgaactgacaagagccccaccttctgcgtgagtagcagaccttgctggttggctgaggactgagggagaaagttccagacatcggctgttcaacgtggtctaatacctcaaaccctgctctggctgcctgcggggagtacctgttgatgtgtttataaaaagagaaagagaagagggaatatgttctaaggaggtgtggtgaggtatgggggaagggtgtgcctcagcaggcccatgccaacacatcccttcccctgagggaccagccacacaacagtatagtatagaatagagtttattcagggcatggggaggggagttaagagggagagagagagagacagacagacagagagagagggagagagagagagagagaggctggccatgatcacgtgaagagagaagggggaagacaagagagaggcaagagaccaagagagagagagaggagagggcaagcagccccttttatagtgggtcaagcctacctgcctattgccaggtaactgtggggtggagctcagacagaatgctaacacttgtaccccttggtctgtggttccacagcctagggtcttcaaaggttttctttcctaagcggggtggggtggggtggatggggagtgagagggtgtgagtggtgtgcaggatagcagggaaaactgggaggcctgattggaggggagcgggatgaagaattcgaccaccagatggcgctaggcgaccagtcagcggcttgcagcattgagagccacagtatggcaatgagggggtcttggagtctgtaccttcaagagtttgggcaccagtgtccttccatttgaccccaaagagggggggcctccttccagcagcgcaggaataggcagaggatgaagagtcatcctgactgagggaggcagcagaaaagcctgggggatggggaagtgttggctgcggagatatttccaggtcccttgcttctcgtctttttgaagaagcaaattcagaagagacatatgcagtttcatcagtttatttagcaaagttaagcaaagcaaacactccagtgaatttgcagtagacaacctcaagatgcgaagcaacccagcatgttctgattgtggtttatagaagttttggggtttgttgttgttgtgttgttgttgttttgttaatgaatatttaggaggagggtgatgtattggtagggttaggtggcactttgcctctccaaaatcatggtggacctcttaggctatttattctcacgaccttcctcctgtgtagtgtagaaactacaatgtaacaatgttatgagaatgttaaatgtttggaggatccttggttagtgcgtatgtgtgggagaatgcccccgcatcttggtctgtgataccgcagaaacaactatctgtacctttgagggtctctaacaacaaagtaacattctgactgtctagggagcaggtgcagttttctagcccttcgtgtctacctccttgcccacccagtttcagatgggcatagtgtgatagcaacttagggcaggagaagggaagagagctggactttagtgctttgtagcataagaacctattagggagataggtgtgagatctgtctgtggagtgaggcttaatcaggatgtaggtgcgcttactcatttccaaagatgtcacgcccactacctcctgcagaataagcttcatccattatgtgaagcccctaggaccaagtgataactctcgttgcttaactactgccccatccttgtagcaccaaagacaccctggtcttttcactaggctgaccctggtaggccacagggaaaagtgctctagcaacaccattcccgtgtccatttatggctgtaacttttgcctttggtggagctaggcctggagacagaaatgaataatacataaccactgccttcaaggagctcaaagtctggtgggagagacagaaaacaaacaggctgttggcacacagtggtaactgctgggcgggaggtgtgcccagaaggtggtggcagctataactggtactaggacagggctggcattccagggaagagaagtcttgaagggctcgaaggtattagttagccaagcagcagccagggaaggacacataagcttccactgccacaaaagcaagtgcttggggctgcaggtgggtgttgcaggcaagtgttgcagcaggtgggaatgggttgcgtcagcttgacacaaactagagtccctagaaaaagggaacttcaattgaagagttgcttccatcacacagggacatgaggcattttcttgattgctggttgatgagtgagggcccagcccatgatgggtagtgccacccctgggcatgtggtcctgggttctacaagaaaggaggcagagcaaggcgtggagagtaagccactaagcagcactcttccatggcctccacatcagttcctgcctccaagatccagtcctgagtgtctatcttgttgtccctcaacgataggctgtaacctataagccaaatagaccatttcctccccgaagttgcattcggccagagtttgatcacagcaaaagagaagcagagtctgacacgtgttagaccagaaactgagcgtcagaacacagagaggcaaggctggttatgccaaggagtcaggctctctccactgaaggactggggcgttgagagatcccctcatgctgagagagatacacacagtaggatatggatggcatggtgacttcatcagggaggagaggagttgggagttggcagctctgctagagggtcattgccagcaggaagtgatgtgaatctgataagggctgggaaggtggcttgtgaggtaaactacttgcttcccaagcatgccttctgatctccaggatttacaaaaaacactcagggggtggggggtggggtggcatgcgtttgtaatcccactgttggggaggcagagatgggaggataccttggaccatctggttcagtgcctcaaacaatatggtgggaagtgagcttggagctcctggtcacagaggaaggagtccacgcacgtctcagggatggaaagggctttccaacactcctcatcttgtctttctagggaggcaagtaggcaggatggtatcctgttggctatggttggagagctcacacgtgcatgcatgtgtgcttgtgtgtgtgtgtgtgtgtttgtgtgtgtacaagtgtatgtctgtgtatgggatgtaggagaggagcagagggcccaggaagcctaagctagcgactataatccagttagtgaaagggtgggaaagccaaagaagtttggggtagagaagtcattccaggctggttaatgattcagtctggtaagggcctagtctgaagcacagagtgagaagggtagcctgggctacccaacaagaatctgtacgtattactttcctgttatctatcggcacagagtttttctgtgtagttcaggctgtcccgtaactcatgatctcttcctgcctgtgccaagtttgtgccaagtgtcactgtgccaaccaagcttgtactcgctgtaagagcaaacctcagaactctcctgcagactggcaaggcagtctagacggataggtagacagcctgggatggaggacggaccttcttcccttcctggctcttttaccactaaggtgggtgaccttgggagggggacttgacctttctagatttttcttttgtgaaatgacagtgggccccatgtatggtagcaagctcaacatgagaatcttctttaagcgtgtataccccagtaccagtcaggccagagagggcgagtcactgaggtaacaggggaaggcttgcagcatatgctcaggcaaatgctaactccctctctcgcagctcagatttcaaacagggtttagtcccagtcccctccacttttctccatgtgccctcatgggacatcaagattgttgcttcttctggcatcggtcatcagcaaatggtgcccggtggctcccagcctagacactgaactcattccccaccctcctctgagctttggaaatgctgtcctcatgctcgtggggtgggggcggggcttgtttttgttttttttttttttttcctctaggagatttttaccttgttggttaacagttctcttacttgggtccttgaatatatgctatcattcatttcacaaatgttctgcttagatgacagagagatctacttggactgaaacacacacacacaaacaaaccaactcatggcactatctatagtccttcaaggaaatgatcaagatttcactgtaagtcaggtaacttcactgacttgataacctagatttgaaaccccccccccccggccaggaacatctcaaaggggttaggagcccttatttgtctagttgtggggccactggctctgcctcctaagagctgggcatgtgtcaccatgccatcagctgtaattgaacacttcccatgcgacatgtcttgaatataaaagtagtgtcttgatccaagtctctctctctctctctctcttccagtgacagataagtacagaggtgagattcatgcattgtccgctcagtgattgaaatcggtgcctcacactgatgtcactggacctgaagtggtgacttccatgttccttccaatgtcagagccctcccccaccctcccatcccccaccccccccacctcgctgatgcacctggcagacacttcttgtcctcagttccctatcagtcttgatcctcaaggcctcagtatttcctatccagttcccagggccgcagagggtgcgtgacttcccatgagaagggaaaattacactgtgtgaactaaatggctcccaggtctaggcctacgtggaaatccctcctgttgaatgctctgagcagaagtttaaccctcctccagccctgccggagagaactccatcttgactgtggatttttattctagtctctcctcccaataatcacatatcctcattttatcttcgatcaatcgatttttttctaagttcataattagttaaaaacttattggcaaagacccagtctccagacgagaacccatccttgtagcataaactttgtaagatgctgttcagcctgggacactctcctaatgcattacatgtatctcctacatatttgatctcaggctgagtcgatggtcccttaaatattttatgtagataaatggctgacataaatatttttggaaaactaagcattgagattgatagattttatcaaattttatctcctgttaaaattcatgggccatgaatctggccaaatgtcaacccatttgattgaatactactgagcagatacacatgatataaatccaggaaatgcatggtgtaaatccagagcaggcgtcacccacattttggacctaaggatcgatcgtccattagttggcagttgcttatttcgtctttgtctcttggcctctttgaagtatatgcttcagaccttaattatagctgtttacaaacctgttttttgttttttttctaagtctatcagcgaggactgggaggtgaaagaagcgtagggatttgcatgtaaatagtaaaaaaaaattattttgtaacaaaaagaatggttttgtttgttgttctcacatcttattgcttaaaaaaaccacattttttcataaaattaataataacttatttcagaagacttggaagaagcatataggcacaaaagtgaaaagaaaatgccattgtaatcccaacaaccagaatagttgatgttagtacggtggaggaggcttttccagtctttttcttttttcaccatatatatgtggaaatatggggtgcaaagaaaaagacctacatttacacacgtgtgctgtgagcactgaaggtccttctgccttttaaggatacgatcatctcaaggaagactttttttttttctgagacattcctaacaggctcatgaagttgaataatgatcactaatcacccctataccaggacatgctaggaagaagagagcctcaaaatatcctaattcatcttcacagagcaagtcggatattgagaatttgctggctgctcaagggattgtgtgtggggctcggaagatggctcagtggctaagagcacagactgctctccctgaggatctcaattcccagcacctacaccagacagctgataatggccagtaaccccggctccaaaaggatcctctgtgggcacttgaatttatgtatacataacgcccccccccacacacacactcacacactctccacaacaaatacataattaaaataatagaaatattttttaaaagagagattgtgtatactagtttcttctgcttcatagtaaccaaaatgcttgacagaaacagctcagtgaaaatatggattttttttaggggggagggggctcattgtttccgttcaaaagcccacttcaagcccacctccttaccccgcgcccccctcgccctcctccacccccactcccacagtgaccctctaggccccatatcctgactcagtgccactagccagggaaaccatactcaaagcatgggtttgggggaaacatttcagattcaaaccttaaccctggggaaggtgagggcgaacagggcggagcctctggagaagcctgacccgtggggagcttcctgtggctggactgtcagctgtgtaatgcaaagtggtttcctgctgtgtgcggtacttactctcacctctcagcccttcaggaggcgtttgctgtaattacacccttgggtccagcgttgctcagcttaaaggaggcatggggtgaagtgcagtggagacagaagaactgagcagacattagggaagatctagaatgttctgtgaacacagagttttgtggtaaactttttccatttaggtaaataaacaaataaccaatcaacagcatatcttcatatcacattacaaccttgcacaccaccatgatatccagtcttacctttccagcactcttgcttggatagtggagctgttagaaacactcaaggcaggatggagagacagctcagtgggtgggtgaggacgagagttcaatcccctccccatttttatttattagttatgattattatctctgtgtatgtgtgagtgcaggcccgtgtatgtcaaggcaagcgtgtggaggtctgaggacatctttgtggagttggttctctctgtctatctgtgtgtgggctctgggaccaaattcagacctcaagcttggctggcaacactggagccatcttattggccccttaattactttttatttttgagatatactctggagatttatttttccctcttttaatgaaagagagttttttctcccataatttatactgattatggctcccctccctctgctcctcccagttcctccccacttcacttcacatctgtttgttgttgctgctgctgctgttattgttttttcctcttattgaaaacagattttgccccttatgtaatatatactgattatggtttcccctcccagttccttcctgcttcccttcccaaccatttccaccctttttctgtttcttattaggaaagaaaaaggctgagagcaggagagatggctaagcggtcaaggatggttaagacccgctaccagaggatctgattcccagccaaccacaggatggttcacaaccatctataatggggtctgatgacctcttctgtcattcaggcatgcatgcaaatagagcactaatatacacataagtaaaccttttttaaaagaaagaaagaaagaaagaaagaaagaaaggaaggaaggaaggaaggaaggaaggaaggaaggaaggaaggaaggaagggaggcaggcaggcagaaaaaaagaaaacaggccatggtagcataaacctttagattcattccagcactcaggagacagagacatgtggatctgtgagttcaaggccagcctggtctacagagtgagttccaggacaaccagagatacacagagaaactgtgtcttgaaaaacaaacaaacaaacaaacaaaaaaccaaacaataaataaacttttaagggatgataataaaataaaatataataaggttaaaaaaaaaaccaaacacttcagaataggacaaagtaaacaagggaaagaacctaagaaaatgtaaaaggaacagagagagacagagacccaactttttaataaatgcaggcatctcataaaagtactaaagtagaagccatgatatatacccaaggacatatagaataaacagagagaaaaaataagtaagtaaaataaaataaaaataaatatgaaaaaatacgataaaagaagaagccctgacatgacagtctgaggaaaggcgcctctgacggatgctgtcaagttcaccttctcttggcatctcctgctgggcacgcagcctgcccttaagagtgctttccttccccagtgagactcccttggagaaaattaaattttcctttgccagtggttctcaactgcagatattctgtgttgggggttgggtgtgtccacggctcctctcagctctaggaccccatctggtgcgaacctgtgaacgccttgtggtgctgcctcagtctgtgttcctgtgtgtatcgatcacatttagaggatcttgttgtcttggtgtcctccatcccctctggctcttaaactctttctgtctcctcttccgaagggttccctgagccctaaggggagggatttgatggagacaaccattttagggctgagtgttttaaggtctctcactctctgtatattatctgactgtggagtctctgtatttgcttctctgatgatgtctgagcaataggcattggtctatgagtatagcagaatatcattttattgctatgttcttttaatagaatgatagtatttggttttaacctaggttcccaggctgtctagtctcaggttcttggacacccaagcagtgctggatatggattctatcttgaggagtggagtttaagtcaaatcagttattggttggttacttccgtaagctttgtgccactattgccctagcttaagctgtaagcagaacaccattgtaggtcaaagggtttgggactgaccgtgttggtgtttgtttctcttgtgagagcttgaagagtactgtattctactgaagacactaaaacataggtggctctttgtaggcaacagctcagcttctttgtgttcagtgagctgtgtagttgttgctttcagcaatagagctgtcaacttatggagagcaatctatcgtctcggtaacatcctgggttgtgtggggatgcccatgggacccctttgtctaacaactccttagatgtaacccattcccagtactgcaagcttcattttgttgggactctgtctctccattatttggaaatttcatttagattgccttcatatatgtctgggtcatcaattgattccattgatcagtgtgtctgtctttgtaccaatactatgctgtttgtattgctataactctatagtacaacttgagcctgggaatgatgatacctccaatagttcttttattatttaagattgttttagctatgctgaattttttgtacttccatatgaagctgaaaattgccctttcaagatctgtaaagaattgtgttggattttggtggggattgcattgaatctgtagattgcttttggtagaacggcaatttctactacgctaatcctactgatccatgagcatgggagagcttttcgtcttctgacatcttcctcaatttctttcttcaatgtcttaaagtctttatcatacaagtctttcacttgcttggttagagttactctaagacattttgtattacttgaggcagttgtgaaaggtgttgtttccctgacttctttctctgtttatcagttaatattataaccagctacttgttttggaaagtgtttatcagctgtagaagtttcttggtagaaattttagggtcacttatgtatactatcatatcatttgcaaaataaaactactttaacttcttttttttttccaatttgtatcccctcaattttcttcagttgtcttattgcttcaactaagacttcaaggactatattgaataggtgtggagaaaatagatagccttgtcttgctcctgactttaatagaattgttttgagtttctctccatctaaattgatgttggctgtgggctttttgtaaactgcctttattatgtagaggaatgtcccttttgtctctaatctcaccaagaaatttattatgcaagggtgttggagcttgtcaaatgccttttctgcatccaaggagataatcacatggtttttgtctttcattttgttatatggtagattgcgtttatcgatttatatatgtcaaaccatccttgtatctctggaatgaagcctgctagatcacggtagatcatatttttgatcgctctgttcttggatttcctttgcaagtatcttacttagaaattttacatcattgtttataaggaaaatgggtctttacttctctttccttgttgggtcattatgtggttttatcggggtaaccgtggcctcataaaacaaaattgcacagtatttcttctgcttctattttgtgggatattttgagaactattggcattaactcttctttgaaagtctggtagaattctgtgctaaaaccatctagccctgcttggtttttttttttgttttgttttgtttttttgtttttttttggttttttttttttttctgtttaggagactttcaatggttttacttcactaagggttataggtctatttaggttgttttttctgatcatgatttaactttggccagtggtatttattgaggaaattgtctatttcttttagattttctggtttggtggagtacaggttttttaaatgtgtccttatgattctctggatttcctcctgttgttatgtttccctttcatttctaattttgttaatatgaatataggtttgtgactcttactgatttttgaaatctttgtttcattgattctttgtatttttgttgttgtttgcttatttctattttattgatgtcagcctcaagtttgattatttcttgccactcactcctttggtatataacttttttctttctctctttctttccttcctcccttcctctttcttcctcccttccccttccttccttccttccttccttccttccttccttccttcctttctttctttctttctttctttctttctttctttctttctttcattctttctttcttgtctgtctgtctgtctgtctttctttctttcctcctctctctctctctccccccnnnnnnnnnnnnnnnnnnnnnnnnnnnnnnnnnnnnnnnnnnnnnnnnnnnnnnnnnnnnnnnnnnnnnnnnnnnnnnnnnnnnnnnnnnnnnnnnnnnnnnnnnnnnnnnnnnnnnnnnnnnnnnnntccctccctcctctctttcttttttcctttagggttttcaggtgtgctgtaaagttactagtatgagatccctccaggtttttttgtttttgtttgtagacagtgctatgaatttgcctcttagaattaccttcattgtatcccataagtttgggtatgctgtatattcatttttgaagggacccacacaccatggggtgttccctctagaccctggattaggcacagatcatatccaaacaccaagaaactgtttactaagcaaggcaaagagacaaggtggctgagtctgaatcaggcagacatagcagcaaatagctttgcaggagtgattttaaaggaaaaaggggaagtctgtgttagagtgagccagggtgagttggtaagtcctgattgggcatgctagtcagggtagccaagtagggatctgtgactgcaaaaccttcatattttgacagttgggtcttggtgatcagctttaagaatgagtcaggctttaggaagtggccaaataagggaacagaactgggtggctagctttaggaatgtggaaatgcctaaataagggaatctaaagattcagcaagggagagggaagaggggagggcaagagctgctggtgtcatgttggccttgcttgggccgattagagccctccaattttcactcaattctagaaagtctttcttcttcctttctgtcttgaccccctgttcagtcaatagtgagctgttaggtttctatgtgtttgtaagctttctgttgtttctgctgctgttgctatccagcttcagtcagacaggatgctgtagcataaggtttttactactccactttatgctcctggtggatcgagcttcctgccactcgccccaccagggaaacacacacacacacacacacacacacacacacacacacacacacacacagagagaagcttatttttaatgtactgtttagctcaatggctgggcacgtctaatcgtctgcctgctaccctgggcccaaacggggaagtgaccagtggccacttacctgaaatctcacatggctggttggctttatttcttggtgagtggcgggtactgaagtttcccactatcagtgtgtgaggctcagtgtatgatttaacctgtagtaatatttcttttacaaattggctgcccttgtgtttggtgcctagatgttcagaattaaaatgtcctcttggtgaattttcctttgacgagcatgtagtgtcctcccctatcccatatgattagttttagtttgaaatcaaatttgtcagatattaaaatggctaccccagcttgtttcttaggtccatttgcttggaacatctctttccattctttttcccagaggtgatgtctatcctggtgttaaagtgtgttcctggatgcagtagaaggatggattctggttttttacatccattctcttggtctgtcttattattggggacttgaggccattggtgttgggggagtggcgggtccacaggtgggaggaaagcaggtttccatcaggatttgctcggtcctctgtggattggggtagagagtgaggagaggccgtaacaggtggtccgttacagagctgaggacgagacttgggggttggatatggagaggagtgcagagctggcactcaccaacctgattagttactgatggcctacttgtttctctcaaggtgtggttgctggtactagggtgtctgctggagttcgggactgggaaaacaggatgagtagggaggaaggttggaggagaaggtctctgtgatggatggagatgggaacagagggggtgtatagcaggtggccacagagctgagggtgagacagggagactggatctggaggaaaaggtgaagatctatagttaacctacttggccagtgagcgatttaatattttttttccctgaggttttgcttatgtctatatggggcatacatattaataagcttatatttgtctcttgtttttcttatttaaatcactgttacattatattttttttattggttatcagaagtgaacttaatcttaagctggactttctataacaagaccgtgtaatttgattttaacatggagggataatttaatatgtagcaatgtaacaacacagttctctgtgttagtctcttctctcacttctgtaacaaaatgcctgcagaagcgacctgaccttcggaggggaggggttatcttggcttactgtataaagggacacagtaaagggaaggtgtggtggcaggtgtctctgtggtgacaggagagtacatcaaagccctcccacaaatcctggaaaaggaagcagagaaaaatactggaagagaggccatgctttaaaacctcaaggtccagcccagtaacccatggtcaccataaggttctacctcccacagcttccctaaacactaagctgggaaccaagtgttcaaatacctgagtcagtgggggacatgccatatttaaacacaacaatattgctctttcttctcctccttttcctcttcctcctcttcctcctcttccttcttctttcttaaagatttatttattgtatgtaattacactgtagctgtcttaagacaatccagaaaagggcatcagatcttgttatggatggttgtgagccaccatgtggtttctgggacttgaactcaggatctctagaagagcagacagtgctctcaacctctgagccatctctccagccccaatattgctcttctttatcaattttttttgttcttatctgttgtttttggtagacttcatattaattatgctaacttgcaaaagggaccctttgagatttgcattaaggtcacattaattttatgggacaatataaaaacactgatgttgggctggagagatggctcagtggttaagataactgactgctcgtccagagnnnnnnnnnnnnnnnnnnnnnnnnnnnnnnnnnnnnnnnnnnnnnnnnnnnnnnnnnnnnnnnnnnnnnnnnnnnnnnnnnnnnnnnnnnnnnnnnnnnncagtgtactcacataaataaaataaataaatcttaagaaaaaattggtgtcctccttcccttcttcctcttctcactctttacaagttgagttttgccatctacaaatatagtatgtcgctcaaggttttttgcactccctaaacaggttcgcaatttttctttgtatcaattttatcacgttttaatgttcactttcagatatcttttgtttgttgcattatttatgttacaagtggaatttattctgcaaattatagctactaagagacagtcaacttttttttttttttgacaacttcgtgttgtgtagaaagcatctaaaacaaacaaaagaacaaaaaaacaaaaaccaaaattaagcaactgcagcttcctggggaatgtccaaagtctagatctcagatcctgtcttaagtggtaagtctcaaagccaggacaaacagcggagatatcattaacatatcaaagcagacctggctgccaggttctcccagcatcccttagtccctacctgttacagcatgtggctggcacatcacacccctatcctaaacttccccagcctaggggctgggctgcccttctcctagctgcccttccctatataatccagccattttgctatgctgggccttttttggcctccaggccctctctgttttctggctctcccctctcctaagccccttctcctcacaccgcccagctcaaggtcatgttcactttagactctccccagatgtccctgcctcaagctatgttcttcctcttaactataataaacctccttcaccaaaccttggagcagtcatgtcctttaaccttttttttcttcctctttttttttttttattcttctagtgctgaaacacacaaacccagccagtactgtgtagaaggctgtgagagatacttatgcatagacaagaagagagacaacctgtcctgacttcctccagtgatggactatgacgtgttctgctgaataaccctttttgcttttcggtcacggtatttcatctcagcaatagaaatcctgactaaggccagttggtgccagcagagtgggttattgctgtgacagacctgacatgctttggggaagattgtggaagttctctggaagtttgggcaagaaaagccattttgggctgacgtgctcttctggtgtgtctgaagacagctacagtgtacttaatcataataataactaaatcttaaaaaacaaaagaagaaaagaaaagaaaagccattgggtgttaagagctgtgaggaatggtctgtaggagcctggaagataagaacgttgagagcagcgcagaagagggagtgaaatttcggagggaagattaaaaactctatgggggtttgggctggagagatggctcagcggttaagagaactgactgttcttccagaggtcctgagttcaattcccagcaaccacatggtggctcacaaccatctgtaatgggatctgatgctctcttctggtgtgtgtctgaagacagctacagtgtactcatataaataaaataaataaatattaaaaaataaataaaactctaccagggccatttgctgttttgatttaagattctgtggttctgatcagctgggattgaagaatcagttatggttaacaacaaaccagagacactgaagggaaacttttaagttactggaacaactgatgctggttagcttgaggtaagaaattagtggtggttaagaagagaccagcatcactgaggtgaaatctgggaagtgttttctgggggtacaaagaagcaaaggttgtacctcatgctgcagctggacttggtactgtgtaagatgcatccaagtggtactgggtttgaaagcttggagggctcatggagaacggcagctgagacttggctctgtgagaggccaggagaggccactggtgaaggtgcagcctcagtgacagttgaagggccaggactgaaggggtcatgcagtgaagttaaggcttggcaccatgaaaagagcctaggagaggctactggtgaaagtaccacctagttgcagcagaagaccccagtgttttggagatgagaaaatgtgagatgactaccaagaacagcagcagaggtggagtggagtcagcttttgcctagaagacaagctgtgcgctacagagtacagagcaggagagataatccaagcccattggagcacgccagaagatcttgagtggatcccagacactggacaattggagtttgattttgatttgatttgattgtgactataccctggtttttcccttttgaaataataataataaaaaagattcagtttattttttattttactacagcccacacttgagagactttaagtttttaaaagatgccaaattttaaaagagattggctatcttggagtgattgaaattttaatgtatttgagttcgtaaagactgtaggatttccaacgttatttatgttcttaatgtgagatcttggagatgagtaagaaaggaatgggttgtggcttaatagtgatgtgtttgtgtgtcaagttgacaaggggtcagttgttctggctggttttgtgcgccaatttgacataagctagagtcatcacagaggaaggagcttcagttgaggaagtgcctccatgagatccagctgtaaggaattctctcagttaatgattgatgggggagggcccattgtgagtggtgccatctctgggctggtagtcctgggctctataagaaaacaggctgagcaaacctggggaagcaagccagtaagtggtacacctccatggcctgtgcatcagctcctgcttctaggttctagtcctgcctgaactcctgtcctgtcttcctccaatgatggactatgaggtgtaagctgaataaacctctccccaacgtgctttttggtcatggtatttgtcacagcaatagaagccctgactaagacatgcaccctcccaaggcggcacttgtctagaatctctcagttctgcccgactagtctgggtctctctgctaaagacacttactgtctctggtgcccttgctctcttgtctgctctgtctttttcttaagctctcctaggcctctctactccctcagggttcctcccacagcatccctaaactggagcccactaggccactaatctctctctcagctccccctgggagcttatggaaattccttcccacagggttccattttttcacactctctctctccatcttagactacaaagcacttggcctcagtacagatcaacggccaaagactggcacagttggtttttcaaattctctcatacggtgacaacctgtgccactgcacaaacagatgatccccaaatctcttctatctagacttgctccactctacactttcaaaggtctcttatctctgagggttttctgcttcccactcttagaaatcttttatctccgagatttctctgcgctctgctctcaaaagaatcttttgagtctatgctctcaactctgcctcaagatttgtaggttcattgggtatagttaaaagtctgtaaaatctgtaacagaaaaattggctagaaatttataacaaaaggcttataattaaaaaatctatacgtgggaaatcttaatttgctataacttactatatatgtgattcaagtcttgatgagaatatactgtatatgtaacttagattcagctcttgtttagaaatagattatttaaacatagatttaccaaaaaatagatgttttaaaataacagtcatgtggctggcagtcatctttactaaggtaaaagagggtacataccatatgacttcactcccatctgaagatggccacatgttagaaagcagctgaggtggcaccttgaagagaacactttctgagagctgcttagtcctactcagcccttggtttatcactgtgtcccctttcggattagggtttttatatgatgataaattcctaaggttttaaaggcacacgcaggtcaccgaaagctaacttaaaactatatggctaactatttacgtctttgttaactctgttcaacctcaggcttctagaaattttaaaataaaaaacaactatatatatgtgtgtatgtgtgtgtataatcaaataataagttatatttgctaagtaaggtttataagctcctaagatctactcaggttcacagtaattatttgtctagcctctttatctttgcttgctttgttgatctttagctatctggataaactgagtcatatgaaaaaaaagcctgatattccgtaatgatcctataaaaggaacaagttcccagtctctctatttttttctggtttaaggttttatgttgatgctaatgaatcttcaattaaatcttcaactaaaacctttaagtctcaaacttaacccaggtacagctgtaaaatcctaatcttataaaaggcactaacttgtaaatcgttatgtaatttacttactgacaagctttgtttagccccgtgtatgtgttttcaaggtcaagcctaaagcaagtaactgccaactcaggtatatttaatagatggtactcaaagtcttaagacatctgctggttatgacattttttgagtttagtaaaaaaagtttccatgataggcacagcagattctggaaggaaccctaaggtctccatagaagacagatggggcaggatgcctgaatgatggtaacactaaccactggggaaaaccactgctccacccctcacctgcctccagggctctgcacaaactatgagcacttttgggtttattgtcctactctgcctggtcaaagccagtcacccaagttcctcattcacggggaaatctctcagacctgggtctggcagccaacggcggctgctgccccatgtggtggctggagactgaccactgtccctaatgaagccatggagaccacaggagcctaggacaaccggctaggtagtgggtaagtctctgttattttgattgatagatatgccatgatacacatgatatctccggctatgatgtatccttctaggctctctgatgatattggctgactaactgtcgctttaacagcagcaagctcctccctaaaggcgacagctgccttctcttcctaggtaaaaatcaggcctcaggctttgctttcctagagctacttactgagaaagacagcttaccttgcccagacttggaaaggagatcaactcctagaggcttttaaccctgaatcattttgggttcccaaacttttactatgactcaaaggcataataagtcaactgctctttctacaatgtggatttcagtacggattacaaacagtggtaatgctaacatatctaaaactttttaatctccgtaaagttaaaaaaattttttttcatgtaaacatcagggagttaactcgcatctgcttctctaagaggtccaagggactccagataagcactcacaagtatcccaccttcctcttcctgagggtggggatgagatctctctcctggtcttggggctccccttccccagatatcaggactgtttatctactgtacatctacctggaagtttcaaatgtacacccaagataaaaaatttttcctttaaccccttaactttacactctgtccctagtctctgtcccagcagatttcaaatcaactgtactcttcagcagttccccagccccaggtatttaatttcctcagaatctgcaacccacacagctccagagtggctagcttcaggcagtccagcctcagcttcaacttggcctgcacttccctagcttccgatgatcccacacagcctggtcagcaggccaaacagcttgcattctccaacccccagacatccccaccccctccctgcaccttggctagaagtccagccttcttggctcctcaacaacagccagcaggccccagcagacagcaggaagttgtcggagaaaagattgttaccctttgtcatttcttatcaacaaaaagactgggatgttaggtctcaaacctgggacaaactgccagctgatatgtctatttaatatatcaaagtgtctctagctgccaggttctcccagaatccctcagtccctacctattataggttatggctggtgtaacccaccctaccctaaacttctccagcctaggggctaggctgccattccctatgtaatccagccactttggctttgtgggttctttgtgtgccctcctggccttttggtctcctagtctcctagctccacccccttatcctcacatagcccagccagagtcatgtttattctggactctcccagatgtttctgactctgcctattctctcactcttatgcacaataaactttctcctacttcatcgtacctaggagcagtcatgtccttccttctgtccttctttccttccttccttcctttctctctttctattccaattcattaatcaaatgtatggatggagctttttgttcaagaatggtgtagccttgtatggtctgacaggacctgatgagggctggatgactgttgtattttaagtgtttgcaagtggagtgagggatagagaacgggcatgtgggaggaatgggaagaggccagtgagagggatcagggggtaagcacatttgtggccaagcctgaggagccgaacttgattttcaggacctacatggtaggaggagagaaccctatgaattgtcttctagcttccacatgtgtgctgtggtgtgtgcatccaaataaacagataaataaataaatgcagtgcaactttgtttaaagagaggagtgtcaagcgtaggtatagaaggacaaagggagaggctgccatgcatggtgcgctgacatttaagaagagctgtggggagcgagaaagtccctgtgctgagaaatggaagctacatttatgaccgggggcttccgactgggtattgctgcctacgtctgagataagtgtatttctttattttcccagtcgttctggggactagtctagtctgctctgtacagcaggcctcccttatcagtggttccccctctcgccacccccacccccgtgatgatttaagttatctaaggtcaaatgtccaatggaaaattccgttgaaataaatagctctcaggctttgaattgcatgctgctttgggaatcgtgatgaaatctcatgccgccttgcttcatccttcccaggtagacttccctcgttgtccggggtatccatgcagtatgcactaccttcccatcggccacttagccatcttgtttataaggtcaactgaaggtctcacagtgcttgtgtttaacttcgtcttactgagcagtggtcccgaagcacatgagcagtgatgctggcaattcggacaccacaaagtgcagcatcacagggcatcctttatgagagagggtgaggatacaacgaggtattttcgaggggccacattcacagaatctatgtgataatatattaatcgttatatttcattattaactgctaacctcttactgggcctaatttagaaattaaatgtaatcacaggtatgtacagtatgatctctggcctcggacttctatctcctgggggcgggggcagttttagaacacagcccatgggtagaagagcaaagccctctgggaaattgctgctttggtgagtgaagttacaggtccagcatcccctcacctcagagaaagaataaaattgttatgagaagccattgaagcataaaggctgagaattcagcgacagaagtcatagctaaaaataagcagaggaaatataaaagtccccagagaaaaagactcagtgaggaggaccctgagtgtgctactccggttggggtggggattgggtaggcgttctgagttatagagaacaataatcaaagaaggatgactgacagagctaggcattgaagatagtggggggtgggagtggagcttgggggtgtgtggagggggggtgccataccctcgcagtcaggaggctgaggcaggacagttgggagttcaaagctagcctgagctatatagtgacatcctgtcgcaaaaaagctaagaaaacaaacaaccccttcccaacctaaaaacaacaacaaaaaataataaaaacaaccaagaaaacaaaccagaaggctgagtagctcaaaggcgaaattctaggttgtaactgtatgctttattttctggttgttgttaaggaacagggtataaaaacaggccgtggctggttcatatatggccacagatagtcgacctacagcctttgcagcaagcaacggaagagtcaaaccagctttgctgcattaatgggcacaagaaagccaggactcagctaaaaatagcatttctccaaggtttggcctcggtttctaagacaggaccgaccagggaaagtgaaatatggtcctggagacagtcccctaggtacttccggttagcccgcctccagcttcccagaccagcaattttatcagtcttagttcttgttgctctgaccaagggctgctctatgtgatttatacgtgatatccatttatttctcaacgttccatagaggggaagcctgggggccgagtgtggcaccgctgtgttccaatgaggacagtggaagagtcccccacccccaacggccctctcccctgcaaccccccagcttctaagaaaggtactagctccatttatgatggctctatcaccagggtctgattgcttcctataggctcaactttcaaacactgtaagattaaggttttaacatacaaagttgaggacagctgggttgggggagatggacaaacatttagtccctgacagagagcgcagaaacactcccacaaactatgaagcttccctagtctcttcctgccgcagaatcttccaaatgcaattgatgactcctctccctgctagtagcaagcccagagtagatggtcatgtggtttgaataggaatggccctcatagattcctgggtatgaatgtgtgatccatagagaggggcagtattaggaggtgtggccttgtaggggtgggtgtggctttgctggagaaaatgtgtcaccatggggggcggggggaggcttgaggtctcatatatcctcctgctgctggctgcagatcaagaactctaggctgctccagcaccatatctgcctgcgggtcactttgcttgcaccacgatgataaggaccgaacttttgaaactgtaagccagccccaattaaatcttttcctttataagagttggcttggtcatggtgtctcatcacagcaatagaaaccctaagacagatggtttctggttatctgggtaatctttgtttatttttacagtatctttggcttttaaggcagacaggtatgttaactatagttaaggcattctttcagaaagctgtgcatttattgtgtttctgacatgatgactgtacatctatatttttggtagcagcacatatcaaatgaccacaaccatacgatatgcagatggcaatagcaaccattttgatcttactagtaactttactgggaaattctctaaaactacctcccttgaaatgcaatgtcacctattggtttgaagtagatattcctctcctattaaataagtgtattttcatctccagattattttttttccttttttatttgcaaaaaaataagttttaagtgtctattgagttaatctttttattcgtatgggtaatatcatattaatagaaattctaatttgggtccttacttgtattcttataaaaataaacctccttgatcatggtacattattctttttatcacactgctgcatttaattggctaatattttattcaggatttttgcatctatattcataagtcaggttggtctgtaattttctctctctggtgctattttagttccatttatgactgggaaatctattctgtctgctattaatattataggctctccttttcgctagttttaacaactggctgtgtgtttgaagtgcacacacacacttcagtcacgttaggagctctaccctgaccatcatcccccgaggatccagctgtctggcaatgttgttccggtctgtctgtccaaagccaattagtttttcaaagcctttgcattcttctaacccaattttgattacttatattcttccatacctctgtcattttatcaagattttcaagtacactgacataaaaatttacatggaaatattaaaaaagattaacccgtctacccttgtgtgcttatgagccgtggttccaatctgtggccaagtagtggtccttgctagcttggtttgtccctgttttcatctctccctttctataggtgtaggtttctcacattatttatcctgtgtttgtgagcatgggtgcacacacttgtgtggaggtcagaggacactttgagggagtcagatttctatttctatcatgtgggtcctgaggtgagagctcaggtcataagactgggcagcagatagctttactttcataggtatcttgcagacttggtatacggactttaaaaaattcaatgtgcagcttggattttcctatgagataagaatttgattttggtagtgtatttggtttgggcagaaggatactggaggggagcagggaggtgctatggaggtgggaaggcagctaataccatgggctctaggatcctgggagtatctgaggcatggatgcatgccttagtcgggggagtctcccacaggggatgacagtgaagttatttatacacactccctagggtcattggttgagcgtaactgagtggaaggcggagtgggtggcatgtgagggagttaattcctgtcttaggtggaggcagaagggcctcccacagcctcgggaaagctgttgtctaaggaatgcggctcctgacactagaattcttctgcaaggcaaactagtgatgctctgtgcacatgggaggggcgggacacctgtcgttacatcatctggggctcaggtgtcattttttttttatagctttcaactagttttgtcttgctaatataatcttctgtttaagattcatttaattaagctgggggtggtggcacatgcctttcatcccagtactcaggaggcagaagcagacagagatctttgtgagttcgagggtaacctggtctacaaagtgagttccaagagtatacacagaaaccttgtctcaaaaaatttcatttaattaattaatttatttttgtgatactaaggattgaacccaagtaggctgagtaaatgctttaccgttaagctgtacctacagcccttgtctttgtctttttattttgagatgggatctcatcaagttgcccaggctggccttgaagttacagtccttctgccctaacttccccagtatctgggatcacgggcctggattatcaggtcttgcaggaaagggcttgtttgtcttacatgtcaggatcacagtccatccttgagaaaaccaaggggaaacccaagcaggtcaagatcctgggggcaggaaactaaactagaggacatggaaaagagctatgtatggcttgctccccatgggttactcaacctcccacccctaccccnnnnnnnnnnnnnnnnnnnncatagactcaaaagattcttttgagagcagagcgcagagaaatctcggagataaaagatttctaagagtgggaagcagaaaaccctcagagataagagacctttgaaagtgtagagtggagcaagtctagatagaagagatttggggatcatctgtttgtgcagtggcacaggttgtccacccctcccctcccccagtcttgcccttcccccttctttctccccttcccttctctctttccccctaatttcttgtccctcctccttgaaccctaccctcttctttcttctaatccccccttccttccttgttttttctgctctattccaggggggccttgatctcagtgtttctgcttcaacctcttatgtgctagaattataagtgtgcactgcaatgtctcaggttaatacagttaaaattttaaaagtgctgtcatatgtaaaattagtatgatgtgtgtatgttcaaatacgcgcaagtgtgtatgtgtcagtgcaattggaggctagagatcagctttggtattttcctttagaaactactttttttaacctgctttcttaatagcacccagaacacctgcccaggggtggcaccacccactgtgggctgggtccacccacatcaatcatttatcaaggcaatccccccacatacttgcctataggccatgtgatagtcattttcccaattgaggttccctttcccaaattgtatcaagctaacaaaagaactagcatctatctctatctatctatctatctatctatctatctatccatccatccatccatccatctatctatctatctatctatctatctatcatctatctttgggtatatgtgtgatataagcatgcatgcaatgtgtgtgctcatttacccatgtgggtgtatgtggaggacataggttggcatccaatgtctgcctcaatcacttctctattgttttgagactgtctcttgctgaaccttaaccctctttcagctccagggatctgcctatctcagtgcccagtgctggggtttgcagaatagtgtatccacacctgacttccttacaaagtgctgggactccaaactcaggccctcatgcttgttcagcaagccatttactcactgagctgtctcccatgtcctccgttttgaggcagcatctctcactaagctgggcactcactagtttgtttagactggcaggtcagcaagtgctaggggtcttgctgtcttagtcttctttagcactggtattataggtgtaagctgtcgcacctggctttttcccatgggtgctgcgggtctgaactcagtcttcatgtttctacagcaagcatttactgactgagttatcttctcagaccctctttttaacttcttgagttgtattcatatcttttcagtctttctctttagttaatgcagtaaaaatggttcaggtggctgaggccaagttattgagatactagttatacaagtgcttaaagcacagtgtctgaaacaaagtgttcaataaatgctaatgatggttttgattaaacactttcttttctttcaaatatatatacatatatcatctatctatctatctatctatctatctatctatctatctatctatctttgagactggatttctctgtgtagccctggttgtcctggaacttactcagtagaccaggctggcctcaaactcacagagatctgcctgtgtctgcctcctgagtgctggcattaaagttgtttgccaccatcacccagtattgactgaacactttcaagttgctcacattatcagaagctaagtttaaatgcaataaactaattaatttgaaagaggatagctcaggatggtatagtactcaggatgtagcatggattagtgcagactgcttttagccaagtttatggtgaggatcaggaacaaaatacaaagcagaaggattggaaaagtgaagtagtctggcctgaaaaggagcaagctgaaaaccgtggacaagtaaggtatgtctgtgcaggagattagtgtcactaaagagaagtcctttcaaagggatgttagacatggcctgaagccattctaagtgatgagatgggctgagggtattgctactattgtgttactgacagaagtaacttgtggaaggaaggagggatgggtttattttacctagcagtctacactacagtccatcttggttggggagtcaaggcagcaggagcttgaagtattttgacatcacatctactagaataaggaagtgtaggaagttttgaatgttagtacctgcagctagctttcttaattttatacaatccatgatcttcacatagggagtggtcctgcccacagttaagatgggtcttcccaaacatattagctaaatctaggtacttgctcacagacattcttataggctcaccttagtgtagatctctccaaggtatgaccaaagtgccatctcttaggtgatttcagatcctgacaagatgcctgcccatgctggccatcacactagggacagaatgttgtcgtttgaaatggtgtgcttgggtgtcaggcaaaaggtaagcacacactaaaaagactgagcctcagattctggggaaggaatcggtgcattttctattgtatgttagatagttttatcatattaggtggaattatgaccttgttagtatgtttggagattaagcaggacataatgagatgtttttaggcatctgtttgacaaaggaatagaattatgatggctatggctggatgagaaatgtctaggatgtgcttcttggagggcatttatagagactgacatataggatagcaaatgttctggatagcttttacttgatacaacctagtcacctgggaagagggaaactcaactgaagaattgcctcaatcagattgatttatggccatgtctgtgaaagattgtcttgattaatgattgatgatggagggccctgcccactgtgggaggcaccacaccctaagcaggtgggtctgcattgtttaggaaagctagctgatcatgagccaatgagtgagtgagtgagtgagtacggatcattcctccatggcttctgcttgagttcttgccctgatttttctcagtagtgggctatggagacatgaaaatgcaaactgaaataaacccattcctccccaaagtgtttatcacgtcaacagacaacaaactagaatagcaactgagggggatccaccaagaatgtaagtgctaccaccctgcagactaagggcccagacggaatgacaggtgacaaaggagaaagcagaccagtgacaaaaagtggaccccttctctctgcttcttggacttttttttctctttgatgtaccatgcctataaatgggctaacacctctgagaccatgaacaaaatggttccttccatatttcggttgtctctgttagcatttacgcagcaatagaaagcagttaacacgtgcaccaaccgtgcaccagccccagctttctctttctttctcttttaatcgttgcctctgaacaatgtatagttggatcccatataagaattttagtcatttaacagagacatatatagctatttgtataatatacattgtcacagctatggactttctggtggaattatctggatctgttaatgagatgcagttttttttttaaaggtagttttttgcctcctgtccctaagtatatttcaattgtgtctatagtttttctaaggaggtgactctcagtagaggcccctggattgactcaggatgggcactagacatcagagaccaagccttgcaactttcagtcctacccccgtggctatggccattgattgcattaattaaacctgctgacaggtcggtctcttaaaagcccctaaacaatgggcgcaagagcttcttggatggcaagcacattcgtgtgcaggatggtggcatgtcccaattctatgggggacagaaaccactgtgctcaggaccctcctgaaccttccactatgaacccttcctgttagctgttcatttgagtccttcattatagattgggaactaggaacaaggtaacttcttcagtaccaggtgttgtactagcaaaccactgagtctaaatgtagacaatctggcaaaccaaattcctgtgatgagtccctgaagggaactgagccctgtggaagtcagtctgcaactccaggtagtctgtcagaactgagttacgaaagctcctgctgagacagggaagctggagaagagtatggaaaactcttctacttagaaaatgcgacaacctgcttttggtatatgtatttgctaatacttaatacttatttgctatgtagagggagggaccggcccagactagttccaacccattctcattgatacagtgcgtaggactcaagtgagtcaccttactaggagcacagccctttgtgggtgctgcagttgtcttttgtttgtgattcttactcccgccctgggccttttctcctgatttctcatgaagccttctgtggctgccatgcccaaacagattccacctggacccttcccggattgcctcctggccagcctttgccgctggaggctttgtttctttaactagggatgtctgagctttttggctttcaaggctgagggacgatagaagccacacctattaagaggagaaagttttaagatcgatcagaggtgatagccgtcatgacactttcttcagtctggaaaccatctagtgctatggctgaagcttttgacatgtgactggcattctgctttggccattggctaaaatgtaattttcaaaaaacgtaaaaatatgcaataagaaactagatcacatcaaaattcagctctttattcaattaagtccttaatgcaggaacctgttagaactggtttaaggaacatctgaaaaattaaacatattacatatagctattcaccctaatatagaaatgttgatgtaagcctggcatggtggtgtatatctgtcatttcagtagttaggacatagaggtaagagaactgcaagtctgaggccagcctcagtctcatagtgatcatgaggccaacctgggctgcacagtgagagcctgtcccaaaggaccaagggaaaggtgtggttctttgttttgactttgcttaataagaagacagcatttaaaaagctgttctgtagcatgctaagtagcttagtccatagaaggtagaccctcactttatatcacttatgacacatttatactgatttcatatattaccaattgttatttttgagtgtgtgagctgaaaatgcgggattatcgccagtacctttattgccatcttttacagagatggaagaaagtcctcagatgtggtacagcttccctctgagagcttgctttgcttttctttaatcaatggactattggcaggttccatccactctttgataaactaagcctcttaaagtaaaaacaaagagacactcctccaatacttatcccaattgtctcattaatttaaaagtgcaaacacaagagctcaaattagtgaagggccgcatgatattcttgtccaacttatctattttagcagtagcatgctgtaactacatagggcattccttgctcttccgttaagtgcgagctgtagagtgtggtgtgaaggagacaccagctttcctcttcataaatgccaattttcttgtgtgatagcttgatacaatgaatgtgagtctaatgtttcaaaacacatgtaattttgaactgaatggtccctgagagaagctgcttgcttccgctggtgctatatgctctaatctagaagaaaaagcccgtctgtgttgggcatccatgccagctttcctgagggtttcatggatagtttaaacattacgtttaatttgcctccggggcaaattaaagcttttagagattgcattcattttctgttgctgtgtaacaaacttgccacatgtccagcagcttaaaagggagcgcatactggctcccagttcctaccagtgccttggcttggcctattagtactctgtacagggctcctgaggtgcctgtcaggattataactgggatttgtttccttgcctctggaggctctgctgcagagtattttctgcccatctcttggagtttgttgaccaaattcattttcttgagagtgcatggtcttatagtgtggcttggtgccagctggaggcaggtcccaggttccagatgctattccctagctctttaaggttaaggtctctctgacctcagggagggcctgattcttcttttatagggtttcatctgacccatcagacccatctcagatcatcttcccttttgtgaatgcaaactcaactgtttagagactttaattccatatattaagtccccttcgttacattctgtgctttagacttaggtcgcaggcgcttttcccacttaaggcgaaggaaggttctagaatctctgccacagagaggaagccctcagagtagtacttacccataggaaagcagagaccacacatgcatgctaacagaatgtgtttaatatgcgaaattagttattgaatccagggggtgggggcacttaacttttagtggctggggagcaagggtgtaaaggcagagttattatgccctacaatagaggtaaaaggtccttacccacttagctaagtccctcttcctcactagttctgtggaaggaggagcctggcagagctcagatctctacacatatgtgtcacctgcctgtcgtagacactccagaaggtgacgtgagattccccttgggagcgctgatatgagcttcagaccaggtagcttcagcctcctggtagaatgaccaggaacagccagcccgtggagcagccagcccgtggagcagccagcccgtggagcagccagcccgtggagcagccagcccgtggagcagccagcctggagaaagggcagttcttcctgccgccttcttgtttctctctagcatctatccctcttggcagaaattgaccatgaagaagctaccagtggagaaacatgctgtgctgactcctggacccgcccgtcccgagctagggagctatcctaatgaccagcccgtcacaactgctttccctaagactgctgaaacatggctcaggaccaagccctggctctgatcatctactctgatggagagttgggattttaccaactttgtctgagttctgcttgagttctcaactatcaagtgagaaattctgtaattagacactggtagtaaagactatcagtttataaagccaggtgtggtagcacatacctttaaccccagcattcaggaggcagaggcaggcagatctctgagttaagaggccaacctgatctacagagtacattccaggacagcgagtggtacacagagaaactctgtcttgaaaaaaacaaacaacacaccacaccacaacacaacacaacacaaaaaacctagataaataaataaatcagcttgtttactaaaaagtctctggtgtcaagtgtacctctgatcagactttgccagcatcctgtaactgtggcttcttgggccaaggcctacagacttaaggaggaggagaatgtatttttcaggtggccaccaggcttcaaggagaggcaaggcaacacctgaatgaagcctaccatgagggaacctggtgcagaggagctgaggacgcctggagggtttccccggtggaggtgaacaatgaggactgtgtttcctcagactgggaacctgagatctggctctttttatagctggagcttagatggcaaagtgcttctgtgatatgcccagagcccaggttcaatccatgcaccccataaacgggatgtggcagagcacacctgtaattccagaacttggggagtgagggcaggaggatcagaaggtcaaggccagcctttgctgcaagtttgggacgatccagggatgcatgagatcttgtctcaagaaggaagaaagaaagtaaagcattcaggagcacattatcaatggtaaaaggaaatagatgaaatcaataatatattctatgaaatccactctgccgaatccatttcagcacacagtaaatgttaaaatgatagagctacttcacaggcttctttggtcttcgctaagtgcactagttgggggttctccagagaacagaatcaatatgatatgtatgaaatgatgagggcatttataaactagctttaatttttaaaaattaaaacataattacatcattttctctttcctccctccagccctcttccgtgcactaccttgccctttctcagatctgtggcctccatttctgtatcggttattacagacatacatattgctgttacatacatacgtatgtgataacaattaaagaatatattcctagtatatatttctaaatatagacatgcatcctgctcagtccttacaatgtatttcagtgctgatctttgcattggctgaccaaccaggggctcttcccttgggagacctatttctcccactctcagcattctggagttgtctgtagtccccccccccttttttttgtagggttaaagtcctatgagacccttcccttttcacctacatatgcccattggcgtccttgttcaggtcttgtttaggcagccattttgttgagacttcacgtgtgtagcttctctaacagttccacgagacacaatccacagcaagcttcctgttcccccggctcttaaaaaatctttgatcagctttcctgctcagaggttgaatggccccacaaagtccatctgcaggccggaaagccagatgagctaatagctgttcagcccaagaagctagaatcctcagaagaaagggacccgcgaggcagctccagtctaagactggaggcctggggaacttcttagttagtgatgtaagtttacattcagtggcagtggcgcccaagtcatcatgagaaaaacctgctcaaaagttgagaactttggggctggtgagatggctcagtgggtaagagcacccgactgctcttctgaaggtcaggagttcaaattccagcaaccacatggtggcttacaaccatccataatgagatctgactccctcttctggagtgtctgaggacagctacagtgtacttaaatgtaaataaatctttaaaaaaaaaaagttgagaactttggggccgtgactgctagctctgtgaatttgacaggatttagaattaccatcaaaacaaacctctaggactgtgcatgagccaaagggaactcctgtgagttgctttttttttttttttctttctttctgtttttgtttgtttgtttgtttgaagacagggtttctctgtgtagccctggctgtcctgcaactcactctgtagaccaggttggcctcaaactcagaaatccccttgcttctgctttctaagtgctgggattaaaggcatgtgccaccactgcctagcttgtgagttgctttttgcagacatttcatcaatgatgagaaaagagaaaaattcttcctccttccactttttgtttcatccagcccctctcagcctagtagatggtgccacccacattcaaagagaacattagtctcttgattctctgaccctcagatcagtcttctctggaaataccctcattcgcacatcccaaagtatgtcaaattgataactaagattaaccactataataaacatttaaaaatttgtgtttattttatatttacaacacaccttgagtcagaaaagccacatttcaagtaattaatagtcacctgtggcttgtagtcaccacactggaaactcaacttgaatagagctggagatgtagctcacttagtagagtgctttctagcacataccatgccctgagttcaatctccagaatttaaagggggtggagtgggagtaactatgatagtcagcatttattgggtgtaccaagtaattttgttttcacaggaacactgcaaggcagctgctatctcctaaagaatacaagggtatttcatggtctgccattgtgcttccccatgtttaagaagcatctttcatccctgggtgcttccctctgtgtgagcctgccatgtttgcctcttccagcgctcctacgattacatccgtcttgtgcgggaaatccaggataatctccccacctcaagatctttggtttagttacatctgcaaagtcttttcttaccctttaatataacattgacgcattctgggaattaggatgtagacatctttggggaccattattcaacttatgtagaagtgactttttcacgattatatatggaaagctgttagctgagtctgcagttttcctgcttccgcatccagattcagtgaactcagctcacctcgctcctctgggggacggttgccttcatcccggcccatcaggagcactgctggttgttaacagaggcacagtcttttatctccttgtcccttgtctccttgtcctgctctcttcccatcccaggtctcttactgccatgtgtgcttcttcagggaactgaatgccaccctttcccttcagacttagagactctcaagaagccttttgttgttgccctttgcttttaatttgggtgagaacatggaggtgaatggctacaaccattgaccagaagagggatctatgacctcatagagaggccagcatgctatacttgccctgtttttcagatccactatgctctccagtgtcctggccaacaatgaccttcaacccaagcttgctcacgtcagagtctgctacaggagacttgagagcttcagtttagcatagaggccccccgcacgcccagtatgagctagtcaagtcaatttattcctaataaacatctctcaagttagctcattgaagtcttctaattgttaataatagaaatgagagctggagagatggctcagcggttaagagccctgactgcactggaggtcctgagatcaaatcccagcaaccacatggtggctcaagaccatctgtaatgagattggatgacctcttctggtgtgtctgaagacaactacagtgtacttacatataataaatacataaatcttttaaaaaaataatagaaataaacttggattaacttaacaacaacaacaaaaaaaatagtgctgatagaacctttcctttgaagacccagtttttgcttttcatgataccttaagggtcccttctttgggaaaggggactttctttgttcccttcagcctctgaggcatgttggttgtgaggttcaagaccagtcttcttcaaacacctaccagtcccatgtgtccatacaagtccatccaaagattgaagaatcacaaatccttgatgggaccaggcaaacggaggctgggcatgaggtgaagtgctgccagagaagcttggcagggcacacatggctaagaaagtgttgggatataagctagaaactttactgtgatgtcatacagacacgtatgcgtgcactaaataacacatggaggtacacttaccgtcccacaaactttgaacatctactatgtatgtgtactgtactaaagttaagaatacagaaatgatttgtactctaatggttttcctaagagaaagaattgttggtaagtttggggcaaaaatgtgttaggtgttagtgttgagtacacaaatagaacaatgggatacggttttgtttgggtggctgtgtccttgggtggcagtgtctgcttgtaccttagaatgtgaatacaaatgtatgtagggtctcttaagggcactttagatagataggtcattagagttagtcctaatctaatatgatgtgtctttttaagaagagggaattggaagactttaggggttactaggacagaggaaaggccaggtgagctccttggaagaagatggcccgttacaatgcaagaagcaagggctcaaagggaaccaacctggaagcacctgcaacctctggaactatgagggaaaaatgtggtccaggatcctaatccctgctatttgttaggaagctgtactgactggttttgtgtgtcaacttgacccaagctggagttatcacagagaaaaaaaatcctcccttaaggaaatgcctccatgagatccagctgtggggcattttcttaattagtgatcaaggtgggagggcctagcctattgtgggtggtgccatccctgggctggtagtcgggttctataagagagcaggctgagcaaagccagggggagcaagccagtaagtaacatccttccatggcctctgaatcagctcctgcttcctgacctgcttgagttccagtcctgacttcctttggtgatgaacagcagtgtggaaagtgtaagctgaataaaccctttcctccccaacttgcttcttggtcatgatgtttgtgcaggaatagaaaccctgactaagacaaaggctgtggtgtgctcaagaatgaagagtgtgtgtgtgtgtgtgtgtgtgtagaaaggctggggaatggggaaggatgttccatgaagggatctttagccaaaagccttgatataaaatagcacttgggcttactcgagtacagaacatcacgtgactaacagaagtgggtagggatcggagccgggagagcagacagctgggcacaggctgaacccaaagagacttgtgttctttaactgtatcttgtaaatgtcccagtatcttgaaagcagaatgcaacaagatcagatttgaattttagaaggtctctgggtggtgtggagaagggattaaggaaggaggctggggcagcctgatcagtcaaaagaagcagagaggataacagaattagccctgcgggagtttctctggaggaagtgctgcccctatgaggctggcatggggctgtgcaaagagaggcttcagctatcagtgtagataagacacctatagagagactgggtagggaaagagggctgacaggaggagtgggttgagaaagcctaagctggctcagggtaggggtgtccccgaacagaaactgtgtcctggagaaattcctggtcacacagaaaatagtattgcttttcttttcttttcttttcttttcttttcttttcttttcttttcttttcttttcttttcttttcttttcttttcttgatattttctttacttacatttcaaattctttccccacagaagcccccctattctatcccctctccccctgctcactaacccacccactcccactcccctgtcctgggattccccctatactgactggggcatcacccccttcagctccatgggtactttttctagctccttctttggggaccctgtgttcagtccaatggatggctgtgagaatccacttctgtatttgtcaggcactggcagagcctctcaggagacagctatatcagactcctgtcagaaaacagtatttcttgagtactcagctgtgctcaataattgactagaaacatctgggagcactctgagtaagcctcagacccgtccagcgactggaggccgttcatccagctgagcgctacgggagactagagagcttcagtttagtgcagagggccccagcagctccagcacgagcgacagcggtaactggagaatagggcggtgggaaaaaggtttccttcacctgcagtccgtgtttccggaggaccccgttcggacccatacggaagctgtcatctgctcgccccttctatgggcttcagctgcgtctcctgttcatatgattgtggcccgcttccctttttcagtcaggccaggatttcctctttcattcttttttggaacaccgcagccttagtagaattcaggcttccataacaaatagcttggggttgggaggaggggtgggtgggttgaacaggttaacctcctcatagttctaaagaccggaagtctgagagttgaggggtcagcagggttggcatcttctcagctcgctctctctctctctctctctctctctctctctctctctctctctctctctctctttctctgtctgtctctgactcacagatggccatcttctcccagtgtgctcatctggtctttgcatgcatatccctggggctagatgtcctttatgtagaaggacatccataacagattatgtcctatttaatgaccttatatctgattaatgatttctttactggccctgtatctaaatagttactctttgaggcgctgaaggtcaggatatcagcatatggtcttggaggggaccacagatcagccatagaagtgatcagtcttctttgggctgagagaatagtgtcaatctgccaggctctttccattcagcttcttagtccctaggactttcctgctgtccagattctggtttttgtttgatgatggtgatggtggcggtggtggtggtgatgatggtatgtgtatgccatggcatacctgtgaaagtcagaagacaactttgtgtgtggagttagttctttttttcacctttacatgggttacagtgatcaaatttactcttttctccttcctggggggggggggtggtcagctatctatcatctttcattgcctgcttaccagttctgggactagtttataagaaactttctttcaaacttactactttcaactttctccttcagtacactatgtggaatgctgatttttatttttggacacgttgtcactctgtatatgtagttcaggatagtcttgtgatccttctgcctctgcctctgcctctgcctctgcctctgcctctgcctctgcctctgcctctgcctctgcctctgcctctgcctctgcctctgcctctgcctctgcctctgccttcaagtgttacaggtttataccacaacactcagtttatccattgcttgaggtcaaactcggggcttcagatatactagacaagtaccctgagctactctgagctatatcccaaccctctcctctgtcctcctatcatctgtgtgtgttccttattttatatgcatatacaaaagatgtagatttgttcttaaatgttttcatatcaaatgggtagtttataacttgttccctttgagacaagttctttcctttcaatttctggtgtacacagatctgctatgttgagtagttcctgattgcagataggtgcagatagggttgcagataggtgttggagttagtatcattctcgagaagataattacacactaagcctgaaagacagcatggttgttgtggcagggtagcagaccagatgggcagcctagtgtctcaggcttgggagcgttcaagcaagcactaaggagtaagggttcttctatattaacagtctcccagtctggcctcgtggaagagtcaggaccacttcatgacactttggctgtacagagagcctgctgtccctgtgctgaaggggctttagttatagtttgtctccttcctcagctatgctgtctgctttcatttctttctggattcctagcagatgtttaaaggtttctacgagagcttggctatgtacaaagtagagctctcctctgaaaccactatgctagccaggtctgtgacccctggcctgttcagtgatatctggggtagctggaccataaaactcaggatctggccagttttgcaagtatcaacacaaaacgggcttcttcagaagaggtacatggatttggcaggctctgaggatattatgaatatctcttggtccatctgtaattcagcatggttttaagaggctcagtcagtttgctgggatagctataaaaatataccatagacataggggcttaagaaccacccgatggaaggctgaggatgaagctcaactgatagagtgtttactatctcatatgaaagtctgagtttgattcctagcactgtgtaaaacaagagtggttcatgcctgtaatcccaacacttgggagatggaggcaggaagatcagatgtcaaaggtaatctctggctatgtaggaaggttcaagctagccagggctatataagaagaggaggaagaagaagaagaagagaggaagaggagtcaggggaggaggaggaggagaaggaggaggaagaagaggaagagaagaactgggattttattttcaagcagttctgggtaggtcctagaagtctgaaatcaagatgttatcaagtctatttcttctgaggccagctgcagctgaagtaccatcttctccctgggattcacatggtcttctgttgtgtctctatccaagtgtcctccttatgagaatatgagtcccagattggattagggcctgtcatagttagggttatggcaattgtgatgaaacaccatgatcaaaagtaagttgggggaagaaacagtttgtcttactcttccatatcacattccatcactgaagaaagtcagggcagaaattccaacagggtaggagtctggagacaggagctgatacagaggccatgggcagtactggtcacttgctcactcccatggatctctcagccggctttcttatcgaacccaggatcaccagaatcagcttggattttcccaatcaatcatcaatttaaaaaataccctataggtttgcttgtagtcccatatgatggaggtattttcttaattgaggccccttcctctctgatgactctagcttgtgtcaagttgacataaaactagccatctcagagctcattctaatctcatttttattattacctctttaaagacaccaatatgaaataccaggggccagagcttcaaaaatgtgaatttctggaacccataaaaggaggcaatgaatacacttgctccctcacacatggattagtgctagacttgtggtggatgtgggggccttggtctgtatttcctgcttctgacatgggtcatgggggggggcacttgggtaataatgcaggacatctatcactgtcacctctgagagacatccaaggtagctgtgaggtgaaaagacaaggggttaagttgtgcttaactggccgagggagccagggatatgtggaaaaggaaacagtctgggaagagtggtaagacaaggaaggcggagccagatgtggcgagaacagatccgagtagaactgtggatttgttcatcgtggaggggcttgggtggtccataggtccaccctgggatcactcaggtggtgatggagagcttccagtcactggaggaagctgtaaagagtggaaggcacagttatcgactatccctaaaaccccctctgcttcatctcggtcccggggacagttgtcgcccactctcattttctgtcacctctttacttttttattccatgctccatctagacataatcacgttttgttgttgttgttgttggttggttggtttttattttctaaaataccatgtgaacccccaaccccacgccttgaccttgccagttccttcaggtataacttacaagtccagtacagcagctttctaatcctcctttgagccattctagaaacttctactttgctctgggcccttatatctgcttattttttcgtggcttgcaagggtttcatacagccttgtggagcattaaacaaaaaacaaaaaaaaaacaaaaacaaaacaaaaccagtgttgagtagagtaaaaagaattgctttgtgctattttcttcaggtcatttatagtagagagttccataaaattcctttcagaaatcaagaaaacaacagctacaaccaccaccaccaccaccaccaccaccaccaccaccaccaccaccaccaccacaacgcccctgacgaggccttgactgttaacttctgccttttgaagccgggatggatttaaagtactttgttttcaatgcttatgctcgcatttaaaaaaaaaaaaaatatgagctcatagttccatctaagcctgcttacccaaggagatttacacttttttttctgaacatttataaacatctagaacagtttctaaacagagatactgcagggcttcttcttagcttcctagcaacatttacatatgaaaaaaggacttccagcagggggtgcggggggggggggagtagagtggggtctggtagagactactgagaaaagtcagaggaaccgagtgcagaggaagggtggcaattgggagtggcttggttatttttttctctacccgtggtggagtttgaatgcagagccttgcacttgaacccaggcaccccgtgcctcctggtttgtagccagtgttataactctcctctctgcttatgccaagtatgcaaagtgaatgaatcacaaggttgaaagaatgaacatggcaaaatagacataaaacgcaaccagactgacagcagaccgaggttcgttcggttgcgcacaagactgacatcctgcctcatgaaaaataagggtaggtttccctaaccttcccaacccaaaacaaagcctgtgttttcacacaaacccagttctcttagaaagtttcccgcctatctccaagtctacccctgcatcttttcctccttccgtcttagagcctgtggtaactatgacctaagtaccatctggcctctgcttgttcctcctgaggcaatagtagagggaaatgggaaaggcagctggggttggagatcttacagctagggtggacagaggtcatgcagaaatacccccggggagggaacatagtaggaactgagactgggcagggccagggcaggggagccatggggactgtcactccctacatccacacagaaaatataaggaggctgcacagatctcctatgagtatcattgcaatccttaactattccctctgccaggaagcccctgttattttaatctaatcccctctcttttctccattgtgggttcctgtgatggaaagttcggtgagcctttaatttcatgttcctgcatgtctctgtgtactgttcctgttttcacgttccattctgaccacccacgctgtcaaagaggacagctgtctggcaaagggttccacaggccccgactttagatcagtcagaaagtcgggctccattctattaagctcagaattatatatatatatatatatatatatatatatatatatatatttgtacagtctgttttgatgttctgaagtttttgaacatgagtagttctttttatttacaagtaaagatgtcctatatatatatataatgtctttatatatatataaaacttcatattctgcttttacctcactccactaatcccttatcttaggactcattcattctgtgtatgtatttaaggattcatatctttatttcttgaggctcgatcaagttctattatatagctacattataatttatttaattaacccaaagtaaccatttttgtggggtttttttgtttgtttgtttgtttgtttggtttggttttggttttctgagacagggtttctctgtgtagccctggctgtcctggaactcactctgtagaccaggctggcctcgaactcagaaatctgcctgcctctgcctcctacgtgctgggattaaaggcgtgcgccaccattcccagcccatttttgtggtttttaacctttactattataaactacatatattacattattatatttattataataatattaattgtattataataatacattattatatgtattataataatattagtcctgattagttgttgtcaacttgacacatgctggagttatctggaaaatgccttcaaccagactcacctggttgataagcctgcacagcattttcttccttcatgattgagtgggaggacccaagcccattgtgggtggtgccactcctagacccctggtcctgggttgcataagaaagcaggctgagcaagccctagggagcaagccagtaagcagcatccctccatggtccccccaacccccttcagttcctgacaaacctttacttccttggatgatatcctacaagctgtaagataaaataaaccctctccttccttcccaaggtgcttttggtatttatcatagccggggaaacctaagtcacgcacatatttacataagaacaaaggagtaccataaacaggctagtcctccacctgccctccttgcttgaggatgaaagtattctccctgcacaattgccttataccaccacgtgctaatgactctccgctctcttccggcccagaacggacatttaattgacacagactctaaactgacagatagccccagcaagcaacgtcaaaagcacctcaccttaagatgggcacattttagtgtctacctctccatacctcacttctttccctgcctcccatgatccgcagcccctctccttccacgcgttcttcctgtgctggatacctccaccttcagcgcctcatacattcactccctcatttccacctcattgccagtctctcggaagatgccctcctgcctctcctgagccattgcagaaacctcactgtttgtttgttgtttgtttgttagtttttattcaccttctcttccagtccctcttcacacaatttataggaactcaagtataaatctaattgtattcttccaaatccttaattcttcccattgttccggcatagtgtgaatgtccctggtcaccacctctccagaactcacttccccaataccatcccccacccccacagccccgccttttcagccttgacacatttcccagattccaagaattctcctctgctcccaccctttccttacgtgccttcatcttgtaatgggaattcctgatttctccatcttactgaacacttgcctatgctgcaaggtgaggccgagatgacctgtccaatcagactctccaggtagaatggaacaattacttctatgtatttatacctacactttgtctcttttcttgcctatcagacttgagttggctcatttcctcagtgtatggcctgtagagtgtatttaataaaagtttgatggatgaataagtcaatgaattaataataaataaaccccgtttctctgcctttcagtgaatcagtcaaaaacaagaaactatgacagactcgtgagttctcagacttccggtgagttatgaatgtcacttcttgtgggagaaactgtagacacttggaaactcaaatgataagtggctagtactgatcaaggaaccaggcttggaaaatgggaagtatgttcataactctacagaccttctgtgtcttaagagtgatacaagataccctgtggtccagaaaggaggccaagtacacctgtattcctcttcctcataaagggacatataggaacctctcagtgcatcttatttctacagttcttcatcaagattatcaggcatgcgagctgggcgtggtggcgcacgcctttaatcccagcacttgggaggcagaggcaggagggtttctgagtttgaggccagaccagtctacaaagtgagttccaggacagccagggctacacagagaaaccctgtctcgaaaacaaacaaacaaacaaaaacaaaaaaaataagttatcaggcatgaataccagcagtggattttggctcttaaggataccttgtatatatagggtttgacttgtgatggattcagagcccagagaaagacctctctgttacatcagggtgttgcttcggatgagaaccagcaagccaactacacgtctaggtagagagtaagggacccagtgggaatatggactggtgtgtgccactgacggaatttaaacctgggaaagcctttgaggaggaactggaggttaaaaagccacatcgggctttctaatttgggggttcctggatgaaccttaccacttccccttcccttctggggaggggatgaccgtaaaggctttctggatgtgactctgggaatgtcagaggggccaagccctgaagaagttgttttagcgtccctggataaagacaagacaggctctggatttcatacctgcagtctatgagctacactgaagttcagtcctcaatcttgtaggcttcgttgttcaagactcttttcctaagacctggccttgtgtctccccagagctgctccaggctcctgtgctgagccccatcccatctccagaatctcaaaagggcaaccacctgactctgcggtatcagatgaagctgaacccctagaggtcacttcatgggtactcttcaccacctatgagacagacagacatgctttgcaaacagtagtcaccacccagaactctgtatccaagaaatcaaagagggagacccggagcactactgatgtgaggtgggccctgaggatgtctgagatcaggaactggactctgcctatagatcagactataggataagtgagaaagggaggggtctagatatcaggggccaggcctcccttggggtggaggaggaagcctgcagcctgaaaagtaaggctgtcttcactttctgtcagtcagagtctgagtcttgtcctcgtctcactttgtgtcaggggctgctcaccctgttaaggaaacagtagagctcttctgtctaccgtgttctaccgagatggggtgatcttggggagctgcctggctcctcctggcatagttactccctcccaccactatggggtgagtgcatcgtctcctgagtgtatcttatttcccatgtagagcctctgctttgggtctgggatcactgcatatcctccaacctcagcagctggtgagatgtagagagagtggaggggcagacatgtaaggggagagaagtcacaatttcatgtaaccacagaagttgtgatttcttttttccctagagaactaatttcctgagatctcaccaatgctaagccctgcatttcttggcctacaatatacacatctgccagactgggtgagggagataggcacataacccatgagtagagagacacagaggtgtaggagtcttgtgtgtcgttgagcttaggagacctacaaatgtccagaactgacaacgattctagtttttcctgattgggtgagccactgatatgagtatatatgccatgctccatagagagtcaacagtcttgaagacaggtgtgtgtgtgtgtgtgtgtgcttgtgcatgcttgtatgtgtgtaagtatatgcggtatgagtgtgagtgtgcatatgtaagtgtgtgtgtgtctgtgtatacatgtatgtatgtaagtgtgtgtatttgtgtatatatatgtgtgtgaatgtgtgtatttgtgtatatgtatatatatgtgtgtgtgcatgtatatacatgcatgtgtgtgtgagcacgtgtgtgtgtgtgtgtgcttgttgggaaccataaggttctcagaatgtcagagatggagctgtttcacgcagatgctactgaaggtttctttagagtggctctcagactctagagtctgagggtcaacaacatcctcaagtcaatgtctttctcaaatggtcctgaacatccgctaggagtcccaccttctaccacacacaggtccatcctaatccaaataaatgagacaataagacatgtctgagacagtctgaacacctatgctttccttggtcccagagagcactaaaggacaatcctcctcatcttagagtaatggggatcctggttcctatctccatactagggttccatacgtagtaaaatcagtttacaaggtggtcattgactttggccacagagcccttctgaagtccattgattcttctccggggttttgatcctgttatcagtgaagatccatagcctggtcagacctctactcatttgatttggacagttatctgttccagatttatcttacagtgatgtttttttgtttttgtttttgttttgtcttgtttatttcaagacagggtttctctgtatagccctggctgtcctggaactcactttgtagaccaggctagcctcaaactcagaaatccgcctgcctctgccttccaagtactgggattaaaggcttgcgccaccatacctggctggctgtgatgaattgtatattcaatatagtaagaaattattcttctctaaagattgctgtagctttttaccctgagctactgggatttaattttaaaaccttccatgctaggcatgataggaatgtctattcacccaggggtgttggttaccagacaatccaacaaatttaacacggaggctaagagccaaatataatttcctttccagagaactatagattaaaggtatcagtctaacctttggacgggtaggagctcaaggttagccatgtggcacacatgttatcagctctagtaaaaattccaaggcttgggtaatgttcatagtgcatggggcaaacactgtctcaactaactagagatgccatgtttcacacttctctgaactcctaggtacctacttctccagaactttgttctttactctgtatcctctccctatactaaatcatagtaaggaggataagcgtttcaaaggtgtccaaggagtcgtcccagcaaattcctgcagcagtgggaagattttggaatccctcaagcttggcaactggttttagagagaaggcagtttttttgttgttattgttttgttttgcttttttgagaactgtagtccctctctctgactggacacttggttaaaagctcacaggctgttcagagtctacacaatatcacaagataaaatgccagctggttaggaacatgaggtttgaagaaaacagggtaggaaaatcagttgcaggaaggaacgcagtcagtatctaagctgtatccaccagtgctctgtccccgcctgaggtggatggggacaaagcggtgaccgtgagagagcgagcatgaattctacactgaaagcacaggaacgccgggagaagcgctcttccctccagtgggggccccctcggtcccccagtgagtacgacacttgtcggtaacagcattttggtcacatcttttccatagctccaatgaacggccccacttttatcatactctttcctacaagctatgggtcttatagcaaaacctctttgtaggcaaggctgcccagtcccatttgatagggcttaggtttcgtcattcttattacccagcttccccaggttactgattcacagaggggccctccttccttctcccaacaagcaggtcacggttactgtaagggcgtatagcattcttgtggggctaagtcatagaggggtgataaacgcagttttaaaggattctcagtggagttgggcagggtttaaacaaggtactccatcaccctctatagaagtctgggaacccctgccaactcctgagcagagggtgttcatagggcccttgggctgaggattgcctggggtttaactgagctgctgaaatcatattggggttcctgtaatatttccactgaaggaagcctgcgtgatttgttgttgttatttgttgttttaagatcatttaaaactctcctcccaccttgtcctattactaatgaccttgaatctgccacttttttgtgggggtagagaatcctcaagacattccctatttttgttttgttttgtttttcgagacagggtttctctgtgtagccctggctgtcctggcactcactttgtagaccagggctggcctcgaactcagaaatctgcctgcctctgcctcccgagtgctaggattaaaggtgtgcgccaccaccgccctgctcattccctacttcttaaatatttccatcgattggaagaaacaaggggaacctttgagatccaggttctctgagatcctgtctcacagtctcaccatggttagtctagactccatgtctccttagtaaaccaagatcaggctcccacacggctcttctctctctcagaagaaagatatagtcccaagcacacagggtcatggagtgtcatggaagcaaatgacaaactcgatggggaacttgacagggaggatagagcattttgtatgtggtaactgaagagctgcagtctttccacacaaaggggaaggtagagagtgcccctagaaagggagcaaatgaggttacagaccaaagtatgaagtccagaactgggtcatccaagattagacagagacattatctgtaaacaatgaataatcaaataaaggtttataccttatttaaaaaaaaaaaagaagaacaagggtcatggacatatagaagcctgagagccacagaagggcaggcacatcctggccataccagctgagttctgtctggttctctgttaggcagaccgctgtattcaagggtccagcaggaggagacactttagagatgagcatgatagactatcgctgggttgttgactagcaaacccggtctagaccaatccctgtgagactgttagacaggatctcagagaacctggatcttagacgctccccctacttcttccaatcgatggaagtattaaagcagtagggaacgccttggggactctctacccgacaaaaaagaaaaaggaagcttatttcctttcttctggcagctcctaagcaggcttctgttgataaccccccatgccgactgtgtatagggcgaaagtgtcacaatagggtaaccacagctagcatgcctgacctgaacaccaaccacagcgcatttcttgccttgtgtctctactccttaattttgcttcattttccctctcagtaccccattacttgatgatagatagttactgagtgctgctcacctttctgtgacctcggccatgatgaccgtaagaggcccacggtttccttgccagccctgtatcccacatcaggaacagagagccttgcttgcacttagcagaaggttaacaaatgtttgtaggatgagtagctgatctcatgtgagtcgatcattctgatgaaaggaagagtgatcacagattctgatcagttctgggatgttgacacagtttactgcaaagaagaagagcttgagccatactgagttaactaagaaaaatgccagcacccagcacgggcaaagctgccagccggctctcctcaggcattcctttctgtttcctagtgctcactgggtatacctccagtcacaaatataaaccagtgacaacaaatgactacaaactgattaatactgacaccaactatagtaatgacagttactaagtactttctatgtgcaagaacatctccagagttggccatactgcgctgcaaaacatttaatcaataacaccccaccaacaagattccagaagacctgaaatctcacctgaatcagaatggctatcagcaagaaaaaaaataaataacagatgctggcgaagatatgggaaacaaaggatgctttctctctgctgacaagaatgtaaactgtttctgctgctatggaaatcagtatggagattcctcataaaaccaaaagtaggactactgtacttgcattcttgggtgtatattcaaaggaactgaatcgacacatcacagaagtacttgcctacatgtgtgttgttggcacactattcacaatggccaaccaggaagtgggactagcctagaagttcatcaagagatggacccagaaagagagtgtggtacgtatacgcgatggaattttgtacaactgaaatcatgccatctgcagaaaaatggacaaaagttggaaattattaagcaaaataagccagattcgggaaggtaaaaattctgttttcttttatatggacaatataaatttaaaagtctctctctctcactctctctctgtctctcctccccaccccaccccctgtgtgtgctacaaaactagaaaaggtgacatgagagaggaggaagagattttaagtgaggtgggaacagagtaatgatctatgtaggtggaaagcaaagtggcggcgttagttgggaaacggggggtggggggggagggtcatgtgggaagggaatgccacaaagcaagatagctcagatgcattaagatgccatgttggaagccattactatgtatgttcatcaaaacacatttgtcaaaaagaaaaaccaataaaacaaagcaagtaacactaaaataaaaacaaaacccaaaaaacaaacacttaacccaaaaacacccccacccctgattttggtcccaactttgcattaaattttgtggatttgaagttgttctacatcctagacctgtggattttgtgtttttaatttggaagacaagatgttggatgagctcagaagattctctttctctctcttttttaaaatgttctctgaaacaacctactttcagcaagccatgcctctgagcccttgagtctgaagagagaaaagcaagagtgtcaggaggaagctctcaggactgatacctgccaccctgctgcagtctgtgagtccggtccgtggaaagcccaggagaacaggttaaaagctggtagagcccctctcatgttccccagagctcagtccaagaagaaaacagacagtgtcatttcgtggcttcgcccaggggaaaacaaaccttttgtgactggagacaaaagatatcgcttggctagggagcttcctctccaagctcacagaactgaagagcaggctacagattcccagtataaggcagaatcacttggtgatcttgcatcatgaatgagcacggctgttccttggctccctcctccacaccaccatcctaattcagtgggtaggaagtggggccaacggcaccagcgtgttaaccatctctctgtgtgactctaaagcaggcggggcaaagcctgtgctttattaataagaacaattaacataaggaggaccagaggacatagataagttggggagaccactttgggattctgggatatgtgacacggatgagatgcggacttagttgttcagaggtgtactagggaacagccttaggtgtgacatccctgtatgcttaaaggtcaggctgctgtacaggctgctgctggcatgggaagcaaggagctgggctctgtatcccagcatcaaagctcttcaggctgatgggtgcttttggcttatcttcctcatattagagatttttgccatcttcttttttaacagtcatagacagttgctgacaaatgagcggccccttgtcttcatgccatgccttcagtaaccagcccagctcacattaattgagacttcgtcatgggccactctacgctaagtgctttggttttcactcatagagcgcaggcgtgagaatcctgttgtggaagagccaagcagtctagtttcaggtgtatggctttcccggttgtctatcccagagcaatctgttgcccattgatgtcgaggataatgccttcctttcctgacacacgcaaacctttccacacatctgcctgttctttctgattttaagggaggacagtcttgtcatctaagacacgtccccgttcactgtgctctgcctacaaccttgtgggcggggaagaaaccttactccatgtctcatctccccactgccccggtttctgttgtctccctttactgcatcctttcctccgaatgtatccacagttacttttctcttgtcagcactaataaagctttcctgatagactctgcgtcctcttttctcatctcttatttcttttcctcgccaaaggtaaactcacaaactctcagccatatctgagcaaggtctctaggagaagcccataccctcgcgtggataagctttctgtctctctgcattagaaagcacatggccatattcttacttgtcctttgtctttttttttttttttttttgagcacatctctttctcttaacctttgcaattaaggcattaaggctataccactatatcatttaatggcatttccaactctggtttaccgtgctgctttctcctgaattcttttcagtgtcagagtggctgtgatagctcttcccagctgtcaacttgactatatctagaatgaactaccatccagaaacaactgtgatccagatcttgaggctagatgacacaggcttttgatctggatcttggagcatagtggccatgaaaagcataggcccaggcaaggtggtacatgcctttaattccaggagatagaggtaagcagatctctgagttcaaggccagtcagggacagatcgagttccaagtaaagaacagtttaggttcaggtgtggtggcacacaccttttatctgagccacaccttctgctggaggcctacataaggacaatgggagaatgacagttttcttcttctttgcctgcttgcacttgcttgccagcagaactgttggaatcctacttcttcaggattccatcttatacagaaaaccagctgcaacaactagcctcatgggactgggcaactatttgattcttggacttcctattcacagctgcctgttgttgggttagttagactgcaggctgtaagtcattttaataattttaatatatagagacattccataagttttgtgaatctagagaacccttttacagtggctaatgtggtgtctaaggattaagagcatccctcaggtcccgtgcagagctgtttctctacgcttagcctcatcttaacctcttttccatctgcttttcttggttctcctgttctagacgctctctgtgcttcagtgtgctttgacccctcccccactttgatgatgtcacattctggtccctctgaaggaatgctcctttctcccctttcacaatccttcagtgctccttcgggagcacttcaaccatttgaacatctttttgtttcgctccagccaccttcatggttcatttggataatcatccctttaacacggacatttaagagggaatgagaaaaaagggaaagcatttatgaaatgtacgggcccgccccacaatgggagggtgcatgcaggtccaacccacaatgagagggtgcacgcaggtccaacccacaatgggagggtgcacgcaggtccaacccacaatgggagggtgcacgcaggtccaacccacagtgagaggatgcgtgcaagccaacaaattttccgccttcagaggaagatttacttagaatttactcgctaatagtttgttcaggactgcctctgccatgtggctcctcatctttccagatcctaagagaactttctagatccaaagaacaacttttcattgctccctcctccctaggccatacacaacaattagaatgaagacatttctttctcattgtcttattttcttttaaagacccagatggaagggagagtgttgatgtggacagccagtgttccctcacgtttaacaatcgtagggaatgtgcctccgaattatctcatggaaggccagtgaggctgaggcatttacccacccacccacccatgctccatcactccattgactggcgtacacccaagccctctcctaagctgcacccgtgcttgggttgagttagcttctctttgctgcagtgatatcagagcaatagaaaaacaaaacgtgtccgggatgaaagacttcagcagtaaggtagtgaggacgacttaatcataaaaactgtctaggacagaaacccagtgtcaaagggacacaccgcagaaagccttaagtacgtgctataaacaaaatgttggaatggatcccttcctgcttggctaaccagagctgaccatgtgacaggtgccagaaggtcaaagacagcatgagggagatcagatcgccccttgcaaaggaaattaagacgaacctgcaccattgctcttagaaccccttatccatggacagaaggctgagagagggcaattgagaaaaaattggatttaaccattactttggaagtttgtcctgcagaagaccgtctgagggggacagcaacctaagactggctcaggcaagttaaaattgataatagactaagatctgattctcatctagggagccaagagcattgaagctgcactgtagatcctggaatctgtcagggaagtgatatttacagtagccaaccaatgagacatggcttgcttggttacccagagaccacagtcaaaggggcatgtgaaggggtttgtgtgtatgtgtgtgttctctgtgcagagaggtctgttccagacgcctgggaatggaggaaggaattgttaaggactatccaaaatagagactccttaaccagcaaaagtcctcaacagaaaatagttccttt

SEQ ID NO: 646 - DNA, 1305 bp, Mus musculus
atgagctaccccatgcactggggggaatggatcctgaactttcgggtgccgcccgccggggtgttcggcgtggccttcctggcccgggtcgccctggttttctacggtgtcttccaggaccggactctgctggtgaggtacaccgacatagactaccacgtgttcacggacgccgcgcgcttcgtcacggaagggcgctccccgtacctgcgggcgacctaccgctacaccccgctcctgagctggctcctcacccccaacgtctacctcagcgaactcttcggcaagtttctcttcatcagctgcgatctcctcaccgccttcctcctgtaccgcctgctgctgctcaaggggctggggcgccgccaagcctgtggctactgcgtcttctggcttctcaaccctttgcccatggcggtgtccagccggggcaacgcggactccatcgtcgcctccctggttctctcgaccctgtacttcatagagaaacggctcatcgcgtgcgccgcggtgttctatggcttcgcggtgcacatgaagatgtacccggtgacctacatcctccccatagcgctccatctgcggcccgagcgcgacgatgacgagcgtctccggcaagcccggttctctttccaggctcgtttgtacgacttcctgaggaggctgtgtagctgggcagtgctgcttttcgtagcagttgcagggctcacgtttgttgccctgagcttcggtttttactataagtacggttgggagtttttggagcacacctacttttatcacctaactaggagggatatccgccataatttctctccgtacttctatatgctgtatttgactgccgagagcaagtggagttttactctggggattgcggcgttcctgccacagttcatcttgctgtcagccgcatctttcgcctattacagagaccttgtcttctgctgtttccttcatacgtccatttttgtgacttttaacaaagtctgcacctctcagtactttctttggtatctctgccttctgcctctggtgatgccactgaagcagcagctctcagggaagacgaacctggctggcattccggaaatggaagaaaaccctgggatagaaggaaggcttggcttcaccctgttggctgtgggccaagtgaatcagtcaaaaacaagaaactatgacagactcgtgagttctcagacttccgagctgctccaggctcctgtgctgagccccatcccatctccagaatctcaaaagggcaaccacctgactctgcggtatcagatgaagctgaacccctag

SEQ ID NO: 647 - protein, 428 aa, Mus musculus
MSYPMHWGEWILNFRVPPAGVFGVAFLARVVFYGVFQDRTLLVRYTDIDYHVFTDAARFVTEGRSPYLRAYYTPLLSWLLTPNVYLSELFGKFLFISCDLLTAFLLYRLLLLKGLGRRQACGYCVFWLLNPLPMAVSSRGNADSIVASLVLSTLYFIEKRLIACAAVFYGFAVHMKMYPVTYILPIALHLRPERDDDERLRQARFSFQARLYDFLRRLCSWAVLLFVAVAGLTFVSFGFYYKYGWEFLEHTYFYHLTRRDIRHNFSPYFYMLYLTAESKWSFTLGIAAFLPQFILLSAASFAYYRDLVFCCFLHTSIFVTFNKVCTSQYFLWYLCLLPLVMPLKQQLSGKTNLAGIPEMEENPGIEGRLGFTLLAVGQVNQSKTRNYDRLVSSQTSELLQAPVLSPIPSPESQKGNHLTLRYQMKLNP

SEQ ID NO: 648 - DNA, 25630 bp, Homo sapiens
acatccggctcaaccaggtcaatgtgactttccaagtagacacagcctctgacagccccttccttattctaccccttaccttctatcatgtggtagatgagaccagtcccttgaaagatctccctcttcgcagtggtgagggtgactttgagctggtgctgatcctaagtgggacagtggagtccaccagtgccacctgtcaggtgcgcacttcctacctgccagaggagatcctttggggctacgagttcacacctgccatctcactgtcagccagtggtaaatacatagctgactttagcctttttgaccaagttgtgaaagtggcctctcctagtggcctccgtgacagcactgtacgctacggagaccctgaaaagctcaagttggaggagtcattaagggagcaagctgagaaggagggcagtgcccttagtgtgcgcatcagcaatgtctgatgacctgttcccactcccccattcctctggtctcttttcctctcttccaatgccctggtaaggaatactacccgggtttactggagatcccccgaagcacccatcctccactccctcttctttaacccagtggcctgttggtagcttaggccaactggagtccaggttcgcctcccactgtcccctttccacttccccagcttctgccccaatacacatacctcccttaagccaggatgggggaaagagtgggattaggctgaagtggcttagaaggcctcagccatgcttggatactcacattaggaggaccatgtggttggaaggatagactgccccctacctcccaccaccaccatgaagtttggtgacttgaggctggagctccctctgttacctttccatctagcaagttcccaaaggcaagactctctctgatggtcactttgtggtctgtgctttcagaaatacaggaatctgatatcaacatatcctagggtttctaccaatctctgttgaaagaagccagggtttgccactgtgaagcttgatttctgctggtgacttctgaccataagctagaaccatggtcgccactgttttccctctgtagtttctcaagtgaacactctcaggatacccagttccctcatagcctctgttctcagagaattggagttggcccaagaaacataaacatataaccacccatatctatcctggattctgaactcttcaatttggagtgactaacacaagttgttatctaaacctttaaacctatcttccaggcagcccagagaagatctgtttccctgtgtcctgtgaatggaaggacccaagccaatatgttcctttgaaaagagtccagtacccaggccccatggaaaggtctgaaaataatattccagattacactgtacctggcttctcttcttcctttcctgctcagcctagatccttcttccttaaccccaactctttgggagaagggagggaaaatgcaagggccttcctctcttaacacggatgctcaagtaaaactagattcacagggcacagattccccagaaagttaacacaatcccaccatgagggatgggtaaattctcagatttccaaactgctgtacagagcctctgagaattggtgatgctttgttaaggtttgggcaggagcagaactctgtggctggcagccactattctcagttacacctcccagtgcccttctgaaaagtgccagctatttcattaggcaatgctggaaggaaatgaaattataccttctgatcaaataaccatggcttccctcagccattcctgagacttggtataaaatgaagaaatcagtgtcatctctactctcctctgccatgaggccattttcagacaagttaaaaagtagactttaagagatcaaactcagcctattccttgttccctggtggggtctgtggtaagggtcagggaagggcatataggcaccagagctttatccaaagccccaaatccctagagtgctttctggtctcactttggtaccaaggaagcctcacatagtggtactgcatagtcccactataagtcaagttgcagtttaaggtggtctcagccaattgttacaagctacagaatatatacatgcatctatgtacagagccttgcagagaaacacaaaattttgaggctagacccatgatcaccaccaactataattgcacaaggtcttgttatattgatctctcctcgaactcaactaacgatatcttgaaaacaaagacccttcggtgtccatctacagtaaaccccaccattaccttctagttggcataaaaacaagaaccacaaaaacttgaaaaatctgaaacagagaacagaaggccaagagccagcttctgcgttctcaactttattcaacattagacttaccttatttctttcagtgtgtagggacaagatgtactgctgtgtgtgtgtgtgtgtgtgtgtgtgtgtgtgtgtgtgtgtgtgtgtgtctataccttcctatccattggcaagttaacctccatctggtttatttggccatgctatgctttcttcccattcccctgctgtctattctaagcccccagactcaagcctctagactcttggatgaaacagtgagaagaaaacattttctgacttacccttttggaatctcctccattattacccaggctttgctttaagttgcactttaaatcacactgtcctattaatgcgatctggcatcttctcccacaagccccctacagggaacaactaccccctaccttaactctaaatggttctttagactatagtctgtctcctctgacctgaaatcctcttttaggcaataggccgagctttagaagcagccaggtctggtgagaaatgggcccccataccaactgtggacttggaatatcagcagagtagtaggcacagttgtaaaaaggggagatttcggtaggcacaggtgtaaaaaggggagatttcagaagacgggcgaaacaactgatgggggaagatacctggggtgagaagatgagaaagaaatgatgctgagggacctagtgaaatcaatgaaactcttgagtcttgcttaggctcgcaaacaagaagtggggaggcttgggaaattaggatatgacatatatgaaaggtttatctaagaagaaagaaacagagataatatatatatagaaagatgtatatagatgtatatatgcccaaatatattgaatgtacagaaaggaaatattcagagactttagcattgggggcagatatcttggcctggttatggggtaggacacccagattttcagacttacaatcagtggtcctggtttcaacatggaagtgagatagctgatgaaggatttcaagtctggaaatgggaaagggaggggtagaagttccttttcagaaataaagaggcattcatgaaggcttttgttgaatcctatgctactgataggaccaggaagagaggaactcggaggacaatagggaggggaagtcttggaaaatctaccacttacactgtgtgtccccatccccagcagcgtcctgccactgtagcgcctttttaaaataaataaaataaaataaagcaccattttgtttccctttcatgaagtacactgtatttccgtcttccacaggggtgggagctgctattgctctagcccctgaaatcaaactcaggagctgaacactttggtgtatgggaggcactaatgggaagcctcaaccctggaatccaaatgccaggactaatagctgttaggctgaagatctcccaaggtcaaggcccagccttttgtgtggctgcaagcagcccaaagagaaagccatggattccagaagagttccaatcctggcatttgggcatggagggtgatgctttggttttgatgcttctgaatgaaaatgaggagtggggttaccagctgctctaggggatggtgaagttccatgagaggcttccgaaatctctgcaatgtgcttcaccccattattcccccaacccctgtcagcctaataaaatcatccagtagtttccctataaggtctgagcagagaaagaaagccagttatactattgctacaagtccaggacactgtgccctctccatggctgctgccctggtcctttattcttgctagctaacctagttcacttgtacagtaacacactacctttgctggaaagttagcatgggtctccaggctcagtaatggccaactctactgatgcagaagtatttagggatgttttttccattcattgcactaaagactaaaccaggtcaaatttatctaggaaaaaaaaggtgtgtaagatttgttttgtttttgtctgttaaaaataagctactaaataaaatggatgactctttggttgtcactctagcttcttttaaaaagctaaaccaagactgtcaaggtctgaactcatagacctacctacccatgagtgtggagggttgaattcggctgtgctggaagaacttctgactgcatggccaagccccttctgtttttctctcatgctttagcgagttcctttcacattcggttttcatgggacaatactgaaaaaaactttaagacccagaagtatgaaaattggctcagcttaatccataaaagtcaagttgctttggatcctgggcattgtcccttttggccagtgatcacaagcccaatttcccttccatgctaccatgtagtcttgttgccagttttccttatatatcctcaaggttctttgtaagcttattcctttaatcaccaggcatttcttccctcaaatctcaaataaatggatttctcttctacccttgtctgtcagtagcctgagaaaggtctggttgttaatatccaggcctgaattttctctgatgagaggcaaaagaccctatgatcactgactcttgttccccagaagtggaaggagagagagaggaggagggagaaaattgggtctcttaccatgatcaataaatacttaagtacaacatttaggaaatactaggaatgaatcctaagacatatgagacatataagatataggacatgtattgttcctaaaaggcctaaaaggttgaagaaacctataaacttgttagaaaacagaaataaaacaagtagcatataacaaatataatgaaaagcaatagcaggtaccatgtactaatgccagatataacattagcagaatgttccaaaaagagtgagatctctgtgggaaacatttcacagggacaggaactaggcaagggatggtatcaatctaacatgtttggttagaatacattaaggttcaagaaaaatcagcaaacgctgagtccctattatgtggaaggtatcattcagctgacaaagaaatataagacatgatgcatgaatcaagggatgtacaatcatggcactttccacctgctattccttctgtggaactctccccactgcttgccaacttccaattttcttgttttttttttttttgagacggagtcttgctctgtagcccagactggagtgcagtggcacgatctcagcttactgcaacctccacctctcgggttcaagcgactctcctgcctcagcctcctgagtagctgggactccaggcacacgccaacacgcatggctaacttttgtaattttagtagagacagggtttcaccatattggtaaggctggtctcgaacccctgacctcaggtgattcacccatctcagcctcccaaagtgctgggattacaggcgtgagccactgtgcctggccaaccttcttaactcttacactatgcccatgtgagatcaaataaatccccttaaaagctagagcacttaccacagctgcatttgtatattatttgtcaatttatttgactaatgtctgtgtagcttactagacttcaagtgtcacatgaatgggattcatgtcaagtgtttggtcacgagtacagcccagcacctcatatagtgcccgacatgtatgatgtttgataaattagcaggagggaaagaaagcaaagagagaaagaaatggcctaaagtatgcagtggagcttgtatatcttgttaaataactataaaagagttagataacgagcatgacataattactattaaaaaagagaacagacaataaacatcactgttttgaggagggagagactatttcacttgttaaggtctaggaagaggagttgagagttgggttcaacattgaaaaaccaaatagcatttaagtaagtaaagagaaacaggtctctttgtaggaagtacagcatgaagaaagtgtcatgagaagaaagcacaaggcatattttgggaacagtaaacctaaaacagaggcattataggtgaataggatggaaagctaaggtaaagccagaaaatagggggactgaatatcaggctaaagtgttcattatttttttctttaggcagtcaggaaccactgaagatgtttgatggaggaaagaatctaagtaaagtactattaattaatatcaatctggtagtagaattgagacataagacattaaatcagttaagagatttttaaagcttgagggaaaggcaattgtcacagatcctggtatagtatagtataggtgttcgctacgtattatttgagttgttgaaggtctgaactaaggtgcaggatgctgggcatggaaagaattagaaatagattccaaagaaatgacaaagcaagacatatgaacaaaatctagtgaaaaagaaagtgattaaagtagtcaaggttctagcaggaaacagatggtatactcaaagggccagtggacatgttttaatgaagaaattatttgcaaaggtatgggcaagtttaataaatcaacaagatatggtgatgtacccaggcactcgcaaagtaggacgcctttaccagccttaaacctgaagggacagttactggaaccatgagacttgtacccaaaggagagagctatagcttcaacaggagccatggctttaggtgaggaattccagacactgccaaagatctgctagtgcctcccactggtctattctaatgggaagccagagaacaagggagattgagtgatgctacccatacagcctaacctcttggaacacagaacagggcaaaaaagatgaatagtggatatggaagggtaatgagagtatatgcagcatagtgaacaaggacaaggttcctgctagggaaactaaagttgagcgatccatgtttgtgctttccttagtcattggctctaaaaggatagaaatctaggagcagatagtgaaagggggaattaagaaggattgtaagtaacagtccgagaggtaatgaacagttgagcatttgaaaaaaatgtaactctttcagaaagaggtgagaaaatacaatccctaaacccaatgcaaaaagttcaatatggggtcctcggaccctgtgatgtatctcttccacccagaaatagtaactaaagttggacctctctgtccaatttgttttacagattccagtctcttcttcgttcccacaactgctatctacatctcactcctttgacttcagtgacatgcttagttttttttttattttatttttttattagttgtttccttatctgcctaaatttggtgcctcccatctctctactaggacagccatgtagggacagattgactgaaacctttctgctatactactgaaaccaatccagccacaaggacccttacttagttaatcctcagacacctacctcccatattttctatcttagggaactaagcctcacttatctattatttgcagaagaaaagaataaatcagaggtagaaagagtcacagtgagagagaatatccagaatatccagatgagagatcaataagagaaaacataggaaaattagaatttgtgatcaacattttattggcaagtcagccacataatgattaagatattctaggtcagacagactgggttttgagttctagcactgccactagttagctatgtgacttgggaaaattacttaatctccataagccttggttttcttcatttgtaaaggtgggaatatctaccttacatgaaaagtacttagcataatgcctggtacattgcaaatgagtcctcaacaaatccagctattataaataatagtaatcatcatcatcataatcatcattatatgagtggtgatgtgctgccactatatatatggctaatatactgcaaaaaaatggttagaattatcaatctaaggcatgtaatgataccaaggcatataaaaggacatagagctatcacaatatgaatatggaatatataagattaacacagttcatctccaagggataaatgtgaagtgtaggatggatgagcagcaggtagttctgggagctgcatgttcagactgcatgaagtcacctccttttccttattctagtctagaagacttcccctaggaagcaggcttattctataaaatccaattagtcagtatttactaagcatttaccatgtgcctaagactacaataaattacacataattgaaaaaaattaaggataagatataatttctacccccaagaaccctataatctcttgtgagggctatgaatacaatctaaaataaagtatcaaattctacaatgcggactatgtaagtgcactaagtaaccacggaaagggaagagctaatgggttacagtccttggcaagaaattcatggaagtagggttggagtggggtggggggagcaggggaccttgacatacataaaggatatttaaaagggaaaataactgggagttgggagcaatccaaagatgccactctagaaatattctggtaggaggaacctctaaaatcaattcaactttactgaatggctactagtactgtgttagatgttgaggtagagaaaagaacaagataatctctgataccgaagaattgaaagtgtcctgatggaaaactaggagagcaaaacaaacaaaaacagttattacaaagcagtgtgacaaatgctgtaacaaaggaatgaccagggagttctggagcactgggagaacttttagtagcatggcagggtcttctgtgtgagtgattttctggaacttagatcccgtccgccccagtctacctatcctcggacaggggaggggactggcatctaagtcattcattctgcgtgatgaggaagtgagtgggagctgggagctaacacttgcactgatgcctgaagggttgagtaggtatttgccagagtgattggagagcggatggcaactttgacagaagaaatagcaaatacagagatactgaggcataaggggctgacaagttaaggaattttgtgacgctttcctgtcttctttcccatcaccttcacctagggttgccggataaaatacaagctgcccacttaaatctgaatctctgattaccaactagtaatttaaaaatataagtatgcctccaatattgcatggaacatacacactcagcccccttcaactcatcctgtcctgtccggggcccacaaatccccggtgaataccggcgagctagtggagtaaagcatgagaaggcttatcttcctttcactcctacatttttcactctcggatctccagcccaggactgaaggatgtagcgcgcagcccgcagctcgctgctcgtcggagggttttcctctgaggactggaaatggggcgcgggaagagggcggggggcggcgggctgtcacttacaaagaaatctcactccactccataaaatcctcaagccagtgccggatttcccggcaagcggacgtctcccctcccacggaccggaaatcccgcctccgctggaagaagaagcggaagcgagaccgtccatccagaggaaggcaagtttttggctcgggcggctgagaagaccgcgcggggctggagacaggtagcagtacgggggcggggcttcatgccggatgtgatagtctgcagtcgtttcggttggcagcctggcgggtgggagatgcggcggccacctgctgcaaagaaccgaagggaaggttagaagtacgaaggcagtttggagctggggctaagcagctgtcgcacggtcagatcatgggctccaccaagcactggggcgaatggctcctgaacttgaaggtggctccagccggcgtctttggtgtggcctttctagccagagtcgccctggttttctatggcgtcttccaggaccggaccctgcacgtgaggtatacggacatcgactaccaggtcttcaccgacgccgcgcgcttcgtcacggaggggcgctcgccttacctgagagccacgtaccgttacaccccgctgctgggttggctcctcactcccaacatctacctcagcgagctctttggaaagtttctcttcatcagctgcgacctcctcaccgctttcctcttataccgcctgctgctgctgaaggggctggggcgccgccaggcttgtggctactgtgtcttttggcttcttaaccccctgcctatggcagtatccagccgcggtaatgcggactctattgtcgcctccctggtcctgatggtcctctacttgataaagaaaagactcgtcgcgtgtgcagctgtattctatggtttcgcggtgcatatgaagatatatccagtgacttacatccttcccataaccctccacctgcttccagatcgcgacaatgacaaaagcctccgtcaattccggtacactttccaggcttgtttgtacgagctcctgaaaaggctgtgtaatcgggctgtgctgctgtttgtagcagttgctggactcacgttttttgccctgagctttggtttttactatgagtacggctgggaatttttggaacacacctacttttatcacctgactaggcgggatatccgtcacaacttttctccgtacttctacatgctgtatttgactgcagagagcaagtggagtttttccctgggaattgctgcattcctgccacagctcatcttgctttcagctgtgtctttcgcctattacagagacctcgttttttgttgttttcttcatacgtccatttttgtgacttttaacaaagtctgcacctcccagtactttctttggtacctctgcttactgcctcttgtgatgccactagtcagaatgccttggaaaagagctgtagttctcctaatgttatggtttatagggcaggccatgtggctggctcctgcctatgttctagagtttcaaggaaagaacacctttctgtttatttggttagctggtttgttctttcttcttatcaattgttccatcctgattcaaattatttcccattacaaagaagaacccctgacagagagaatcaaatatgactagtgtatgttccacaccctctgctactgtgttacattctgattgtcttgtatggaccagaagagagctttgggacattttttctgaacattctaagcattctagtgaaagttcccatgttccaacagaacttaaaagcaatgtttgccttatatataaaagggacacaataattgaggtccaccttctaggaaatcctaggactcgtttatttgggacatggtgggaataaaggtcacatattggaaaatggaaaggctgatgaaactatcagatactaaaacattcttaaaatagaggaatatagttagagacatcaggtttaagccagtatttgttcctgttttacaatgcttctgtcttaagctgtgtcttaacttttaacacccatcttttctttctaaagctttcctgacagctgtgaaaatccaaaaaatattcttaaactgtgtatggtggcccttgcctgtagtctcagcactttgggaggctgaggtgggagggtcgcttgagttcaggagttctagacccacctggggcaagatggtgagacctagtctcaaaaaaaaaaaaaaaaaattagccaggtgttgtggtgcacccctgtagtcatagctgcatgggaggctgaggtgggagaattgcttgagcccagagcaagaccctgtctcaaaaaaaaaaaaaaaaaaaaaaaaggaaaggacaactttttagatagaaaagtattaaataatactaagatgcttagtagtattattttagagagttttaaacttctatattaaatgtggggtcttacaagataatccaaagactttgggaggccaaggcgggcagatcacgaggtcaggagattgagaccatcctggctaacacggtgaaacccctctctactaaaaatacaaaaaattagccgggcgtggtgggtgcctgtagtcccagctactcctcgggaggctgaggcaggagaatggcgtgaactccggaggtggagcctgtagtgagccgagatggcaccactgcgctccagcctgggcgacagagcaagactccatatcaaaaaaaaaaaaaaaaaaaagataatccaaagaatttaaattgtaatcatgtttcatgtatttgttttattacttacttttatagcacttagtcccagtggtattagactgctatttggtttcatacaaaaaggattaaatttaaattcattcatgtttagacttgagttattacatttttaaaactatcatcttgcctttaatgtttgtggtcctacacaaactattagtacatttcagtatcctcttacccctttgtttttaagtttttgattgctaaagcaagacttttttcttctagaatttaagtcaaccaagtgttatctatgttgtaaaaatggataatagtagattttaggtgataaaacaacttgttagtaagacatttcctagcttaaaaaaaaaaatcaaaaattccatgatagaaatgcagacctgtgagggaaactcctgaaaagcataagaagcatcccagagagccatgggttttctagaccagagaatttagagggagattgtggaactgaggcttaggtggtcagatcgtttcccttatcactgtaatatttctgggggaaaaatgctttctgagttgtttaaacaagcatccttacattttttttttaattaaacagcctgtctaggcttgggattccctaatactacagtagcagtatatgaatatgattttgtgattgtgttttttaaaagataagtaatttgatgaactgttcttttgcagtcagaaaacactcacaaaaagacaaaaaaagttccacagtattatatttcatgtcagttcaggcctaaaatcctttgcaaataagatgtttataggctggtcacaattaacaatgttattattggcagcacttcttggatggataccttttgggacctttcattagaaagagggaaagaatggggtggttttgtatgggctcctgtttggggtaaaaatagcagagtcagttgctgaggacaatgaccttccttataacatttagtttcatacccatattaggtcttgtcttgaggaccctttatatgtgcttgtttactagtggccttccagccatagcattcttacctttttttcctattctaagaattaaaaaaaaaaattatagagccagcaagggaggaggcaggaaacagaaatcgaatttcatcattccagtatagttgtccctttttttgtatttctgacttggttttataattatatttacttactaattattgttttttaacattctttattgtggcttactcttcatacttagaattgaaattgttggacatcacatgtatattcacattataaatacatcattcttccactgttagacctttagattgcttccagtttttaatattctaaataagactttcaacattttctgtgttttagctcattctcttaggacattcttagaagttagaaacatttctgctgggatcgttggagggaacttcaaactttggaatctttcctgcaagaaattctttaccaaagaaaggcaggtgtttcttaaagggatgcaaaagatattttgcactttgtatgttccaaaacatttagtaagttaactaaaaaaatgagttaatttggtttcttgggggattttaattttttaatttgttttctggttatgtaaaaaaaatgttttttttttgcttcttatcacaatccttttgtttcctttttaatcctttaataacaccttcaaattttataagactttggcttatttcctatataattctttttttcttataccacctcttaagattgatatgttcatttgcaggtaagcattaattattagataaagagggatgattctcaagattgtgtgtgttctgaacagagggaactacatgacattttcttctgtaattgcctttgtaacgtctttagaatgtggttcctaaatattcctggataaattctcttgataggcccattggaaaggctaatactcccacccagtgctttgttccttcctggcaaaagaattcctaaaaccactgattttagttactgacttctcaccatctggactcttacaagatgtttcagaagttgtgtagaacttgtctttcagttgacttgtggctgaatttactgttacttctctaatatcagttgttttctgcattaccaccctctcccctaaccatctgtactatgaatggaaaaggaaaaagatggaaaaattatacctaggattgtccctaaatgcaacctcttggttccccccacccctcatgttttattataaacgattttaagagctgggcatggtggttcatgcctataatcccaatgctttgggaagctgaggcaggaggatcacttgaggacaggagtttgagaccagcctggacaacatagtgagacccccatctgtacaaaaaaaaaagtgctacttgggaagctgaagtgggaggaccacttgagcccaggaattcgaggaggttatagtgaactatgattgtgccactgcactccagcctgggtgacagagcaacaccttgcctctaaaacaaacagctccaactattttatttttttatttttctgagacaagatgttgctttgtcacccaggctggagtgcagtagtataaacatggctcactgcagccgaactcccaggctcaagtgatccttcctcctcagcctcccaagtagctgggaccacaggtatttgccaccatgcctggctaatctttattttttgtagagacgaggtcttgctatgttgcaagagggagatcacttaagtgatcttccctcattggcttcccaaagtgttgggattccaggcgtgagccactgcaccccgcctgacctaactattttaaacactactcatattgccatcatctaaattcaacaacaatttgccatatttgctttatgtatatgtataattatatatttataaaattttttgaaccatgtgaagttgcaaacatcattgaacttcaccactaaatatatcagcatgcatctcctaaaaatcaggtattttcttacaaaaccataattctgctatctattatgatttaacattctgtcattttcaaatttcttcaggtgttttttgttacatcttaaagaacagacgttcttggatctcaaagattccgaggaaggaaagaacatggtggataatccataattaagaagtttgaatcttttcctagtcttaaaaacaaagtgagaactaaaggggtttaccttccatcaaagttgaacaaattaattcttttgtgtgtcatactttctgtctctctccctaaaaacatgggggtggtaatctctttgttttatctggtaggttttccagataaaagattatacaggtttggaatcttaatatccaacccccaactccaagccctgccccaacaacaacagctaattattttacatcttgatgatggtaaatttttcatgattaaccaattttgggcacctattccgccatatatggttttatttaattttcacagcaacacttcaaagttgatattcatattctaaatttatagatgaacgaagaggctcaaagattaaacaacttgctaataagtgatttttacccatgctttttccattatattatgttttggatttttccagagtacccaaacccagcagatgcatactgctccaaaataaatggaactcaatactggctctgtcaagtgtctcttgccaatcaattgtccttctaatcttttgaggggcagttctctcagttgtaccaagtcactgtcatccccaaacttttcaatgattccaggcctttaacaactcccctccacctccaaaccctctctcaccaaattgtgtaatttctttgtttactgctggcttcatcatgcacttttccttcatagcctattttaagaagttgatttgctgaactgctttttagccaagctatttgtaaatcaagctacacaaagtatgtggccataatttccaaaaggcaaatgatcattgttcaattgctgttgctctgcagtgtgcattcatgcagttaaaaattgtactgcattgatagtacggcatcagagaatagatcacttaggttcaaatcccagtgcatgatcctgagcaagattatcatatctagatacattagtttttatctgtgaaatgggaatgatagcacaatcttcatagaattgttggtaaggattaagtgagttgatatgctcaaagtgtgcatgctggcatagaacaagtcactgtttacaagcctttaaagaaggagctgttctggcactgtaaacttgaaccttttttccccaaatctaatggatataggcaaggaaattatatttatataaaataaatgtttgactacctttgatcataaactttattctcatcttgacctgttcctttgaaaagataataaatactgatatgtgaaaaatgtatggacagattattcagatgtctggttgaggctttacagttttgtatatttctgtcagacattaagctgactctaagcagtggaggtttggtttatgcccctaaattacacagcacttcttttctccattgtatcgaggggtcattcaggggttgctgttctggagatggaagcacatgtctcctgcctgggtcagaagcgtcacaatagcacaagcatttattcagcactggcctaggagaaccattcatttagtcaaaacaagcatttatattcattatcctgaacaaaaaccagactaaatgagaacatttatagctgctcaggcactctgctaattgctatgtctgctagacaaagtgaaatgacacttacagtgactatttaaaaataatttggagcatgaatatttgaagctcagttctttttacaaaggaaatgtataacctttgctcttcattttttttggcagttatttatagatccaggccctgtgtcaagttctgtaatagatgaatagacagtttatgctcttggagagttaacagtaaaaacagaaacagaaacacaccccactgataaagtgttatataacaccccattaagttccacaatgatgtgatttgtgaaatggaggggcagtagggcaaggtagaggatatttttatttgtatgttacagataagaaaactgaactcagaaacaagtgactttccaaggccaaatagctggttaatggcaggattggggtgggaccccagatcttctgattctaatcttttttttttgcaagtcctttttagtgctatacaatgacaggtgattacagtggaaaacctcacttatttagcaaatgtcattcacttagcaaactacttagcaaaatgccatgagtatcttctgtgtgccagtcattgttctaggcatcgtagatgcagtgagtgagagagggaggcaaagaccctatctttatggatcttacattttcatggggaggcaaagaataagcaagtacaggattgtgatgatgatatatcataaagaaaaataagacaagctaaggaagtagagagtgatggcagtgcggagagtggagtaggtgcttctttagatgaactggttaggaagatactgtgatgagagggcacttgaacaaagacctgggaagtgaatgcatgaccttcatgcaaccatggtgcagggaggtaagggaagagcatttcactcagcatccctccctgctgagtgaaagcagtgcggagatcctgagttaggaatgagcttggcaggtttaaagaacagtaaggcaagtattactagttggagtgagcaaggagcaaccagaatctaattcacattatccagcagaacgacatgaatgctagttgaaaaatacagttaacattagcatttttactggcttataatgcaataactttgagcccaacctatttttttcctctggcttctgagcacatgttaatatgtaaggaagatgaaacatatatgtaaacaacttatattttagtaatgatacaaaatactttcacaaattttgtgatgtgggaattttttaaaattccattttcacagatgagacccctaaagctcagagtatatgcactttgcccaaggtcagagttagtatgtgaggcaggaatagaccctagatcttctggagctaaatgtactactcatttctctgtactacccttatcatttagctatggtgaacagaagatgaaccactggattctagaaagcagggagttcaggaacaacgttgtccaaccaatgattcattcatctagtaaatacttaggagcctactttgtgccaagcactcagctagcctgggggtataaggatggttaagactagagtcctgcctttaaggaactcaccagtgccataggagactggtggaaagaggattataactcagttataaatcagtagctagagtaaaatacacctaaagtagttcactaatacattaattggacaaaactagtgcagaacctgatatatactaggtactgagatgtttgttatcttacctgtttttctttaacattggtaagtactgggggctttctttgaaactttcctgcttaaaatcagtcagtgattgacaggctcctttgcacagtgtgaatggcaggggctgtgaaaaagaagagaaaacagtttctcagtgcctgtcatttctaaatgccatcagtatccacctaattttctaagctagaatcttataatcacctcctattccttcttctccttcacttgttacccgccccacatctaatcagtcactaaattctgtcagttctaccttttaatgaccctggagcctgctggcatcttgccattgtcatttccagtactacatttcaggccctcattatctcccatctggaatcgatagctcctgactggtcttgttgcttttcatctctctcgcccttcattccacctctcatttatcctccccagtgctgcgagagtgtgctttccaaagcagatctgatcctgccaccattctgaaaaaaagcatcctgggggactatgtgacctgcagaaagacgtccaaattccttagcatcctccatcttgcaccaatttcccctactcagcctcactctagcctactggataatgcagtttcctgaagttaccacactattaagcctttgcccatgctgggtttgtgtgtgtgtgtgtgtgtgtgtgtgtgttttgagacagagtctcactctgtcgcccaggatggagtgcagtggcatacactcggctcactacaacctctgcctcccaggctcaagttgattctcatgcctcagcctcctaagtagctgagattacaggcacgcggcaccatgcccagctaatttttttgtatttttagtagagatgggggtttcgcgatgttggccaggctggtcttgaactcctgacctcaagtgatctgcctgccttggcatcccaaaatgctgggattacaggcatgagccactgcgcccagcctgcctatgctgttttttctgcctagtgtgcatatttctctcctggccttcagatgacctgtcactcgtttttcaggacccaactcataggacacttcctctttcaagaggaatgccagatgagcttttggagagagaaggttagccattaagggggaaaaaaagaaagatagggccagagttgtaacatttggtaaactctgttaatggacttgatatgttatggttatttgtgcatttgtctctttctctcagatttactgttttgtgtttatatccttagtatacagcataagtgctcaataaatgtttgttaaataagtgaagtaggtatggggagggaacaactgtttattgagcacctattgtaagcctatatgcttttcacacatcatctcatttaaacctcaaaacaatttttttgatttaagtattatttgctaataagaaacagtcgcagaggacataaatacttacctctctccccacccacaaaggttatgggtttgtgaggaatggaactaaagttggaacctaggtctgtctgactccaaaactttcctctcttgtgtgattctcagacagggacaattttgtcccccctttctggggacatttggcaatgtctggagatattcttggttattataatggggatgttactggcgtctagtgggtacaggtcaggtgtgctgctaggcatcttccaatgcacagaaaagccccacaacaaagaattatctggccctgaatgccagtagtgccaaggttcagtgtcttcatctgtttgagctgctgtaataaaatagcatagactggatagtttataaataacagaaattcatttctcacagttctggaggccaggaagtccgagatcaaggtgccagcagatttgatgtctggtgagggatacttcctggttcatagatagccatcttctgtttttgtcttcacatgatggaacgggtaagaaaactcaccagtctcttttgtaagggcgctaatccccttcaggaagactctaccctcatgacctagtcacttcccaaagtctccaccttctaataccactaccttgggggttagttttatttcctttccttccctttccctttccttttctctttaaagcagttgttaacatttaatgaacctcctgttatgtgacttcaagccaccaggagaaagctccccccactgaatcttctcctgagctcttctgctgaagaatttggccttcacgatgacaggctggtttgggaacttttcccttcccagaactctatagtagcccgatggcaccacatcagtgatgggagctgttccaggcttgtttttagcagcattcacctgtgtctgcttcctgaccaaagcccacaatttgtcaaggttgacagctgggtagaagctcaggttcctctttaggtggtaatgcctcataccaactttcctaaagtaacctgggtgacatttgctgaagtcgatcctgtggtgatgcatgccgccagcattgccacggccacctgggtgctttcagtgcttgctgatgcggcagaggctgtggctcacctggctccaaaatttctgggtcctgtggtgactacatttcctcagtctggatggctgtgtggaaaaagaagcttagtggtaaggcctaaggaagaaggagcaggggcgatgcttgccagcctgagatgggcctgtaggcctgtgggccaaggacctgccatctggagcatttggcaaagttgaggggcccatgtgtcttcgagacccgaatctcaggctgaacagggctccgccctggacccacctgagctgcactgccctgctgacggtcaggtgcggcctggaggtcccgatcaaggttgagggtgggtggctgagggcaatgggagtagagcttagggtccctgctaacaaggaagtggaggcaagaaagggatcctagttttcaacatttgaaattttggaggacacagactttcattctattacattgagaaatcctgctctattccatgttgactctaatgaaaagcaattcatcagacaaaataaatgcatccatgaccccatggggagtcagattgggcttaagagaagtcctaggggcttggggccattcatgagccactggcattggtaggatagaaagactattctgtctagtccctgacctgcctttgatcgtatggttcttactctactgcatccacccggtccttctgtctcttctccacctttccttttcttcagtagactctaatttagcttggggaaggcaacccagaaagctccagcattttctaacctcttttctaattagaagatagagttagcatataagaagctgcaagtttcaacttgacaatatctctagaactgagaacagggccaaaaatgtcaccctctgaaattgacagtaaaatagatgagattattcactgtgataatcttcccagaaaataacccacctaagaaattcttggtaagtgtgctgctaagccttggctgtttcctaatctcagccagggtccaagaatgcctccctgtaaagaaaagcatttaaaacgtaacttgtgcattaaactagtaatctaggaaattataaagtgtttgccttggggaagtgttctaatgggggacacttttaatgggtcttaagtgtaactgcctataattgttggggatgctttgtgtttttgtttttctatctctcaacataacaaatattaggagagaggaaccaggtttattttactggtgtctggcagcaaaggcatggatgagtcactgctagtgaagggtaggaattagtggtgtgtgtgtatgggggtggcggatggtcacagaagtcttttccttggtaaagtggttttaatcagaagcccataaaccttggttgtgtgcaaaatgtgtgtgtatttgtgtgcattttttctgtaaaatgtgtctgtagcattcaaagggttctctgacctccaaaaagtaaaacccctgccttggtgattagaacatagctaccagggacaatgaaatagaagataacccaggaaaggcaagggaagtgagtgcctcgtaggagagaaagggttcattttgagctcacatttattgattgtgcatgcagaaggcctctttacatacataaataaggttcctaattttataacaaatattgggagcccagcatgcagtggaaggatgaactgtgagaaaacatcaaggcagaacaaatccagcctggtggatgctggagaaaagtacaaagggtgatgagaggacttggaaagaatgcagtgtggggagagaaagggggagagagagagagagagaatatgtgtgtgtgcacacgcatgcatgtgcacgcatgaatatgaggtggggaagatgaatattaagttgttctacatatgtcaatatccatgctgagtttagattccacagatgccctggggtagccaatactaagagaatggttctgtaaagctgagttctaggaagctaaccagacaattaagaagggattcttctaacgttcttttcaattttaagttacagaaaccaactttagctaaaggacttaaaggatactggacaatccataaatccctaggaaagaactgaacaaggaagtctggggaggcaagagattggacagtttggggacttccacagcaggtgaccaactccagtgacctcgtttccagatctctatatttgggttttaaattaacaagagaggagttagctgttgggacttgtaccagagaaggggaaatcatgagccaaggaatcaccttggttgttgaccaaagtcattatcatattggtttagagcaggtgtcctatcttgaaaagtgtgcgagactaatacccaagtcttctgattgccacttacacgcagcatgctctcaaggcacattcacaatttcttaatattttaaaaactaattaatagggtttgggtaggaatagagtgggggactttcaggcaaagggaacaaaaagtgcagtggccttcaggtaggatgaacttggcatcccagaaatagaaaaggctcttgtggctagagaattatctgcaaggagtaaagagtagaagaagggcattcagaggcttgattgcatcatggtgagaagttcagaggtttttttttttgtttgcttgtttattttcctatgtgcagccgaaagccactgaagagatttaagcagatatgaattacattttttgaaaaacactccagctgctcaatggagaatggattctgtgaaggcttgaataagagtgacagtactagagatggtaagaagtgggttgattcagcatgcatttttgtatcttggggagagaactggcagaacttgttgacggatttggtgtcagggaaaagaaaagggaaatccaaagtgggtgctaggcttttggcttgggcaactagatggatggtaatgttcttcactgaattatgaagactgatggaaggagtagttttagggaggaagacggtttggaatcgatcgtgtcaagtgtgagatgtcagcagtcttagtgaggaagtcagagggacagtcagatatatatttgggaatcaccagattataaatgttgcttaaagacaagggcctgggtgagattgcttggggggcctaagaccgagctctgggcactgtaatattagataatctagctgggcagcaatgggcaaaggaaactggggagaagtcagttaagtcagagaaatgctgtattatttttaaagtgtgggatttttttttttattttttttgagacagagtctcactctgttgcccaggctggagtggagtgcagtgataccattatggctaacttcagccttgacctcctgggctcaagcgatcctcctgcctcagcctcccaagtggttaagaccacaggtgcatgctgccatgcctgtctaatttttgttttttgattttttgtagagatgaggtctcactttgttgcccaggctggtttcaaactcctaggctcaagctatcctcctgcttcagcctcccagagtgttaggattacaggtgtaagccactgcacccggccaaagtttgggctcttaatttatagttctttatagatgtttgtaatttctctatatgatagtttattttggacacttgtgttgtttatgaatctattctcatattagtctagtaaatgttacacactttgcagctctagatttttccttgcttaaattgttggcaaaatctctctagttttatctttctgtgtgtttgaggggctgggagccatcccctgttaactgggcatggaaggaaggccaagtctgccattaagtctctttttgagcctgtatatatttgcataaggtccattaactatattaagtggtcatagataaaccagatacttataggcaactctaataaactacatgcagctttgtagattatttgcaataaaattttaattttaacaatcctttaattgttaaattaaagcctgcctaagctctcttgtagtattttgcatatgtctggggtggatctctttattggcttttggcatatgcgtttggtttaaagcagtccaagcaaaacataagtagaaaggtaggcttactgattatatatggtatatatatttacacacacacacacacagagtaaacagccataagaactatgtc

SEQ ID NO: 649 - DNA, 1049 bp, Homo sapiens
cctggcgggtgggagatgcggcggccacctgctgcaaagaaccgaagggaaggttagaagtacgaaggcagtttggagctggggctaagcagctgtcgcacggtcagatcatgggctccaccaagcactggggcgaatggctcctgaacttgaaggtggctccagccggcgtctttggtgtggcctttctagccagagtcgccctggttttctatggcgtcttccaggaccggaccctgcacgtgaggtatacggacatcgactaccaggtcttcaccgacgccgcgcgcttcgtcacggaggggcgctcgccttacctgagagccacgtaccgttacaccccgctgctgggttggctcctcactcccaacatctacctcagcgagctctttggaaagtttctcttcatcagctgcgacctcctcaccgctttcctcttataccgcctgctgctgctgaaggggctggggcgccgccaggcttgtggctactgtgtcttttggcttcttaaccccctgcctatggcagtatccagccgcggtaatgcggactctattgtcgcctccctggtcctgatggtcctctacttgataaagaaaagactcgtcgcgtgtgcagctgtattctatggtttcgcggtgcatatgaagatatatccagtgacttacatccttcccataaccctccacctgcttccagatcgcgacaatgacaaaagcctccgtcaattccggtacactttccaggcttgtttgtacgagctcctgaaaaggctgtgtaatcgggctgtgctgctgtttgtagcagttgctggactcacgttttttgccctgagctttggtttttactatgagtacggctgggaatttttggaacacacctacttttatcacctgactaggcgggatatccgtcacaacttttctccgtacttctacatgctgtatttgactgcagagagcaagtgttttttgttacatcttaaagaacagacgttcttggatctcaaagattccgaggaaggaaagaacatggtggataatccataa

SEQ ID NO: 650 - protein, 308 aa, Homo sapiens
MGSTKHWGEWLLNLKVAPAGVFGVAFLARVVFYGVFQDRTLHVRYTDIDYQVFTDAARFVTEGRSPYLRAYYTPLLGWLLTPNIYLSELFGKFLFISCDLLTAFLLYRLLLLKGLGRRQACGYCVFWLLNPLPMAVSSRGNADSIVASLVLMVLYLIKKRLVACAAVFYGFAVHMKIYPVTYILPITLHLLPDRDNDKSLRQFRYTFQACLYELLKRLCNRAVLLFVAVAGLTFFALSFGFYYEYGWEFLEHTYFYHLTRRDIRHNFSPYFYMLYLTAESKCFLLHLKEQTFLDLKDSEEGKNMVDNP

SEQ ID NO: 651 - DNA, 47286 bp, Mus musculus
  misc_feature (1)...(47286): n = A,T,C or G
gaaggggtccctggggtgtcaaccaatgacactttgacagaacttctaacatcggacattgagccttttaaaatggcttaagtcttagctacaggcagtgcaatgcgtcataagacacctcctgagcttgaagcctggagcctgataaagcacatttatttcaacatgggcgagggtggtgatgtgacccataggtgttgtaagtctcatggctacaccatgctcgtctctcacccctcgagatctgagtctgctgtccacagtcatccatatcatagcctcggattttggtcggaggatagtgacctatctatggatagtggctaattgcacaggtacaacttctatgacctacctcgcgtacctaaaagcaggggtggggagccatggtggccatggttgggacaaagagctcgctaaagtgattaaaaaaccttcctgtcagctgtgtccctttacagccgtacacagctcaagcactacagacacttttaggagagtaattttagattctaagatgttccaaacaccaaataggaaagatatttttctaacttgggcatgttaaacagctcatagcagtccatccaaaggagctgggaccattaccagggcagagtcattacaccagacagaagtatttgccagggacctggaacacagcctcctgtccctgagaggctgaggaaccccagccagctggcgccaacatttccagtcgtctgcttgtactgcagccatgtggatccttactgaaaagcctgagatttctcaaaaagaaaggggaaaaaaaaaaaaaacccaaccaaaaaaaaaccttaacagtctaaaatttcctgaaaagcagtgcacttgtgtaggcctgggggatgctcagtctccaaactgcttgcttcatagatgcgaggaccccaagttctgatccctagtgccatgtgaaaaagccaggtcttgggccaggcgtggtggcacatgcctttaatcccagcacttgggaggcagaggcaggcagatttctgagttccaggccagcctgcctggtctacagagtgagtcccaggacagccagggctacacagagaaaccctgtctcggaaaaaaacaaaaccaaccaaccaaccaaccaaccaaacaaaaaagccaggtcccgtggtgcaaacctgtaaccccagaactggggaggcagagacaggagggtctctgggcttcctgactaatcagcatggtggaaaggatgaaggccatgagagaccctgcctcaaagaaacaaagagcaaagacacctgacaacaacctctcgctttcccatgcgtacgccttcaagtgtgtgtttaatcatgcgtgcacacaagcacacgcttatttccccctcactagcctacacccgatttaaaaacgcacaaccaccatagcccggcctgatgtttgttttaacttttttttttttgaaatgtgttttcgaagtttttttcactattccatttgtgtttacaaaatgagtgcattaaagatcttttagtgagaactattaattgataaggaaatactctgaaatacatttgaagtatcttgcttgaggtgcccaatggaagcagagggttcaagtgtccctgcctcctgagtgcaccttcttttcatcctgcagcttcatcaatcatggtccctccggctctgcagtcatagcgtccaggaatggagaggaaattacttccagtcattgctactctttgctctggtttggcaatggagtctttccccaggggaatcccatgtgttacagctttggctcccagttggtagtgctattaggagggaataagatcagcactgctactgacccattcctctatatgtgaggagaacgcagccttaatgagcctagaactttctgggctattaacaggcagagcctggttggaggaagtagctcgctgggggtatccttttgaagaatctatcattatctgtttacttttagaaaattattgggctggtgagatggctcagcaggtaaaagcactgactgctcttccagagctcctgaattcaaatcccagttcaaatcacaaccacctgtaatgaggtctgacgccctcttctggtgtgtctgaagacagcaaggttgtagttatttataataataaatcaatcttgggactaagcgagcaaggctgaatggagtgatcagaggtcttaaattcaatacccaacaaccacacgaaggctcacaaccatctctacagctacagtgtactcatatacataaattaaataaataaatctttaaaaaattacactattcaactttaatcccagcatttgggaagcagaggccggtggatctctgtgagttcaaggccagcctagtctacatagagaattccaagaaagccaggatgtgtattagtgtgaaggagtcagatgcactggaatttgacttacagttgttgtgagctactctgtaggtggtgcgaattgaacatggaagagcagccagtgctctcaatcactaagccatctctctagtcccctggctaacacaatttaaaatatagttgaaggctggagagatggttacaagctcctggtcttctagaagacccaaattttccgggcggtggtggcgcacgcctttaatcccagcacttgggaggcagaggcaggcggatttctgagttcgaggccagcctggtctacaaagtgagttccaggacatagagaaaccctgtttcaaaaacaacaacaacaacaacaaaaaggaagacccaaattcagttccctgaactgacatgatggcttgaaacccactgttccagggatctgagcccttctgatgcacatagaggcattcaggcagcacactcatctatagataaaataaatctctccagggaggatcacacttagatgtctcggtcgtttctacattttagtgtctcttcaggtacatcgccaagggttgataagatttttgttttgattatagggtggctctggaggttctgtgaatggaatttcaatctgataagataaaaccaggagccacagaggctgcccagaggagttaggatgtgttgttcactcatataaagggagtttctgataagattcctagaaaattgcagggttttagctgggaaaggagaaaggatttaagcaaaagtcacttgtgggtgattcttgattctcagcaagtgaggggctctcccttcccatggattcaacattttctctgtccttccgagagtgcgtgtgtgtgtgtgtgtgtgtgtgtgtgtgtgtgtgtgtgtgtgtgttctaccagaagcaaaatgtttttctatccagtgcctcgatcccaacactcaggaggctaaggacagagggtgatgagtgcagaagtaacctgggttagagagaaagtgagtccccacctcaccaaacaaacgaacgaacggatgctacacacaaaagagagactgggggagtaggaaggggtaaataggggtttggaaatatggggtaagtgaaaattatcaaaatctaggagaggagtgggctggccttcttatgagggcagggagctagggggctctgtgttctagtgtttctggaacaaacagcaagttttcccatgagcctcgagttttctcagcttgacgctttaaaggaggacaagctgattctattgatgtggtctgggaccgcttgcccaagcctgtaagtcaaggctaaggcctagtaaagaagaaagctcaatcaagacccccagagcaaaccaaacaacagcaaagatcaaaaacaaaaaagagaggagaaagaagaaagggaaaggaagagaagtgctaggaagaaaaaagagaaagagttggaggaagaggacagaagttggagagtgcctggctagagtgtagtcaaggagagaatttttgtgaggagcgctttgggtagttagggttggtattagtgagttatgagtgtcaaagaggtaagcaggaatgtaaggaatgtatgttgctaatccagcctgctctgtgtgttggcatcaagacctcccaaacctatgacatcacataggccctgcagacctgttgccaagacaacaggcaccatattcccagaattcatttggctcacctcccacctttacctgcattatgtcattttccatataaataaggggaatgcctcccctctctctgcccaccccccatctcccatctttcccaataaaccctctcacatgtggaactgtttgggcccagggtgctgtgttcagataccagccacttctttaacacatcagtgtggaaagcaaacagactgagaacttagctcaggccttgctactcaggaggcaggaggttctcatgtccaaggccagaactcattcctggctacagagtgagttccaagccaatttgggaaacttaaatacaagcctgaggatgtagcttagtggtaaattaattgtctagcaaacccaaggtcctaaatgcaatctgtccctattattaccaaatgaaaagtcaaaacagaccgaaagaagatacacaaccatgcatttttttttcctgctgaaatatttagtgctgttaattcagcaatttaactttcaaatgaatctatattgtatttcagatatattttaaatacaattttttttttcccgagatattcacaaaatctagtcactttatgtgtgttgtcttagtcagcttttagttactgtaacaaacacctgagctcagtcatcctgccaagaaagatttgctttggcttatggttttagttcagggccagttgcccttgggcctgtggcaaggcagtgaaccggggatgctaagtgtgtgtggggcaaagttactcacctatgtcctatggtgaggaagtaaaaaaaattaaaaaagaggtgttcgtggtggtgctcacctttagaaacctggctccaaaaccaaaccaaatcaaaccaaaccaaaccaaaccaaccaaccaaccaaccaaacaaacaaacaaacaaaaaacccaaaaggaaaaaaaattaaagaagaggagaaagaaagtgtggttccacagtctccttaaagtgaacacttctatcgcatagaactcctagacttgccaggtgttgtgtgaatgtctttaatcctggcacttgggagacagaggacagcctggtctacagagcgagtctcaggacagtcctggtacacagagaaaccctgtctgagaaacaaacaaacaaacaaaaaaaaaccaagcaaacaaacaataaccaaccaaccaaaacaaaaacaaaaacaagaaaaccgaataaaaactcacagactccatctcttaaaggctctcccccacccccagtagcatctcaaggttctaacacatggaactttggggatacttcccaaaccacagcatgtgtgttatggataaaatagttcggggccctcagatgacccttcccacataagtctagtgacccgagttgaactcctggagtttacatgcatgtggaaggagaaaacggattccacaaaagttgtcctttttttttcacatggatgtgctgacacatcattataataacaaagttcagtgcattattatgccctaatagggtggttttgttgttgtttttccttcttcctaagaccgggtttctctgtgtagccctggctgtcctggaactcactctgtagaccaggctggcctcgaactcagaaatccgcctgcctctgcctcccaagtgctgggattaaaggcatgtgccaccactgcccagcttcccaatagggttttttaaagacagttattcattcagtttcattttgctctttttttccttccttccttccttccttccttccttccttccttccttcttccctccctccctccctccctccctccctccctcccttccatccttccttcccttcttctttccaagacagggtttctctgtgtagccctggctatcttgaaattctctcaatagaccagaatggcctcaaactcacacacctgcctgcgccttccaagtgctaggactaaaggcattttcaccaccctccctggcaagaatttttttcttgtttcttttttaggaattcactcttgatacagtttaactatcagttaatggatgatcttgctcaagttaatgaagagaaatgaatgaagactcattatgcaactatgacttttaatattcatcttaaaatattttatcatcaccctcaaacattttaaaatagatttaatcacactgagtattgtattaaaaatagtaggaagattacagtgatcttgtgcataaggtaggtattctgtgacagtgcctggaagggaaggcacatgtgtggttctccaggatccacaatggggaactgaaaggaactgtggtcagagtcggggaggaagggacccaagggtgagaggccgggtgaagtcaatgcagtttccctgaggagagcagcgatgagtctgctgctcccaaatgtggataggtgttcacagctattttctcatgacctgggatcacccacccagcacaacagaggcaccttgtactagatgtgatgcttggcaatggttaggaggcagctgagcccaggttggataaaggggaagttttgggtccttggctttctcggatcccgggtcagtttctatcccagtatttatgtgctcaatgtgatcctgggtcagttttattattgtccctgagtctcactttctctacactaggaaaggagatggtatctactcactgtgataaaaaaatgcaaatgacacccagaagggcttcaccagacaccagccccaccccgactcctgctgcgatgctctcagcggctcccagtgggtgtagtttagtggtggggtttgtaaaaatcttgggagctagatagatctcaatggtcttcattctaagtgaaggcataaccccgtagccattggttgaactattcagtcacgctgtgggtggagccagagcttcactaatggcggccctgtgtggatgtgcttgaccctcccacccacaccttagctcttctccctccacacatggtggatgggtgggtggagactgtctttgggaggaggagcagggtcatacactgctgacacagtattccgaatcaggacctgaccgcctcttgagatatacagtaggtttatttttctcacttttttatttttggtttttcgagacagggtttctctgtatagccctggctgtcctggaactcactttgtagaccaggctggcctcgaactaaaaaatccctctgcctctgcctccggagtgctgggattaaaggcgtgcgccaccacgcccgactggtgcatggttttaatgccagcaggcaagcagatcattgtgagttcaaggcctactgagaggctctacataaagagggtacaaaacaaaaaaagcaaaggccatttagcacagttgaagaaaacgccagcaggaccagcggcagcagcaagagacacccgaggtataggttttacacatccactaggctgggggagaatttccctgaaggagagctccgatgctttttgtcttttgtcttctttcccttcagacaggatttctctgtgtaggttttatccacactggaggaagctcaaggagatagaacccggctttctggaggacacccaggacagttggaggacacccagaacacagtttcacagtcagcaagctcactggtgaacttaatgggcacagatacaaagtgtataaaacgtatttcctatgctctatgagtatggatgcctgtggcacagagccctgtgtgtggcaagtactttgtgaagttttcctgggatgctgcactctggaaaagagaggaacattctagagtgtcaaaggaagggccggccagtctgtggagacttctggagagctggtgaggtggggtagataaagagcaagcctggggaggtccagagaccaccacatctgttcagattccagcaggccagggtttctgcatggctgtcccgtgtcctgctgaagttgggatatttttctgcagagaagtatttctggactctgagagcatccaaacatatttttaggcttacttcttagctaacagtcagagaaagggatctttaggattgatttaccaggggctggggtgtggctggccaagggtaaagggtttatgctccacctctagcttttaaagaaaaagatgaacttggtagtttaaacaggctgcagtgaggctacaactcacatctaattgcaaattatgcaaccatgagatttagatagagaaagacccaaaatccattaagaacttactgatatacatgtggttaaaaaaacaaacaaacatttcatctacctgaatgtactgattacaaatggcaatttcgtgaatctgaaataagagaatgttataaggaattattgccagctgcgtttcccaatgaacagctgcatctaattttcacaattaattagtaggtccggatccatgtccttacctcttctaacttattaataaaattaaaaaatttaaagttaaatgttaaggaaaagcaggaatgagttctgtatgtacccatgccttgcacacacaaacatctttagtgaatataaggtatgatgttgaattcgtatacaggcttatttgtgtgtgtgtgtgtgtgtgcaagtgtatacatgaaggccaaaggttagtgtaagttgtctttctccaactgcgcaacatcttgctctttgagacagggtgtctcacaaaatcctagctgttaccaactgagtccagggagatctgtttgtccccagctacctctgtccccttcattatagttacagccttttgagagcaccttcctcttgttttaattttagtgctgagggtctcaagtgctcacaaagttcttattctttcaaggcagggttctttatcatctgagctggctctccagcctcactggcctggtccttttgaagaaactataaaccaaagtttacaaggtttccccgcctctggtcttttattttgtaagtgaaaatgcttatatgtcctgtggagggaacccaacggaaccttggctctgggtttgaggagtgaaggatgtctttggtattagtagaatttatctcaaacgacatccttcccatggtgttttcctgtgttatttgccgcaggactcggagtaggattcgtctttaagagctgaagcttaagggatttgccaaactttacgtttagaggtttcttgatgcacacatctgtggtttagatttccacccagggcaaccccaacggcaatgacaaatcaaatcgtggtgagcactctttcttaggaagggctccgaggcacgcacttactcactcgtttgtagctgagaaggtgacagcgctgtgcacctgaagccacgctgcggatgaaaagacttatttcagccttgcatctgaacccacagtgcttccgaggcaggaagacactcagatgtatttaataagggatgttggaaatacctttaaaaacagcacggcgaagtagggagctttaacgaactgctttgaactctcaacccgagaggaaggaaacaaccagtggtggcaagtgtaagggggggggggagtttgggggctccggcctgggcctgctggggtcgggtccaggcgggacgcgaagcccgcgggcttcggccgtggccggactaagcgcgcggcccgctggctcccgaggttacacacggaccgagagccgggtgacagcagcggacgcttttgcctggcgtcgcgcgagcttcaccctcctcccagaccgccggcctagatcgctccgcaggagggcgcgagccaaagcgcggcttggtgcctgggctgcggagataaaccgggtggggacgccggacgctcacgagcgggcgggctggacgcgccactggccctcgaccaatcgccagcgccggcgatgattcaaaaggtcgagggaccaatggggagctcagggcagcctcgctaggggcgggacctcgggggcgcgagagcgcggccggctgtgtcgcgcgcggagtcgccgctggctgctggtgactgtcctggagtggctggagttcccgccggagcgcggccaggtgagcgtcggcgcgggactccgccgcgtgtggagagcgggttccccggggcggccggcgaggctggggccgcgcgggccggaagtcgagcgcgggtttcggatggcggacaacccccgatccccgtctcggacgcgcgcgttgggtgccccggccgggccgggctgggctgtgctcgccgcggcttcccggccctcggaaagcgggcggccttcggaggaggggttaaccgcctctggctcctgccagggcgccgtcccgcctatccgggcctcctgagtgcttctgcgcggtgacagcggacctcgcgcctccagcagcttcgagggccactcagtgcgcgctggggtgcggagggcctgctccggggcacttcggcgatggcgggctggcctggcgttgcgcccgcccgccctgtgtagcgcacttggtgtgctagggccgtggctcaggtgcaggagcaggactagatctggggctacaaagtagcagctgctctgagggttagaagatggggctacagagaagcgcgggatggaggacctaatacggacagagagggtgatgatgagcgttgactggggagttggggcgggagtgagtaaggactgttaagattagcgtgcttttgggtattaagggaaaaggccactctgccaggacagccagctttctcctgcacggctctgaaggggcacagaccctgcgaacgccttcctgtttgcgttttgcctagcaggcctgtgccggctcaggtgttaaagggtagctgtgagccaccatttgagctttttctttctgccacattaagtgaatttgggagagggggggaaacgattaaagatcttagtaacgcaccggagcatcgtagaaagaaatcggccacactgatacatagtgttatattgtaccataatatgtgaggcgttcagtgccaaatgaccctcgggttagcaagaatctgggttgacaggaaaaaagcctgaggattcttgaatttctgcggtatgtggttgagggtacagtttagcgagtgacttttctttgcaaacaacctgtttgtttagggaagcctgtgtgcgtctcttatgcgttacttgggtgcataagaatacacgggagtctggagcctccttgtcctatccagtataattatctcctgttgggcaatattttgggatgtgttatgtagtttccactgactgtgtggatcttgtgcaaagtggcattcatatcttgttggcagcccattttttttttttttttttttgtctcctaagacaaggtcgttctccacatgctatataaaatatcaccatcagtgtcagttcatggtttgtgttgttgttgttgtttgtttttttgagacaagatctctgcacagcctttattgtcctggaacacagtgcaggctaggcagaccttcaacatacagaggtctgttttcctctgcctcccaaagaatgggattaaagccaccatgccctgctagtctcagttcttttcctccctttttttctggggatcaaattttatattacacattataggcatatttttgaaaaattgaggctcaaatatctactgggtgccttgattatgtattacctactatttaataagtaatagaatttttttttttttaaactttgacttgtgttctttgttggactcatagttaatgtggtgtcttcaagatgcagtagagaaacagcagtgagtctagggccataccattctaatcctctggatttcatcagatctctgaagccaaacaggatcagacgtggttagtacctggatgggatgaatggcaaggattggatgcttctgatagttcagaataaatctgttccagggccttttaaagatgcaggcggtccccaagccacaaagtgctcctattgcaagtttttgaagtgttgtttgagatcctactggcaccttcatatagaaagacattgtgggctttctcaaactttggaaagagtaggagaacctaattgatctggggaggaagagaggtggggattcagagaaggaagcccagcacatttccttcctctttgtcccgggcaacttggaactgagtgttgaaatggacagagttttctgttgtcaccttccttttttgtgcccctcctccttgtgcagatgtgagccagtgctctcctgcttcccgagggccctcatggtcgcttctgccagtctgacttcattcctacagctcccaagcatactccttatcccagagatgctatctcacaagttagggggactgaggcaggctcagtaatgaacctcttatcaccagataagcactttcgttttctttcatctgttgtctgtctaaacagatggagcttgggaagtctttttttgttttttgtttttttttccttcaggggattaacagtgaagaaatgttatttagaaagactttcttgggaggggtaggtaatgcaactttctccttaattccacagtctgcaagagtctttagcgttcctgtagagttgcataaccagctcttggcctccggagtgtgtctttgtgtgcttgggtgatgtatggagacttgctcagcaggtgaaggagtctttctgtctgctgcttgcttatcttatcattggtatcagagcactggcttttatcctgtggatctgttggtcaccggagtgagaaataacacctcagagagctcctagcacagccatcatttgatattacctcatgtaaatgataattcttgaaagttgtggtttcttgaagtattgaaggtttcatgggccatgttttgaaacagcggtaaaagatgttacagttggagtaggtgtcagctgtgggctggagaggtgcacacgttagcttaggtgggcggctggcagagttaattgatgtgcatttgggatttgactcagagaatgcaaaccttatgaagtaaacctcaaatatgttattcattatagatttgaagtccttcttgttggtaggttagagtaatgctaatgtacattttttaaaaagatttatttattctatgtaagttcaccgtagctgtcttcagacacaccagaagagggcatcagatatcattatgagtagttgtgaagccaccatgtggttgctgggatttgaactcaggacctttggaagagcagtcagtgctcttaacctctgagccatttctccagcccactaatgtacatttttaattttcccagtttgtctcatggttttattactttccagtaaggtaacttgttaaaaatataacttcatgaattttaaagcttttataaaaatgacatgtagatctataaataaaaataagtgtcctttttgaggtgtgccctgattttactgcagggggtagcattctaagttgtccagtctgatgcctgttacgttgtcagggtttaatcctcagtgccactgtctgcacggcagtgactaagtcgtctcctacagagtgattccagatgaaatagagtgaagctcacacaatgttttgtgttgctctgctgttccctcccctgtgtttgtgaactttgacaaagcgttaactttaagctcaagttctgtcatctatagaataaggagttgcacactccttccttggctttctggccctaaagctaaaaccagctagaaagttgtttacgtgaacaacctagtccagaaaaagaagtaataattattgactaactttttttccttaaaatttttcagactaattttagaaaatgccaagtaggaagtttgttgagggtgaagtggtcagaggccgatggcctgggagctccctttattatgaagtagagattctgagccacgacaacaaatcccagctctacactgtaaaatacaaagatggcaccgaactggaactgaaggagagtgatatcaaggtgagtatgtctgccttcgtctgcagtggtgggaggagctgggggctcatgccagactcctgccttggggctccagggcacatgctgttcttgcctctgggagtatgggagtgaggtataggcccagatcccaaaagctcatgccattgggtctgtgaccatcctgtgaggtgctcttacacaagaaaggaccctggcttttagggattttgttagcactgcttttttccgggctgagtgctaggacagatgggaaactgtagggagggcagcatcccaaagcttgtggatgatgtggtgtggtcaagtactagccggagacaggctaggggcgtttaataggcttgggttttctcttcatctttctcctcttcctcctcttcctcttcctctcctctctttttccttccatcctctcttcctcttctctgtctctctctcctcctcctcccttcctcccctcttcctttcctcccctcttctcctttcctcttctcttccctccttccttcctcccctcccctcctcttattcctcccctcctcttcctcctcttcatcctctcttcctcttcccctcttcccttcctcccccctcttctttccctcctcctctcttcctcctcccctcctctccccctcctttctcccgtcctttctttcctctcctctcccctcccnnnnnnnnnnnnnnnnnnnnagtgtgtgtatatgtgtgtgtgtgtgtgtgtgtgtctgacttcaagtaattttcctcagatgcgctccaccttatttcccgaggcaggatctctcagtaggtgaggatggcaggccattgaactctagggattgtcttgtctctgccttcccactgcagaggttacaaggatatatcaccctttacacatgctgttctgaacccagatggtcgtgcgtcgcggcaaatactttatggactgagccaccgtgtcagccctggatttttgtttcttttttttcatttttcttgttcttcttggtttttcgagacagggttcctctgtgtagcctctgctgtctgtcctggaactcactctgtagaccaggctggtctcaaactcagagattggcctgtctctacctcatgagtgctgggattaaaggtgtgtactaccatgtggcaggacttgggcttcttcctcaacactggtgatgtaatcagagagtgacatttactaggtttgaggtcagctcacagcttccccttccaaacctatctgttaatggtatgggttttaaaatattgagctatggtatacaaatacttatatgaaatgcataaaaattaatttctatgaaaaaaggataaataaagctgcagagttttgttagattttctaggcataaaattgcttagtcgggatgctctaaaaccgtccacttagaacatagcagttttggaccttgtggcccattgataaccaatagtttggacccatgcatggtctgtggatgaacactgtgttttagtaaatattttagggtcatggctcatggggtgtctgtagtttaggggcagctccagccatatgaaatacgacttctcttgatgctttagtgatcatttaagacatgtaaatgccttaaatgattagctgagggacacatacacaaaacagtgcctggacagagccccaggggtttgcctgccttaggcctgccttaccctggagtggattagggcagagtggcagctgaccaaggagtttaacttgtctgcttttaagaactcgagtttgagccgggcttggtgacaaacgcctttaatccaagcagaggcaggcggatttctgagttggaggccagcctggtctacagagtgagttccaggacagccagggctacacagagaaaccctgtctcgaaaccccccccccccaaaaaaaaaaaagtttgtttcagagtgactctgtagggctgctgtttgaaaaattggttgcatgctaattatcttttctcaccatgtcagttttagacagtatcagttccaagctttcctggtgttgctgggagtatataatatgtatgtgatgtagtcactgattccagggaaaataccctccaagctcgcagagcaggcgaagtgctgtgtctttccaggagctgggctgttgtagcatcacactgtgtgctccgttctcagagccatgagtgtagaatgcacggcaacagagagtggccacaccggacccgagtgcgctgatgacatctctgtgccctttccctttctagcctttaaaatcctttaagcaaagaaaaagtggctcgatttccagctctccctctcgacgccgtggcagccgcagccgcagccgctcaagatcacgttcccgatccccgggcagagcaccgaaaggctccagaagatccgtctctgcttcccatgagggtgacgtgaaggagaagaaggagaaggagatgaggagggaaattctgcaagttaagctgactccgcttgtgttggtacttacttcatctgtccactgcgccggcttccctatacaaatgcgtgttcagattatttgtgcttttgttagcaagtattgaaatagaaagaatagtttctttgaatatccaagaaaaatggtttttgttttttttttaattagatattttctttatttacatttcaaatgttacccctttcctggtttcccctctaaaaatcccatatccccttcgcccttcccctgctccccaacccacccactcccattcccagtcctggcattccctatactggggcctagaaccttcacaggacctagggcctctcctcccattgatgactgactaggccaggccatcctctgctacatatgcagctagagccacaagttccaccatgtgttttctttgattggtggtatagttacaaggagctctgggggtactggttaattcatattgttgttcctcttatggggctccagaccccttcagctcccttggtactttctctagctccttcattggggaccttgtgctccgtccaatggatgattgtgaccatccactcctgtatttgccaggcactggcagaggccctcaggagacagcaggctcttgttggcatctgccatagtgtcagggtttggtggttgtttataggatggatcccctgttttttatttttaactttttcattttcagtatatgtgtccgtccatgtgtttggtgtgtgtgtggccacgccggtggaggtcagaggacagctttatggggcctttcctcccgttccactcgtgggctcccatcattgggcttgggggaaagcggttctgcccgaagctactgtatcagcttcaaaataacattactaggagtcctgatagtgtgtggtcttcaaagatgtttccattgagaccggcacagtttgtaggccataaagtgaggagacagctactctgttagccattcttgctctcccagttggcatccttctgcttgatcactttcactgtttaaaaatggcggtttcgggctggagagatggctcagtggttaagagcaccgactgctcttcgaaggtcctgagttcaaatcccagcaaccacatggtggctcacaaccatccataatgagatctgacgccctcttctgatgcatttgaaaacagctacagtgaacttggatataataataaataaatctttaagaaaaaaaatagtttaccaaggaggctcccttggagaaaactatgaaaaaaaaatggcgttttcagtgaacatgtgtggagcctggggacctagccaataactttctttttttttttttttttaagatttattgatttatttatttatttatttattgtaagtacactgtagctgtcctcagacactccagaagagggagtcagatctcgttacggatggttatgagccaccatgtggttgctggaatttgaactgaccttcggaagagcagtcgggtgctcttacccactgagccatctcaccagcccaataactttcattttatgtagtagtatacattttttttactttttgctttttttctttttctaagacaaggtagcctaggctggccaagaccttgataaaattctcctgcctctgtttgctccgttctgagatcctagggtaagctaccacaatggataatgaatattttaactcctttgttttcaactttcttcatgctgtgaccctttagaacagcagttcctcaggctgggctgaccccaaccataaaattattttgttgctacttcattaactctaatttgctactgctatgaatttttttttaattaaaaaaatttattttatgtttgtgagtacattgtagctgtatagatggttgtgagccttcgtgtggttgttgggaattgaattgaattgaacccccgctcactgcagttaaccccactcgctactgtcaactctgctcactcagtccctgctcgctctggcccagagatttattcattaattatttacttacttatttattatttacttaatacataagtacatgtagctgtcttctgacacaccagaagaaggcatccgatctcattacggatggttgtgagccagcatgtggtgctgggatctgaacttaggatctctggaagagcagtcagtgctcttacacactgagccacctcgccagtcctctaataatgcacttagattttaaaatgtcaaatattgagaataacctgcaatttgatagtttcctgtttttgtatgttacatagtaaacatcagaagaagtgcgcgtgcgcgcgcacacacacacacacacacacacacacacagttagtgttaacgttagttctgcggtgcaaccttgtgtttttctctcagtgttcactgttctaaacacctacttttctgcagtatctagttatcttcttaggcttagctttgaggaaattgaagctgcttggtcagatggacagggcagaacagaggcttgtaatacctgttgctagactgggtgagcatgcttatgtcagtgtcaagaccgtggggaatgcttggttttcatctgaggattgtaacaggcctcccccacccccacccccacctccacccccaagttgatgtcaaagattttcacctccctttttcagactttatgttttcttactacaatgagcttgttgttgctttgagtgcctctctcccacatggggggaggggcagatgcttcgtactgttgtctgtgatagctttcatattcacacgtgctcttgttgacagaagagctccgggttgtctttgcccctcatcatctactgtgtggtgtgtgtgcaagttcacagttaggctgcctcagctttggacatcatgctatgatcgctcctttccacacccggttgtgatctcagtaatttccctcccagtgttgagtgcttaaccttcatcgtaagtctgtttactgcatggaaagcattggcatgtagtcagcatggtttcgagttagctgactggctggtttatctgtggttagtagaggttattcaaaacctgagatgctgcacatagctttttaggtgtgtcttcgtgtggtgacagatggctcattcactgacacttgggtaaactcaggtgtatagcgagcgggtgctctattgctagctgacctagaatccctaatgtgcaaagctgccatctgccggcatctgctgtcttctgaaggatgtgcttggactctgttttcttcttgactcaggagtgttttagtttgttgacagtctttacagaggaggagagaggctgttgcaagcattgccttaacaagcacttgcaagctaaattgcttctctttcttctgtaagaaactcagaggctgagtcaagagggacatgtaggaaggaaaaagtaagggcaaataacatgttgcaggaaacgcaaacacccagccttcccactatagactgtttagggccacggaaagtcttttcctcatttttatgtctagctaatgaataaatttgccaggttttgctcacccgcctttcatagaaacgttaccgtatgacagtgaaatcattgaagcgtttcgtgtacaagtgcagatgggaaagttaatgcagaagtctgttccaaaatgtagtgttgcccagctggaatcccagcgctcaggcaggtgaggctggaggattgccacaagtttgaggctctgtaagagctgactgttgaggacctgggggctgtggttgcctttactccagacggtttagcgaggctctgctccctgcccagtagaacctgctacccctctggtgctgattctgtcgctgcttcttccatttagaagccgttcggaaacagcgtcagcgtgtacaacggggagcccgaacacatggagaagaacgctacgccgtataaagacaagcaggtgagagacagacactccttcatctgcggcacacactctgttccttttccttcagactcacactggaatttgttgtgttgtgtttgtttgtgttctgtcctgaagagtgcatgtgatttaacacatttattctttttttttttttggcttttttttttttgagacagggtttctctgtgtagccctggctgtcctggaactcactttgtagaccaggctggcctcgaattcagaaatttgcctgtctctgcctctcgagtgctgggattgaaggcgtttgtcaccaccacccggcaacacatttattcttgtacattcacagctctatagagatgctgagttagtagtgtttgcactgaatatagactagatatttaatactttggttttttttgttttttgtttttaaactaggaaagaatcattttgtcaacagaagacagatatatagttacacagtacagccttcgtcccaggagagaagaggtcaaagccaaagaaatagagtctgaggaacaaaaccttgtcaccaaaggacccgcacctttgggaacctttcaagtgaccactccacagaggaaggacttggagtttggaggagtacctggtaggtattagaagcccattagggaggagaaagggtggccagagatgcccttatgtgcacaggaaaggtctttgtgcagcaggaagagactaaggaggtggaggactagggaagaactttacagagaaggaacagtggtatgaaggcctgagctgggagctacggcagtgtgtgtacagggcacaactggggtggtacatgggacacacggaggcatagatggataggatgatgggacaagccataaagtacaaaggatgctaactttaaagtcataataaagggagcttgccatggggaagggtacaggaggggtagtggtgatcctgtagggactgggagctctgctactgatgagtagagaaggcagggagggcccggctggtgttccctgcagaagcaagctgcagcgtaaggcatcctgctgccttcccaatgggctgatcagagagtgcatgcgtggagcctcccagaagacagttacgttaggctcttgtctgcaagcataacagagccattgataatggcagggattggttcttgcccatgggatgggtctcaggttgggccagcctttggttggccattccctcagtctctgctccatttctgtccccctttttttttaaagattcatttatttattatatgtaagtacactgtagttgttttcagacacaccagaagagggagtcagatcttgttacggatggttgtgagccaccatgtggttgctgggatttgaactcaggacctttggaagagcagtcaggtgctcttacctgctgagccatctcaccagctccctgtgcttcttgaaggcagacaaattttgggttggaggttaagtgggtgggtgattgttgcctgtctgtggctctttttttttttttgagacagggtttctctgtgtagccctggctgtcctggaactcactctgtagaccaggctggccttgaactcagaaatctgcctgcctctgccttctgagtgctgggattaaaggcgtgcgccaccactgccaggctttgtggatcttgttcctctaactgggctgtcttatctggcctcagtgggtgtcttagtcagggtttctattcctgcacaaacatcatgaccaagaagcaagttggggaggaaagggtttattcagcttacattttcatcactgaaagaagtgaggcctggaactcaagccaggcagggagcaggagctgatgtagaggccatggagggatgttaattactgtcttgctcagcctgctctcttatagaacccaagactaccagcccagagatggtcccacccacaaggggacctccccacttgatcactaattgagaaaatgccttacagttggatctcatggaggcatttcctcaactgaagctcctttctctgtgataactccagctgtgtcaagctgacacaaaatcagccagtacagtgggagaggatgctcctagccctgccgtgacttgatgttccagggtgggttggtacccagggaggatggagggagggctgtgagaggggggctgcgactgcgatgtaaagtcaataaataatgggaaaagttcccaaacaaaacacagagtgtatgtcaaagcctgcggtgagtgagcatgtgagctggtggcagcccatagtctggcttgggttacctgctctgcttgctgtcctcgcccataatctccacgtgtgtgacagtaagctgcatgttagaaacctatggatagaaagtctactgtgaggaccaggggactcattgagctaagaggctcttgcctacaaggcagagctggaggccaaggctaccagaggctgtgcaaccacattagcctagccgttgtttggtgtctgcgtctccacactgctctttttgtggctggagttgacagtttcagagcttggtctctgaggtggaccctacttttgtcactcaccccaaggctgtgtgctcactggaagtgatggggagagagtttaaaagttactaaattttatgactttggtaggggagggatggagagagcaagcaagctaatgctctggggctcacatgaatgctggctgtgagctccaggtgtcagatgcccttccctgctgagcattttcccagccaagacagggagaggtttttcttttttttttttttttttttttgaggcagggtttctctgtgtagccctggctgtcctggaactcactttgtagaccaggctggcctcaaactcagaaatcctcctgcctctgcctcccgagtgctgggattaaaggtgtgctccaccacgcctggcttatttccttcattttatatgtatgaatgtttacctgtgaatttgttatgtgtaccgcatgtatgcctgttgttcagggcagtcagaagaggacattggcttccctggaactggagttacatacagatggttgtgagccaccatgtgggtgctgggtcctctgtgagagagcaagtgcttttaaccaccaggctgatgcttctgccccctagatgaggagtttttgatggtaccttacaaattggtttcagacagctaaccagatctagttttgccctgaaagtaaaataaatataaatacaaagcccacatgaggtctgatgcctgtccttgcaggtgcggtcctcatcatgctgggcctgcccgcctgcgtcctcttgctgctgctgcagtgcaggcagaaggacccggggctgctccacttccctccacctctgccggctctccacgagctgtgggaacccagggtgtgcggcgtttacctcctctggtttttcgttcaagctctcttccaccttctaccagttgggaaggtaaggttttggggtttgttgtatgtatattttttgtgttttgagacatggtcctggctgtgtgttcctgacctggaactcactctgtagaccaggttggtcctgaactcgcagagctctgcctgcctctgcctctgcagtgcttggattataaacgtgtgccccctggtggaagtagggttttgctgaaggggcatggttttgtgaaacttgactgactgacttgtcatttttaagatttccagcagtttcaaagttaagcggtcagtcatgcgctgagccttattcctgagctctgtagctttcctcttactaagtataactttaaaaatatgatttgggtttatctaatttcctatatcacttttctttctttttcaacaaaatacctgacaaaagccaaggggggcaggggggggggaaacaaacaacaacaggatttattttgcctcaagctttgagggtaacgtccatgatagcagaggaatggtgttggggagagaggtggctggtcactttgcatcagtgccaggttggaagcagagagacagggatactgattctcagcttgatttcccctgtgtgtgtgtgggtgttttcgcccacatctatgtctgtgctctgtgtgcgcagaactccgaggacattagcccccctaggactggaggcatggttgtgaaccatcagtgtgtactgaggacagcccccggtgctcgggaagagcagcctgtgtccttggtgagccggtgctccagctcttcttccttttctgcagtgtgggaacccagcccaagaaacggagccactcacattagggtggtctttacacctcagcacagtctagagactgcgagataggtgtgcctagaggtttgctcctaggtgattcttagggcattgaatccaattatgtgtgtgtacgctgttgctgttttcagactcaccagaagagggcatcagatccgtgagctggttgctggaatttgaactcagaacctgtgaaagagcagccagtgttcttaaccacagagccatctctccaggccccccctacatacatatacatatacacatacacatacacatacacatacacatacacatacacatacacatacacatacacatacatatacatatacacacatacatacacatatatataatcatacctatttccagttctaacaggaaagaataagttatttgctattagcctaactcttagtagaggcagctgaagagcatccccctcagtgtgtttacttgtgggtgcaacattttaaatcattgtcttctgagctcagtggatttaacagaaaacaaacaaaaaaccccaaaacacagattcaggtatttccagttttgatccttaggaactgttgtcaagaacacagtgtccttttcagactccattgctaagtgtggtctttcagttgttatacctttccttagagatgtgttcaaagaacatgagctgccctaagcagtacataatttatttcagatcttattcttaggagactgcatctttgccagctggaaattctgttaggagggtggggctgtggacatggtgctgtggactctcactgtaagtggctgtccgcttttactacagggctctgttcagagtcaggtgaaaataaccatgcatacgtacaggcagatgtcgagtgtcagtcgagagatcctctctctattgtcagactaaggccaagaagacacctgcaattgagaaggatcgcttagggtttcgccagtgctgtgatctcaggttttatgtttctgtcctgggtttccctgccagcagaggaacaggtgcaggaagatgatgccatcttaatattggacagcttaaagtgaatggctacattttgatacttggggatccatgtggctgcccattcactcaggtggttgttgaaaagaacctctgttcttgtgttaaacttctttacgtacatacatattttatagctagactccccatatagaaacagcacgcacattttctttttgagtttgcatgatctcacttcatatttttttttgtttttgttttgttttttcgagacagggtttctctgtatagccctggctgtcctggaactcactctgtagaccaggctggcctcgaactcagaaatccacctgcctctgcctcccgagtgctgggattaaaggcgtgtgccaccatgcccggctacttcgtacattttaagcccattggttttcctgtggccggccggccggcctgcctgcctgcctgcctgcctgcctgcctgcctgcccgcccgcccgcccgcccgccctccctcctcacataaataaagactaaatataaggagacaaggaaggactcaatgcaggtgataaatagttatgaaaggattttaaacaaattgtttttctggttctaatcctgtcatggtttttctggatatgtgtgtgtaaaatttttaaggcaaacctcacaaatgagagatagtgggattagactcttctattgttgatgggcagtggagagttttgagcacactaatattgttctctgtgtgggatggtttgatgagggtggttattgcaatagtcttggtgcactgaaaacaaattaactacatatgtttaaggtaaatccctacagtggggttgtgtcatcaactactagaatactattgtgtttcctacttcctttcttgggtataataatgaatttcaagagtttgagaagattatatatatacatatatatatatatattctcaacaatatatatatatgtatatatatgtgtgtgtatacatatattacatatgtatattaaaggtgtgtgagtgtcgtgccacacacctttaatcccagcattctggatgcacaggctggtgggtctctgagtttgaggccagcctggtctacaaaatgagttccaggacagccagggctgttgcacagaaaacctgtctcaaaaaacacaaagatgataatatcctttaatttttaaataaaaatgcaatttgtttttttcttttaaggttgcagaaggaacacctcttgttgatggaagaagactccagtatagactgaatggtgattttcttaaatactcaatgacataacttttacagtttttacatcgtgggagctgattcactgggtggtgaacggaaggttatcttttagaagtttgaagaacttgtagctaaattagcttattccagcttaggaaaaacgtgtgtaaaacagaatagtacacttagtatcttctgttttccttttactttgagataaggcatcaccatgtcacccaggctagcctggagttcactttgtagtacaggctagcccttctgcctcagcttcctgagttctggcattacaagtgtgtgctactggcctggttagttttgtttcctttttccttttaaagtttaatttttattttatgtgtgtgagtgcctgtctgtctgtgtgcgtgtatgatataaattatatatcatataatttaatatattttaattatatatatcacgcgtgcctggtgcccatggaagtcagaagagggtattgggtactttgcaactggagttactgatcattgtgacatcctgggaacccagcctgttttcctaggctgagaagacgttgccccaccatttttttttttttttttggtggttaaatattgttttaaaatattttgtgtgtgtgcctgagtgtatgttgtgtgtgcatcatgtgtgtgtagtggaagctgttagacacctggaactggagttacaggtggttgtcaggtactgtgtggtgctgggaactaaacctgggtcctctgaaagagcagtgtgtgctcttaaattctgagccatctctccagtgcctagcaaatacttttaactagagcgatctctccagcatgcttcattttctcaatagcacataccatctgtcttagtcagggtttctattcctgcacaaacatcatgactaagaagcaagttggggaggaaagggtttattcagcttacacttccatactgctgttcatcaccaaaggaagtcaagactggaactcaagcaggtcaggaagcaggagctgattcagaggccatggagggatgctgcctactggcttgcttcccctggcttgctcagcttgctctcttatagaacccaaaactaccagcccagggatggcactacccacattgggccctcctacccttgatcactaattgagaaaatgccttacagctggatctcatggagacatttcctcaagagaggctccttctctgtgacaactccatcctgtgtcaagttgacacacaaccagccagtacaccatcattcagcatatgctttaaggttttcccatagcaggcattctcgtggctctcagaaggctcccctgttgtatacatcccagtcactcccacctaggagcccgctgctcctgtccttgtgtgcctggctccagctgactggcctctgagagctgtctcttgaatgtgtgtccactcttgtcaaccctttgcttgaaaacatctttccctatgctttttgcaccacggagctgtagtcagtattgcttcttcatgaaggggaagacgcaaggaaaggtgtggaacttggctggaactgcacaagcaaggagaaagcattggcttcttccttgcctcttttgttttattttctgacagttatggcttgccacatcagtgtcttttctgtttagtggactttttcctggtgggcactagttttgtgggctagcttgtgtttagtacatacttggcactagggagctatgcgtgttgagcagggaaggcagcgtggagcttgtgtaacagagcttgtgaaaggctcttttgtctgagtatcttgatagtcagcacatgtacagctttaccttccgaaggctgataaagcgccattcatgtgactttaggagtctctgtggtggtcatccttaacagattgtccgttttactaaattgggtagagtgatgccatttatttctagaattttatgaaagatgctcttcaacttatgattgtgcttatgttcacataagtccatcttatgttggccataccttaggttgaaaatgtattttctgcagctgacctgccagtgtccgggcttagcagcactgtagagttgtaggtcaactgtgatttgttgagatcattgcactgcccagcactgggagaggacattgtatgttgctagtctgaatccacatttgagtatggtgctggatgtgtctagcttctgcatgtgtatgatgcactgccaaactccctaagttgaaccactggaagccaggaatggtctgagtaaattttaatgtttggcttccatcttattccatcttattttctagtttgggtggttgttcatgggcttagccagcatttttaactgaaatcactctgcagggtgcaagccgggaagcagaaatgttttcggggctacctgccttcaggtgccgagctgcatgccatcctagccggctgtgcacctgcctggaaccatgcttgctcgtgctggacatctttctgttcttgcccagctcctcgctaacggaagctgcctgtctcataatcttaggcgtgccatggctcttgctggctctgctggcctgctacaggctgtctgctcacagttctgctcttgctgtggagggcattgaggccaagccctgcgcctgggcccttggtacttgggtaaagacttctttgttggtctgtgtttctagtgttactccattccctgttacgggattttacctctaaggaagttcctaagacattctgagtgattagtctgcagtctgtggagtgaaaaacagttgtaccacttcatagattttataagggttaaattattctttggagtaaacttggtatgtagcaaacatggctttagaaagcaaacttgtggcgatcctcttttatcagggcttagaaatcctctcactaatgaccatgacttgtttgactgttaattgaaatataatttgatgacttcatgtggaacctaagcacttcagcttttgtaagaaaaatgatttctttagccaaaaggtgaaattgtgcactccctgcccccagattgggcaggcagcacccttagactggcttgtgacttgtctcctgggcttttagcctgctggctgcctgtgcatcagagtggagcctagtgtgcccttgtgtgggattacaagtgtgagtgaccacacttggtttccccgggttttattatagcctctactgtgaaggtacagcatccttttcttccccccaaagctttatttattattatacgtaagtacactgtagctgtcttcagacgcaccagaagagggtgacatactcattacggatggttgtgagccaccatgtggttgctgggatttgaactcaggaccttcagaagagcagtcggtgctcttaaccactgagccatctctccagcccgagggtacagcatcttgatattcgttttctatgtggcagaatgtgactagaacctttttataccattaccaactcgtgagttccaacataaatatttataactgtataccttaagattattctgctgtgaggtaatggcattagacttgaaaatgtgttcttgtacatctcttttgggagctacttatttgactttggactctgaacgttggagtagtgagtgcattttgagattcttttcagtttaacagtgagtttgagcttggctttaattaacagtgggtaaggatggttcatattgccaaataatgttagcattcttaaaagacagtacaagagctgtggtatttacactgaagattgtaccttaaggacattgcttatttgcatatatatgaaaataatctggataatgaaatttaagacttaaacagaaaaacactgcattgactggtagctcctgtgtgttgggggggggggtgtctttttgagcccggggacttaaggccagcttgggcaacctagtgtgacttgtctcaaaacccccaaatgtagccccaggatgagtgacgttaattaaccctgttctccctctttaaaggattgtatgccttcattctgacatctgcagccctgggagcagctgtcttctggggtgttgagctgtgctacctgtacactcacttcctgcagttggcactggcagccaccgggttctccgtgctcctgagtgcttacctctatgttcgctctctgcgagccccgagggaggagctgtcgccagccagttccggtgagcagttccatcatgggtcacatggctgtgtccagagccctggcagccatgactactcatagagattggtttttgtctagtttaattttgggaaataaagacatagaaaacaagtgaagaaaaaaattgaaggcaaaatttaagtttttttcctcatgcttttctatttagttctcattaactctaagtatgtgactaaaatccttcagcagctctgactctctgcctgtttacttttgtcaagtagtaaattccttcaaaacaaaacaaaaaaacaggctgcaagttatttggttctgacctaagatatttttttttaagtttcctatggactgggtgtggaggcccatacctttaatctgagcacttgtcaggcagatgcaggaggatttctgtgagtttgaggccctcctgatccaaataaagttccaggccagccaggactacatagtgagacctcatctcaaaaataaaacaaaaggtcgtatgtttaaaaataaacctgtagtttccctagaggtgaagtgagctctcaagatcagtagcggccctggcttcccagtcctgtccttcgcttccccctctgcagtcgtctcctcagggagcagaggcccaaggtcagcacttggtgaggtaaatgctttctccttcccaggaaatgctgtctacgacttcttcattggccgagagttaaacccgcgacttggtgctttcgatctcaagttcttttgtgagttgcgccctggattgattggatgggtatgtctttttttttttttttttttccaataatttcaatggtatgacttcatcttgtatttagaaggaaatgtaggcaatttttaaagattatagttttccctaattgtgtcttaacacatatatatttatttatttttttactggtttaagagaacttgttacggattgttaaacatcacagatatttttcaatttttattacatatatctaggaagtgatagtgaagatggaaagtaaagccttatttgacccagtttcaggcttggaggacaattacagacatggaaccgagactcccattttctttcgccggattccttactaacagcaggctcagtcacagtcccgtcaagggcagtgctactgaggggatctgtaacccttattggggttcattggtgcttaactgttgctccattctttcatcttggtctcctctcactatgctggttccttaggctcttgtgacggtgtcgcccttttgaagagcactgttcgtaagaccatcattccgttgttctcctgatcagagaccccatgtgttgtcaggaagcgcagacaagtgacacgtcagggctgaggtgtcttgttctctggtggccatggcggtgtgcactgggggtctcggctctgcttggcctcgccagtgcctttgaggcgttgtcgtcttctcttcccaggtggttattaacttagtgatgcttctgatggaaatgaaaattcaggagcgagctgctccgtccttggcaatgatcttggttaacagtttccagctcttatatgtggtggacgccctctggaatgaggtaatttgttggattttccaggttatatatatatatatatatttatatatttacttatttttgaggtcctagtagtccatgctggtctgaacttgtgatcttcccaccttggcctcccacacgggattagaggaatgtgttctgtacctgcacaagatagttaattttagaaagagatgaattcttggaggccatgaagtcaagcagctttttgagagttggtgggtgaggttttcctctggggagctctcgagttgcttatatacagaattagggcagttatagcttgcttcttctatagcttgtgttgataaagatgaggtagttcaaagggcctgcacatgaacactggtgggtgtgtcgacaactctattcggaaatgactttctaagcagttaacatcattctgaggtctagggtgtgagccttagggcccggatccgtgagctctgactcttaccttgcccagtgtgatctgggcaagaactctgagagctacttcttcccacagatacattttgaaccattactttttgctaggcactgtggcatgtacatttgaaaaatgagaggcttatttttcaaatatcaggggagattgtaggatgagaagggctgttgagggaagggactgaagctggggttggaggaaggtgaggtcagggagtactgggcaaaggcctgtgagggttttagacatctgttacagcaacttctgtgggaggagacaggacttaagccagagcaactggacctgcctttcaatattttggtgtgccttcacttaatatacttgaccgtaaactagtactttaaacataagatggttttctttcttcccacctgtcattttaggaagcactgctgacctccatggacatcatgcacgacggctttggcttcatgctggcctttggggatttagtgtgggttccatttacctacagcctccaggccttttacctggtcagccatccccatgacttgtcctggccattggcttctgtcatcattgctctgaaatgtgagtgctagtcttagcctctgttcagtccaaggcactgtgtttactgttttctggttggtgtctgtcgcatgccatcttacttgatcacagacttgaaataatttatgatggataagtgctgaaaaaattctcaagtttgcaaagagagggaatacatgctagctctccactagttcttacaacagacatcttttttttttttttttttttttggtttttcgagacagggtttctctgtgtagccctggctgtcctggaactcactttgtagaccagaaatctgcttgcctctgcctcccaagtgctgggagggtggctcaaaggcgtgagccaccactgcttggctgaacatcttacttttattgttaagcaatttaacttaaaatgaattcctttaggaataatttctgtcaaatgcctgtgtttttaaaagagatcttaaaaataaaattggtctttatacagtttttggtctcactgtcgaaacaatagcagggaatatggcctgagtagctcaggcaatgcattgaaggcctctgtgcaggagagggagccagtcctctggggagtggttcagacaggagactggctgaatgagacagcagcagtgtaaagggtgctcaggggcagagagacaggttcagcttggctgctctgagttctgccacacccagtggttttcagttcagatagttttcctttatttctttgttgtttaaataatcttccaaaacctcctggataggaaaaggaccatggaacttcaagtagagctagtgttatgacattgatgagtgcctgtaatggaagaggaactctaagcaccttgttaaaaggaaggtttagtttttccattggtttgattattcatgtcggtggcccctgagttatccagcagtttgcatctatccgaaagagtcgttgaagtgaaggagatttggtatttcttgctattcagaccttgtcatagtagttccatctttgaatacatctcccaagtggcgggggaggggtatggaccctgaagtgccaacactgttttctgactgttttctgctggtattttactgaggaaatatgcctctggctgaaggtctcagactagcagataaggtagcctgtagtcactgtcgcttgttgctgtctcagacactgttctttgtgggcatgactggaagtgtttgccttcaagatggatgatgacaagtgagattttagatgctaggtgacatctaaattactaacaggaaaatattttaaaattgcagtgtgtggatatgtaatcttccgttgtgcaaactctcagaaaaatgcattccggaagaatcccactgatccaaagcttgcacgtaaggactgacttttaatttgttgatttatatttattatgtgtagatttttatgcctttcttagaattctgtcattaaaataggttttgtttttaaatagatttgaagaccattcatacttccacggggaaaagtctgcttgtttccggatggtggggctttgttcgccatcccaattacttgggtgacctcatcatggctctggcgtggtccctcccatgtggtaagcaactcagtgttaatgtgactttccctggacagacaatatcattggttggacttgtaggcagctccgggctctactctcttggtgtctaacaggtgttgcctaccttatgagcgggttgggggtgttgtgagataggttttctaaggagactgtaatgaacgtttggtttgcgtttggcatagcttggctttcagtgggtgagggaaatgggactcactgagccactgttgttccctgcaggtttcaaccacctcctgccatacttctacattatctacttcaccgccttgcttatccatcgagaggcccgggatgaacaccagtgcaggaggaagtacggcctggcctgggagaagtactgccagcgagtgccctaccgcatattcccctacatttactgacctgtgctgcttgcctggcagctcagacctctcccagaaacaagggaaagtccaaatgaactaatgtgatgcactgacaggatctctaggtttgtttttgagtcaggactatagagccaaatagtacatcttttaatgtagttaaatttattcttatggcagttaaagatggtaaaatttgcttattaggaaaattttaatccctaaaaatcttaacttttatttttgttggttttttttttttcaattttttttttctttttgccatttgatttttcttaattgaaaactcttattaaagtacatctacgtttcattgtgcttagaacagaattctctttaagtcagtttattagtctataaatcaagcaaaacccagcccaatattggtgttatagctgaagaataagggcagattacttgcaggacctgtttaaaggaccattcatagcagtgactccacttcagcctttaaaagtgcatttggaaatataaacacatagacgacttttatgtaatatatggtaacttttgatttttctgtacagtttttgaatgtgagataattgtcagaaactaagtagttttttaacagaatattttcagtgttttaaattaagttttgtaaagtaattacaattcatttaaagttaaaacataggaaagttatttttctttatccaaagtttgtgaatttggctttgctacctcaatttgcaggtgtgtgtttgcctttataaaatgttgcaaatagaaaaaaaaatatatattttttgagtaacagcactatttaaacatttttacacacattggtgttggaaaaattgccattttaggctactatttttatatattttttgacttaaaattcaacagtgtttttgctactgtttagctaatacagtttatattaatttgtatcctttatgtttttagaactctctagaaaggagttctacctgatacaactttaagttttctctctgtttaatggatgtgtataagctgtttgtagccttcagtactagtgaggttggatagtttcccagtcactgtccctgagcaggacaagtggcaagttcactagacttttttattcaaagctacattgtcctcagagtaaacataaggatgcaatacatatagtgtgtacatttgggtttctattacacataccacatgtgagctagatgcaaaatattcaggtcttcctgctctgtagcttagagtgtcaagtggctgtgcccgtctgatcatgccgtgctacgctctgcattctgtcattctttactgttttactagtcctaaggtgttcagcaggtggttttctatcatgctttctgctggaatcaacatggtatgtgttaataagcttacaaggaaacaactttgggttctttgcctggttctgaaagggcggacagtgccacagtatctggacattaggtgcaagttgtttttaatttgatgtttggcaagctttgtaataaaattttggttggaaacaaaaagttgaaaataaagagttgctgttagagcctcatttctttgccacagctttgggattaccagcagcaagatggccaactctctgttttgtcataccactccccctcccccttttttccttttttgagtctttctgaactctaggaacccagggacttacttacttagcaaagcaaaaactgtagggcctgactcagtggtggctcgcccctgtaatggcagcaggccaagagggtgggtcaggaggatctccatgtgtttgaggccatcctgggctggagaggagaccttgtcttaaaaacaaatcccaacagtggaatctgagggcttaggggtagatagaattcctaaaactggtcgtgtttactgtttgctgtttaagaacaccaagtgcttaaaaactgctataggttctgtgacactttgaagcaaatgtatatgcatagtcgaagctttcgtgttctatgacagagtgcacagccactgcttgcctgttgaagtctcccacacctcccgccaggtttggctaggcacatgctgttccagggatgctccctgcatgtgaccgtcctcatgcatggacgtggaggaagagcccaggcttagatgggttcgctctgggtgtttattcactcattcttctcacacagcagtgcaacctgcatggtgatccagtgactgggaggtttcttcgtgggtaagtgcactgaggttagcacggttgttggtaagccaatcatgtttcttgacctctcgggcgtgtagtagactgggcactcaaaggtttgcaggtctgaggctgtctggtcagaatcctgggaggccgacggttcagtaatctaaaaacaaagattcctagtcagttaacagttaaaaccagtagatcacattttctgtgagtagacggtatttacgtttgtgcatggaacgtatctaacgctagggtagttgcgtgttgaaattgtgtctagagaagttaaagtagtgataatttgatgtacctgagaggcaacactggacatcagttttaacctgtttttaggtcttggacagtattgtactgttttgtcttacgcacattattacatttccctcgtgaaatcacaggtaatgagaattcacaagtttggcttttcctggccaagtctggtgattacctttgttggcaaaaagagtatgtcgggaaattcacagcatagctgactgggcagtgagtcttccagcacttcctgctcaggatcccatcgtgctccctccatgaataaaccaaaaatgtaaactcctttgggagagtggtcctggtgttgctgatgagagaggggaagggtcaggggacttctttcacaagtcatgagcctcagctgagattgcctcctgacccctgctgtctatgtctagtatgctgcagcccagcgtatgctgccctgaatgcttagggtaaaccagactctagatttctaaggtttcttagagggagaatgcaactgtgaaaggagtcagcaagttgtgctcaaacttgcctgcttctcctacagggctccctcacttgggaaagatttgggaattgaaagcaggcagggaacaattctgtagcgcatcattgatacaggaaagttaagtctttaacttggaataagagtttgggtttgtgctcgcttcggcagcacatatactaaaagagaagattagcatggcccctgcacaaggatgacacgcaaattcgtgaagcgttccatattttttcagagacaaagtttggagctgagacgaaaggatgggccatccagagactgtctcacccggggatccatcccaaaagcagccaccaaactcgacactatagcatatgccagcaagattttgctgaaaggaccctgatatagctgtctcttgtgaggctgtgccggggcctggcaaacacagaagtggatgctcacagttacctgttggatggaacacagggcccccaatggaggagctagagaaagtacccaaggagctgaagaggtctgcaacctgataggtggaacaacaatatgaattaaccagtacccccagagctcgagtctctagctgcatatgtagcagaagatggcctagtcagccatcattgggaaaagaggccccttggtcttgcaaactttatatgccctagtacaagggaacaccagggccaagaagtgggagtgggtgggtaggggagcggggtgggggggcggcggagggggtataggggactttcgggatagcatttgaaatgtaaatgaagaaaatatctaataaaaagtttggttttatggctgggcgtggtggtgtaagcctttaatcccagcacttgggcggcagaagcaggaggatatctgagctttgaggccggcctggtctacaaagtgagtttcaggacagccagggctacacagagaaaccctgtctctgtctctctgtctctgtctctgtctctgtctctctctctctctctctctcacacacacacacacacacacgtttctgatgaactctgaggtagaaaataccagcagctccaatatcacatgtgtccagggtagcagatgggctatacagctgctgatctggggtttgggggcaggatagatgaggcctacactgccctggagcctttgttcctctggtgaatctggtaagcccttgaggcaaagtgggcactgatgtccagggtcacatcactgacatggagtcacagtatggagaggccacagtgtgctcagggacattctatagcctgtgtattctggatgcctaagaacaagttttattttcactttattctataaaagttttcctgggaattactttgtacgatgcctcgtcttttccccttaccatttatgtaaatgacagatctcaccccatgcacacggtctcaagttgccttttcttataaatcatgttcatttcttataatttgcacacttgataatatgatttccacttatactcccatgatttgccatggtattcttttgagacagggttccatgtagcccaggcttgccttgaactcttagtgattgacacaaccttgaactactactcctcttgcctcgcctttctgagttctgggatcacagtgtgggttgccacaccaaatgtggccgagagagatatgtaagccttttctctgaggaacacagtttgtaagtcattctccagagagccatttaaaagtaaacggaagctatcgtaatttatcctaaattgaagtcgttttagtgtaaagcagaaggaagcgagaacctgcttacatacacttcatgctgacgtctgtccttccggcctcaaagtttatatgcatggtttctcgaccgctcttcagacttgtaacccacaggctgactttacattcctagtctcatctctaaatctcaccttgttcagtcttcattcccccagctgagactctaggactcctgttttcaaaccttatagggacacaagttaggctcagtatttcttctgcagagaacttctgttaaccatcaattgtttctgtagttggctccccctgcaacccccaaacataaacctaagggaaggcagtccattgtggaggttgaacaacaggaataggaaaaagaggagcattgtgagccagacggcatgtgctctccaacagatggcacgacactcatgagagacagcatgagtgacactccgtgccgtcttcccacacagcgactggtattccacctagcactccacaagcttctcaatactggaaaatacgaggcacgggaatgcgggcgtccccaaagaaacaaaaggaattcaaaacatgtacaagaatattacaaacccacctcaagatagagccaggagagtcaccaaactggatcaaggaagaaattaaaattcctagaatcaaatgaaactgagaacattgtgggtacagtgctggcagctgtcctgagaagactgtgcttacagtaaagataaaacagactctaatgaaatgacctgatgcatctctccaagctctggaaaatccaggagcagctaaacccacgtccacagacggcaacaaagaatccggagcagagcaggtgagtgaggaaaagaacagcgtgtgacagtaagcagacaaccaggttaacaagactgaccaagggaaccaaaagaaacacaaggtgcagactagtaaagtcaatgacggggagttgctacgcctgaataattagggatgctttgaaaagattccaacaaaccggaaaatctagacaagatgggtaaatttctaagtgcatatgacaacagaaattaaagccagaatatatttattagtctaaacatacccatagcaaactaagataaagcattgcttacaagtcttagtacaaagaaacggttggagaagtagtacactgctaagtctgcccagctttcaagtaaggcctgataccagtacttgtcagattgcatcaggttgaaaggaaggaacagcaccaagctttctgtgctcatgaaagacaagagaactacaaggcagtctcctccattaacatagatgcagaaagcatcgcaaagtaattgtaagctgacttcatggtcatgttaagatcatagctgacttcatgatcatgttaagatcatatatcagccaagctagtgtcatcccagggatgcaaggttggtttgacatatgaatcaataaaagtgtaattcataaagacaagtcacatgatcatctcaaaggaagtcatgagaaaagtcctgagcaaactaggaaaagacagctttcttcctcattgtaataaagaacaacacaagcttataggcaacattttgctaaagatggaaaatagcactttttcttggcacaggcaagggtgtccgttgtcttcactcattgaataaagggttctataagaagagaaaggtgaaatgcaataaatcaggaagaaaagcggtctcccccgccctcctgtgttaaagatcatgaccaaaagcaacttagagggaaaagggtttatttagctcagctcagtcccctgagggacgccaaggcagcagcagttcaagcagggcaggaacctgtaggcaggagctggagtagagactatggaggaatgctgcttgctggcctggtccccatgacctgctcagtccactttcttaaacagccaggatcatctgcccaggaagagcacttccccccagtgagctgggccctcccatcactcataagtcaaggaaaagccctatagacttcctacaagcaatctgactcaggcgttttactctactgaggtttcttttcccagtcccagataactgtgtgaagttgacaaaatgaagcaagcatacaaggcgactaaccaggatactatccctttggacagttaacattttatctttacaagaccttatggactccaccaaaaagcagcattaaaaagctttcagaagaatagcaggatacaaagcattaaaaaataagtagattttcatgggtgaggtggtccacacctttaatcccagcacttggcatcctgagttccaggccagcctggtttacatagtaagttctaggctagagtgtatctacatattgacttccaggatagccagcattacatagtgggtgggaccatcttagaacagaaacccaagtgagcaatggtaacagcaaaaaattagtagctcttatattcatcaaaactgaacttgctgatagagatatcaggaaaaaacatcctttttacagtaacctaaaaagtaaaaatgtctgggaataaacctaaccatggagataaaatcctgaaaagttttaagatactgaaaaaagaaattgaagacatcggatgatggaaagaccttctatgctcctgaattggtagactttgtcaaaatcgctgtgcctctaaaagcaatctgcagatccaatacacatctaccaaaattccaatggtagtcttcacagaactaggagaaaacccctagaatctgtacgaaaacactaaagatcacagatagctaaagcaactctaagcagaaaacacagctggaggtgtgatattacctgccctcaaactgtgctgctgcctagctgcaacattatggatgtcacttaggcacaaaagcacacagagacatgaagacacagagaagctcacagaactgtgggcacttacattctgtctgtacagctaagtgagccaggcttttagtcataagatggaggctggaccctttctggtctccttagcacccagtacctggaaagctctcctgactatgttgagcctcttctggagaagtttggagatatcatcctcttgagtgacactgatgttataaattactttgtgagtgaaagtgagggtgtccatcgagattccttgcgcccttccatagtcttgaagcacagcagtaagaaaggctttgaagaaaaacaatgtcagagttctggtaagccttaggtttcctgtggggtaggcactatggctgccccgtggagatgaagggaagagccagggaggaaggatagtgtggtttcggtatcagattactcctagataaaacatttcattttacagtggagcttgggaagaagcagaatgttctaaagagaggagaaatattccatcctgcagtgaaccttaaaactcgctaagtaggggctggtgagatggctcagtgggtaagagcacccgactgctctcccgaaggtcaggagttcaaatcccagcaaccacatggtggctcacaaccatccgtaacgagatctgacgccctcttctggaatgtctgaagacagctacagtgtacttacatataataaataaataaatctttaaaaaaaaaaaaaaactcgctaagtaagcaattcagaagcttcaggaagtttctgaaactgactagtttcaccataacaccccccccccgcccccaagtgtcaacaaagagtaaggattgctgagagatcctctcaggcatgctggacatcctgggcaaggcactccagcttgttgagctacctgcaagctgtgcagtgagctccaggaccatagcctttatgagccatcacccatgctggggtagctttggtgttgcagttttgaatcatttctgcttctgtaagtaacactaatgtattggttcactgagtttggactttggtggtgtccttatcttggttggttccctatctgctgtcaatagatgcttgttgacacttacccaggaatagtgtcacacaccatggggtgagcctggagggcagcagtggagccagccacatacactttcaggtctgtgacacaagttattctgtaggtccagtttcccactccctttgtgcagggagaggggtcacagtgctggtccctgagccttggctggtcttacgttggctcatcactgtgccttacagtaatcttggtcacagagctaggtaattggtgaatgagcatgtgatcctggcaatgtcatagagacattgaggaaaggtctttcttttctgggctccctaacctgccagtattttaccctgggttgcatggagggaaagtacagatgttaaggacaaggtcaagcctacgtgaagatgattccttcatccctctgagctagaggtggccttgaattcttctgagctctgtctgccctgtcacatcatctcaaacagggagactagctggttctgcttcccaacttctcctatctacctccttctctcctggcccaggatccctgactgaagccacagccagcttttgactggagacagagtagacttctctatggccaaggctaagaccaaagttgaacttctccagcctaccaaagccctccttctttgtcatatcatcagtgtctatggccaacctcgcctgcctccctccatccctctctttctctctccttcccactctctccttccctctcgccttccctctctcctcctctctctctccctccctccttgtagctctccctctctccctccctccttccctctcttcctccctccctccctccctccctccctttctttccccctcccttcctgattctttctttctcttctttgcatcaactccctgatgtctctcctacagccatctatatagcttcaggccgcacttgctgtctgtggatcttgtgtctgtacttggttaaacagttatttttaagtcaggctaaattaaaaacatagtcccttgggtgagtccttcaaagtcctctaagttactaggtagttgtaggactttgggctggtttctttcccccacaacccttttaaaaatatttttttcctactagacttctcactttatatatgagtgttttgctttcattatgcctgtgtaccacatgtgtgcttggtgcttctgtgtgcttcttggcactggatgttcgggcgctggagttatgggtggttgtgaaacgctacatcagtgctggtaaccaagcttgggtcctctgcaggatgactgctgagccatctcttcagggcctcaggcgagtttttctttcctagctggatatacagattacaacaaccttcaaagaccacggagggaacagaacagggctggcagcctgtgctgctgcttgtgtggatgctgcttattgtcctcgtcttcctgcttgggcaatacttgctggcaagtggcaagtctcatcttcaagtcccttccttagtggccttcagtggccatcagttagtatctccctgttttatgtactaaggagcgatttgttcacatatgggctcatgggaagttacccattcattcaagtattgactgtaagcttcgctggtgttggacaagttaggtactaggggtgccacagagataaaggaaacccagcttacccctgtggagcttagtccactgtggcttcctcccaggtccctatgggtcttggctccctgcttcacattccacttagtgtctgtgctgagcaggtaggctacagcagacatttggccatcaattcttgttaataagtgtctgaggtatggcatttcctcttgttgtaggcattagagagggtcttggttctgggtctttgatagaaagaaccttgccaaggcctagtggggccttgggtatctcaagttatcctggagatagggagaggaggtggggtagggcaggcttagggcccatgggcctgcaggcgctgtcttttgtgctagtggaatggagtggctgcatgcaaacatgccagagccagatgtgggtgtgccctgggcgagagcactcactcaccttgtggggagaagaaagcagagagccagtatcgtgcagggaacccatcagtgatttcagttttgaagtcagtaggatgtctggatttctggccaagctgtctccaggttgtgataaacaacatgtacctggtgagaagccagggggagggcagggtatctgagagcatggccgctgctccctctcaagtggccttggcagcctccactagtctaccagggagcagctctgaccactcaccccggtctacctcagcctcagttttatactttcatggacacggggcataacttgaggcgtcttaggggaaagggagggtggactgtggaagccatggattttgaaacacctgctgggctgggagcaatctgatcatttgtttctgagttgcaggctttgcccacggttgggactcaatgtgtgtctgtctgggcacaggctgggacacagaacctctgggtttgcattgcaatacttctgtattctagttgtgacaccttgggtagatcatttcctgtgctgaagcttattccttcctgaaacaggatgatgacagggtcggtacccattccctaccacagggtgactgtgaaactgagtcagggagacacaactagggtttttgacccagtactccacattcccccggggtcacttttccaggcagagtgccagatggcggggagaaacatatgaggttatttccagctctcagcatgggaaccttgcacaggagcccaacttccaggtctctgttctctcatcccaaaaggaaggggtgagaagaaagaaaacccatgaga

SEQ ID NO: 652 - DNA, 3371 bp, Mus musculus
gggacctcgggggcgcgagagcgcggccggctgtgtcgcgcgcggagtcgccgctggctgctggtgactgtcctggagtggctggagttcccgccggagcgcggccagactaattttagaaaatgccaagtaggaagtttgttgagggtgaagtggtcagaggccgatggcctgggagctccctttattatgaagtagagattctgagccacgacaacaaatcccagctctacactgtaaaatacaaagatggcaccgaactggaactgaaggagagtgatatcaagcctttaaaatcctttaagcaaagaaaaagtggctcgatttccagctctccctctcgacgccgtggcagccgcagccgcagccgctcaagatcacgttcccgatccccgggcagagcaccgaaaggctccagaagatccgtctctgcttcccatgagggtgacgtgaaggagaagaaggagaaggagatgaggagggaaattctgcaagttaagctgactccgcttgtgttgaagccgttcggaaacagcgtcagcgtgtacaacggggagcccgaacacatggagaagaacgctacgccgtataaagacaagcaggaaagaatcattttgtcaacagaagacagatatatagttacacagtacagccttcgtcccaggagagaagaggtcaaagccaaagaaatagagtctgaggaacaaaaccttgtcaccaaaggacccgcacctttgggaacctttcaagtgaccactccacagaggaaggacttggagtttggaggagtacctggtgcggtcctcatcatgctgggcctgcccgcctgcgtcctcttgctgctgctgcagtgcaggcagaaggacccggggctgctccacttccctccacctctgccggctctccacgagctgtgggaacccagggtgtgcggcgtttacctcctctggtttttcgttcaagctctcttccaccttctaccagttgggaaggttgcagaaggaacacctcttgttgatggaagaagactccagtatagactgaatggattgtatgccttcattctgacatctgcagccctgggagcagctgtcttctggggtgttgagctgtgctacctgtacactcacttcctgcagttggcactggcagccaccgggttctccgtgctcctgagtgcttacctctatgttcgctctctgcgagccccgagggaggagctgtcgccagccagttccggaaatgctgtctacgacttcttcattggccgagagttaaacccgcgacttggtgctttcgatctcaagttcttttgtgagttgcgccctggattgattggatgggtggttattaacttagtgatgcttctgatggaaatgaaaattcaggagcgagctgctccgtccttggcaatgatcttggttaacagtttccagctcttatatgtggtggacgccctctggaatgaggaagcactgctgacctccatggacatcatgcacgacggctttggcttcatgctggcctttggggatttagtgtgggttccatttacctacagcctccaggccttttacctggtcagccatccccatgacttgtcctggccattggcttctgtcatcattgctctgaaatgtttcaaccacctcctgccatacttctacattatctacttcaccgccttgcttatccatcgagaggcccgggatgaacaccagtgcaggaggaagtacggcctggcctgggagaagtactgccagcgagtgccctaccgcatattcccctacatttactgacctgtgctgcttgcctggcagctcagacctctcccagaaacaagggaaagtccaaatgaactaatgtgatgcactgacaggatctctaggtttgtttttgagtcaggactatagagccaaatagtacatcttttaatgtagttaaatttattcttatggcagttaaagatggtaaaatttgcttattaggaaaattttaatccctaaaaatcttaacttttatttttgttggttttttttttttcaattttttttttctttttgccatttgatttttcttaattgaaaactcttattaaagtacatctacgtttcattgtgcttagaacagaattctctttaagtcagtttattagtctataaatcaagcaaaacccagcccaatattggtgttatagctgaagaataagggcagattacttgcaggacctgtttaaaggaccattcatagcagtgactccacttcagcctttaaaagtgcatttggaaatataaacacatagacgacttttatgtaatatatggtaacttttgatttttctgtacagtttttgaatgtgagataattgtcagaaactaagtagttttttaacagaatattttcagtgttttaaattaagttttgtaaagtaattacaattcatttaaagttaaaacataggaaagttatttttctttatccaaagtttgtgaatttggctttgctacctcaatttgcaggtgtgtgtttgcctttataaaatgttgcaaatagaaaaaaaaatatatattttttgagtaacagcactatttaaacatttttacacacattggtgttggaaaaattgccattttaggctactatttttatatattttttgacttaaaattcaacagtgtttttgctactgtttagctaatacagtttatattaatttgtatcctttatgtttttagaactctctagaaaggagttctacctgatacaactttaagttttctctctgtttaatggatgtgtataagctgtttgtagccttcagtactagtgaggttggatagtttcccagtcactgtccctgagcaggacaagtggcaagttcactagacttttttattcaaagctacattgtcctcagagtaaacataaggatgcaatacatatagtgtgtacatttgggtttctattacacataccacatgtgagctagatgcaaaatattcaggtcttcctgctctgtagcttagagtgtcaagtggctgtgcccgtctgatcatgccgtgctacgctctgcattctgtcattctttactgttttactagtcctaaggtgttcagcaggtggttttctatcatgctttctgctggaatcaacatggtatgtgttaataagcttacaaggaaacaactttgggttctttgcctggttctgaaagggcggacagtgccacagtatctggacattaggtgcaagttgtttttaatttgatgtttggcaagctttgtaataaaattttggttggaaacaaaaagttgaaaataaagagttgctgttagagcctcatttctttgccacagctttgggattaccag

SEQ ID NO: 653 - protein, 555 aa, Mus musculus
KMPSRKFVEGEVVRGRWPGSSLYYEVEILSHDNKSQLYTVKYKDGTELELKESDIKPLKSFKQRKSGSISSSPSRRRGSRSRSRSRSRSRSPGRAPKGSRRSVSASHEGDVKEKKEKEMRREILQVKLTPLVLKPFGNSVSVYNGEPEHMEKNATPYKDKQERIILSTEDRYIVTQYSLRPRREEVKAKEIESEEQNLVTKGPAPLGTFQVTTPQRKDLEFGGVPGAVLIMLGLPACVLLLLLQCRQKDPGLLHFPPPLPALHELWEPRVCGVYLLWFFVQALFHLLPVGKVAEGTPLVDGRRLQYRLNGAFILTSAALGAAVFWGVELCYLYTHFLQLAATGFSVLLSAYLYVRSLRAPREELSPASSGNAVYDFFIGRELNPRLGAFDLKFFCELRPGLIGWVVINLVMLLMEMKIQERAAPSLAMILVNSFQLLYVVDALWNEEALLTSMDIMHDGFGFMLAFGDLVWVPFTYSLQAFYLVSHPHDLSWPLASVIIALKCFNHLLPYFYIIYFTALLIHREARDEHQCRRKYGLAWEKYCQRVPYRIFPYIY

SEQ ID NO: 654 - DNA, 47419 bp, Homo sapiens
  misc_feature (1)...(47419): n = A,T,C or G
gagacagagtctcgctctggcagttgcccaggctggagtgcagtggcatgatctcagctcactacaacctccgcctcccaggttcaagcaattctcatgccttagcctccaagtagttgggaatacaggcatgctccaccacgcctggctaatttctgtatttttagtagagacggggtttcaccatgttggccaggccactctcaaactcctgacctcaggtgatccacctaccttggcctcccaaagtgctgggattagggcgtgagccaccacacccggcctgatcaagtctttatagaccaaggatagcacttagttgagaagagggctgagaggagcctgggtggagttttgttaaggagagaatttttgtaagtagtatttatcgttggtttgagtaggtattaatgagcaaagtattttcaaagtaactgacaggaatttatgttgtccttttgagtgtaataaagaggactaattattaatgggaatccctaatctgactttatgatttgaaaaccttaagaagggagcgatatcctgttaaattcatgttcagtgctgaagaattttttccagaagctcatacattatccagcaggcacaaggacagctgaagtatgtttaaggatatggcacttctttttaaaaatgaacacaaagggatctgactagcctgccttggccaggaggaggagcccccttctggcaggcctagcaaaggagatgtgggaactgggcatctttccttctggtcaggatgggagttctggccttgacttacggagcaataggagttctctataggaccaggaagatgaatacacaaaacatcagtaaaagtaaaatagaaaaaagaagtagaacttttttttaaaaagggaggaactatatatttgcagaaatgacatttttgaataacagaataacacagaccaggtaatttataatgaacagcactaaatgcctgcctctggtgagggccttcttgctgtgtcactccatggccagaaggtggaagggccaagagatgaaagggggctgaccctgcccttttataatggcagtaatgccgcccatgagggtgcagccctcatggcctgatcacctcttaaaggtcccacctctcaacattgttacgatgccaactaaatttcaaatgaattttggcgaagacaaacattcaaaccataggactaagtaaataaaaaccatatctgtatagtcaaataggattaaagtagacctaaaaatggcattgtgtttggcaatatgacttaccgtggagaatgactgggaactgtcaattcagagtaacatgacttgctttgctacagcagtgaaatttctgggatcctagcctcttgtatctaaagtaagcaagcaaaatatcatcagcaacttagtatgaatatatagtttttttctgctgaaatactcatgccaattaatacttacagttgttgaataactatcaagccaactctgtacaactttcaaataaatctacgttgcaattatatgtcatctgtttaaaaggataaaatattgatatttttagtcatttatgtaggtgtgtgttatgactaaaatgattcaatacactactgtgctccaaataggttttatgttgtacctcttgctcaagtaaaatgaaaaaatttaaaacaattatgcaaatttggttttaaatattcatctcaaatattttatattttattccccttaaatgtgttttaaacagatttaatcacattgggtactgtactaagtgtactacaaagattacagtgatcctgcccttgatatcatacctacaagtgaatattctaagatagtccctggaaaggaagacataaagacagtcctacagaatccagaataggtatcagaattaaaatagaccagccatggaagaaagaatcaaagggtgagagacaaggacaagttcacatgcatggtgctctttgagagagcagggatgagtgttctttgctccagaaatgtagacaaaacgcccacaagctatattctcattagcctgggatgtctccagctgacattgacagtgggatcatgtaatatgaattgtgtgtggcgaccggaagtcaagggctaagggagctaagaggctgcttggggaccctaacgggtttggagggtagaaagaacatatgctttggaatccagagaactgggttagaatttcttttccagccccaatttggtgggtgcgctgtattgcaactttgctgacctgagtctcagtttcctcgtcctgaaagagggggtgatgcctattttgttgagttgatttgagccataaataaggtaaggactggtaagtgacacagaacagggcctcattagaaatgagtccccttccctctccttctctttctccattgttctgatgccaactgtagttgctacacacttttcctaaagggtatggtgtagttttgttgatagagtgggagcaattgctgaacagacatgaagtgctaaacattaacactgatgggctgagccttatcttgtccagaagggaagcaacatggtaattacatgttacctagatggtactttctgttccacaattgagcccctgtctgcctctgaatgtagactttgggtgggaggtggggaagaaggctgccctctgggactcgcagttttagcaaccatgccaaaacaagccatgcacctgtgttccctgtaggttttaaaaagaaacatttagttacatattctgaattaagagagatggtggcaacccaggtggagaaaagggtatttaagcacagcagagtccccaccatggggctgtgagcctgtggcagacagcaagagagacaccgaagataggcttccgcacctctccagccggtgggaacagtcagtgccagcggaggctttatctcttcttgcctcagtccagcctgtggcagctcagtaactggaacaagagcgtttactaccttctgacctttaggagaacatatatgacacagtttcatgatgaacacattcatttacttaatggggagagatacaaggagaaattaaatatacttcctgcctgggaggagtgcagatgcccataacatgggaaggcagtgacagatgtatgtggggactgccctaggaagttttgctggggatgagcaagaacaggccactctcaaaagaagggggaggcattccaagcaacaagagaggaaaaggcttatctgaggactcatcagaaatttggtagaactgagggtggagggggtgggaaagagaaggcaggtgctggaaagagaagaggatgttgagcctaccagaaatccattagggtgagtttttgaaggccttgtctgtgtcatgttactaagtttgatttttttttcctgcagataaatatttcaggactctctacctatccaaacgcattttaggcgaattttaaaaaacagttattaattagcaaacattaaaataaatgtgaataataatcacttcctgaacagtccaaggacctttaagttttaagattaatccagcaggttagatttttcagttagagtagcatggaagaaaagacgaagttacgtcttttatgttgaagtgtgcactacaggatgattcaaaggatttaggcggttagagaaaaaacaacaaacgcattaaaacattattgacacatctgctactgaaaacactctttcatctatttatagttgactaaaaatggtgacttaacgaacttgaaataaaatgattacactaagggttatgattgcctgatatgttctaacaggtatatagcatttaatcctcacaattacctagtgtaccttgtgcagaatgggtacacttttttgtttttttttttttgagacagagtttcactcttgtcgtccagactggagtgcagtggagggatcttggctcactgcaacctctgcttcccgggttcaagcaattctcctgcttcagtctcccaagtagctgggattacaggcatgtaccaccacgcctggctaatttttgtatttttagtagagacggggtttcgccatgttagccaggctggccaaactcctgacctcaagtgatctgcctgctttggcctcccaaagtgctgggattacaggtgtgagccaccgcacctggccagaatgggtactttttatccccattttacagatgaggaaatcaggacctggataacttgctggataagggctgagtggcagccctggagcttcagacactgcattcctggcccagtgtcacttccatggtcactctatgccctttagttgaggtaggaggatcttttgatagatcgaatgatattgacatcattctcatagttttttcctattatgagctgttactccaccccagccaggctggtcttcactaatttctccttgtactgagtgttggatcaatcttagaattgtctccctccttctctccacctaatcaatcgatcaccaaatcaatcaattaattcaacaaatagtcacctattatgtgccaagaactatcaacaaaagcaacatagacctggtttcactagaattataatctagtaaattctggtactgaattctgttcctctttctggctggcaataagtaacgtaaatcaaggttgcatgtgcttatgcatctgaccgtcttgctaacgcaggtgcctgctctagaacctatgatgagaacatatgctttggagtccggaaaaacttggtttgaagcacagcttgccacacactgtgtgatctttctgattctcagtgtcctcattcagtttaaatgtcctttacccttagttttaattctttattattattttttaaaaagtaaatttccttagaagttttcagaatacattaattctacagccagtaaagaaatagttttccaaaacaagagagcacactttgccagagcagttaatctcatgatgctctggccagagaggaggagaaggctgtatggtggcagccactcccatccctgacagccccctctccctacccccctacctcttggccagtctcttcagcctggccagcaggtatggactcttattaatctaaggctcaacatatcatcagtcctttgggaagacactcgggtgctgcacaagcttcagaacagctttctagtattcctttctataaatcaagtaagtggtttaaagcctcagataggaaaccgtgaaggaaaataaatcattacggtcaccatgacctatcttttcgccagaggttctccaactggagcctgcttctatcagaatcctctggagagctggatggctgagcccaccccaagcttcaagcttcaggagcggacctgagaagctgcatttctttctttctttttcttcctttctttcagatggagttttgctctatcgcctaggctggagtgcagcagcacaatctcggctcactgcaacctccgcctcctgggtttaggtgattcttctgcctcagcctcctgagtagctgggattacaggcatgcaccaccatgcccagctaatttttgtatttttattagagatggggttttgtcatgttggccaggctggtcttgaacttctgaccttaagtgatccgcccacttcggcctcccaaagtgctgggattacaggcatgacgcaccgcacccagccagaagctgcatttctaacaagcccccaggagaagctctgctgctgagcagggaccataccttgagaactcctgcactttgctagttggtttgggagacaatggaatcacactgccttggataagtctggggaagtattaacctccccatacctcctcagtttcttcagctataagatcacctacctgggacagcttttatgagggtaaatcagttagaacacagggagcactttgagcaacagctgggggcgaagtaaaaactgaacaaagattatttatcattattattacctcatatcctgctgctgttttccctctatcaacaagtcattaaagcacacatatcccacatcttctaagttcctccactgaagcagtatacttgctccatctattcaaatagtttccccttctaatttatgtattaacaaataaatgtttaatattgagaatgtttaaataggcttgggcatcgtggctcatgcctgtaagcccagtgtgtccagaattggtgggttcttggtctcactgacttcaagaatgaagccgcggaccctcacggtgagtgttacagttcttaaaggtggcgtgtccagaatttgttccttcggatgttcagatgtgttcagacttttcttccttctggtgggtttgtggtctcactggctcaggagtgaagctgcagaccttcacagtgagtgtcacaactcataaacgcaatgcagacgcagagtgagcagcagcaagacttactgcaaacagcaaaagaacaaagtttccaaaaagtggaaagacacctgagcatcttgccactgctggcttgggcagcctgcttttattcccttatctggccccacccacatcctgctgattggtccattttacagagagctgattggtctgttttgacagggtgctgattggtatgtttacaatccctgagctagacacaaaagttctcaaagtccccactagattaactagacacagagcactgattggtgcattcacaaaccctgagctagacacagggtgctgattggtgcatttacaaaccttgagctggacacagagtgctgattggtgtatttacaatcccttagctagacataaaggttctccaagtccctgctagattagctagacacagagcactgattggtgcacttacaaaccttgagctagacacagggggctgattggtgtgttcacaaaccctgagcaagacacagagtgctgactggtgtatttacaatcccttagctagacataaagtttctccaagtccccaccagattagctagatacacagtgctgattggtgcatttacaaaccttgagctagacacagagtgctgattggtgtatttacaatcccttagctagacataaaggttctccaagtccccgctagacccaggagcccagctggcttcacctagtggatcctgcatcagggagcccgccagtcccacgacctgtgcccgcactactcctcagcccttgggcggtcggaatgggaccgggcgcgtggagcagggggcagcgctcatctgggaggctcaggccgctcaggagcccatggtgtgggggaggctcaggcatggcaggctgcaggtccccagcctttccctgcggggaggcagctgaggtccagcgagaattccagcacagcgctggtgggccaggccggcactgctgggagacccagcgcatcctccgcagctgctggcctgggtactaagcccctcactgcctggggcctgcggaactggccagccgctccgagtgcggggcctgccgagcccacgcccacctggaacttgcactggcctgcaagcccagtgctcagccctggttcccacccacgcctgtccctccacacctccccgcaaggtgagggagcccgctccggcctcggccagcccagagaggggctcccacagtgcagtggcaggctgaagggctcctcaagagcggccagagtgggcgccgaggccgaggaggtgcagagagtgagcgagggctgctagggctgccagcacgctgtcacctctcaccagcactttgggaggccgaggtgggtagatcacttgcagtcaggagttggagactagcctggccaacacggccaaaccccatctcttctaaaaatacaaaaattagctgggcatggtggcgtgcacctgtaatcccagctactcggggctgaggtgagaagattgcttgaacccaggaggcacaggcagtagtgacccaagatcgtgtcattgcgctcccagcctgggtgacagagggagacaccatctcaaaaaaaaaaaaaaaaaaaaaaaagaggataagtgctgcaaacatacatatagtatgtagaagaagtttcaaataattttaaattgctattgagatggacataatgcatcatgttaattgtgagctccatttctgtgtgaatagaaaccatatcaaacatcatcagtagaaatgtgtttttatcggacagcttttgaggtacctctaccttatgaataaaggctttctgcagtttgcagcatacagaagtttgttccttatgtaacagtaccaaaagaatccaactggatctcacgccacgtgaaactttacctacacgtctttcctgaaagagatgtttcaatcctgggaaccgagatcctctggagaccagagccaaataactgccacattggaatgcattccgctgggggttcctgtattttatatatgaaagcttcctggccgcatgtgtgttttggttggctttagtggtaggactgaagggttttgctttgcttttgttatgtgaatggggaaaggggctttgccactcatggcctcattaacaacaatggtgccaagatgcggacttttaagtgacttttactttatagattctgaaaacccacaacttgctagttgtgagtgacaagcatctttctgagaactttctgaaaattccccacttccaagtttacacagcctttagtagacttaaaaaagaagagaaaaataccaaacagttcctttgttgagaaagcagcctacatatagatctgattgttcatggtatgtttgagtccacgaagtagaaatgaacaaaaattattgcttagttttcctgatgtcaaatcagttttgttttaaaaatgtcattagtaatttattaggtaaaatgttagctaagctaactctagttaatttacaaagttttggcttcattttgttatgatgagactttataaacctgatctttaaaataaggttcttaaaatttttaaaaatttattttatttattttttgagacagagtttcgctcttcttgcccaggctgagtggcagtggcatgatctcagctcattgcaaccttcacctcccaggttcaagcgattcttctgcttcagcctcccgagtagctgggactacaggtgctcgccaccgtgcccagctaatttttgtatttttttagtagagatggggtttcaccatgttggccaagttggtctcgaactcctgctcaggtgatccaaccgcctcggcttcccaaagtgctgggattataggcgtgagccacggcgcctggccaggtgtttttttttttttttttgaaacgaatcttcttctatttcacaagtggaaatcatccaggaaatgtgcacctcaagggaaatccagtgaaatcttgattctgggtagaacatatgagaaaagaatagtgtagcactcactgcttggctatttgggataggatctgtcttaggtccccataagcgcttttatttctgtgtaatttactgcaaaactctatgaggtaggactaatattatcttatgtcaagggttaagacaattgagacttgggggtttgtcaaaaataaaagattttctgactttggagtgcgatgtgcatttctgttgcacagatctccaccaagggcaaattcgatggcaatgacaatttgatgtcagaacttctcaggaaaggctctgatgaactcattcacactgcatgtgaatgactgagaaaactcgatgtattttcacttttttttttttaagaagtaaacctgggtgttttgtagttctatgagaaaatgaaagctgaagctaggctatagatgaaaagttctattcattattacaatttaataatgcttccaaaatagcaattcacttaaatatacctagttagggtgttaagaaatactttgattaaaaccacactgcaaaatagggaacttcaatggactgctttaaactctcgacctcaaaggaaggaaatcaactaaccgataatgaaaactagcagaaaaaaaaaagcttaggatccgtaacagattcggagtcaacaatgacatgactcagcattttggggttcaattaaaaccaggcttgtaggttgcaggtcaagttgtgtttcggtgtgtaacgcataaaacttcttgttccacgctccgcggtgttggggattttctactgcatctcgacagcatctcgggtaacaaccgagcccctcctcgcagcgtaagtcgtaggagccctcggccattcttccccctccctcccgccgccggtcccagcatcggtccgggttcgcttctacgcaggttcagcggccgcggacacaaaagcgcccctgctcgccttcgatgccgctgcttggtccaggggcttctgtgggattttaacacgctaaggagggcactcatagtgttttaccgagaaacgctttcgagctcggatctttggtgatcacttcaagaatgtattagttttctttgtagcttaaaaaaaaatctcgttcgccaagccacctggcaccccaaacactgctgcgagcgctgggagggaaagggcgggagcgcgcgggctccgtgtgctgcgagggcgcctgggcggctgagataaggcggtggcaaacgtcgcgctccgggccgccccgccagactcggtttcccccgctcaccggcctccccgcccccaggcagggtggggcggggcggacgcgccacggcgcgcgaccaatcgacagcgccggggatgattcaaaaggtcgaggagccaatgggagccccgggcggcctcgccggtggggaggggaggcgaggggaggggagaagcgccgcgaggcggggccggggaggcgcgcgcccggcttgcgggactgcggggcgcgagagcgcggccgggtagcgtcgcgcgcgtggatctgccgccgggttgctgtgcgactattctccgggagccgtccgtgtcaccgccggaacctggcgcaggtgagtgcttccacccccgccctgctcccagctccccgcggcgcgttcttcgaggggccgctgggggaggaagcccgaggccggcgcaggggccgggccggggaccctgggcgcggggcctggcgcggcggccttcccctcctctcctcgcctcctcgtctcctcccctcctcgccttttctggcccagtcgggtggtcggggcggcggcgggcgaggctggagctcgcccgagccgggcccgctgcggaaatggagctgggggttttaaactgcggacgtttccctccatgttggcggcgcggcgcggctgtggagcggcggcggcagggagggttcgtgggcgcctttgtcctgccccaccgcagcctggctcccggcccctccgagcgcccgtctgacagatgagcaggcggccccgcggtcctgcagtaggaggctgacagggcgcggcggcctggcgggacggggaagggtctgcggccgaggtgggcttagattcgcgctgcttgtcactggctttgagggtcgtggtcgtcgcggtttggtgattctccaggcacactgcatggctgctcgctcctatgcgttgaattccttcgcccggacagtctcaaaaatcgggtatttaggcgggtgtgcgtgttcctgctaaagcacggtcctgctttttcacctttttgagggttcagaaaaatgttctaatgacagccagcctcgcactgccagtagcctcaaggggcacttagtaaagcacttgctttcggagggctttgttgaaggcgctttcccagagtgattacggggcccggtcgggtgttcacacgagggcgcggtagataccgtggtccgcgcgtggacacctgcagcgcgaggcgcggcgcctgggcagtgccagggtgaacaggcccccggggaccttgcacgtaaacacgtgtagatctgtagttacgcattgtagtaactggtgtgtgggagaagatggagctacggagaagagcagagggatcctaatttagattaggcaacaagtccagtttaagttttgtttctcaggctgcctgggaagagggagaagaacgagcaggaggggaatgatgagctgcccaaggatgtttatggggaagaaggcgcttctgcctttacagccaggaaggtggcctttctgttgcttcatgaagcaaagggcgcggagcaaggcccggggttcctgtttgcattttgcctagtggggctaccggggctcaggtgtgaaaaggaagctgtccaacgtcattcgagcgtcttgctctatgccacgtttagatgaatttggagaagtgaaggaaagatggctggagacccctgtaatgttaatgagcagagaattgttgtgttcacaaacagtaacataccggagctggaatgtgtgaggattgcagtgccagttgactctgaagttagcgggcatctggcttaatagagaaaaacctgagggtctccgtgtttttcctgtttatggcgaatgaggacattgggtgcagtgaacaaaatttttctttacaaacacacttgcctaaaacatctcttgtaagaaaatcctgtgtgtatcttgactcctgtaggtgagtgcatagtgagtgacacgaacaaatgtggggcttttgtgtgccatcctggctatttcactcctgtgggggagtatattaggatgtgattgcactgtatcctcacgtttgacaattgtgtgtggatcttgtgtaaagtgggggtgcacatcatgttgttggcttcatcttttggaacatttgtgtataagataatggtcttctaagaagaatgccggttcattttgtttgtttttcaagcaaatcttaattcttcttttaaaaagtaagctttagagacctaacaggtatccaccatatgtgttaacttgttcaacccagaataattgataagaatctttttggcactggcctgcgtttatattacacagatactgtgtatgtggtgtgtaagtgcaatggaaagatgccagtaaataagtttttaagaacacgcagaaactgttcaagggtcttttaaaacctcaagtagcccctgcgtcctgaagggcttgtgtttcaaaagtttataaagagttttttgcaacttgagcatcttcctgtaggaagacataattgccttcttttaactctggctgaccagtgtaggagagctagtactagtaagagtggtttgattttggggggcctagggaggaggagggggctcaagagaagagagaaggagggtacatttccttcctctttctttgtacttggaggctctgagctaaatgttgaaataggcaaagctggatgttgtcaccttccgtttttatgcccctgctcatgcagaggtgttcactgcccccctgctccctaagtgcccctcgggtgactcagccaggcctgacttcatcccgaaaacttgtgggctcctccccactactccaagcccaaacccattcattaccccagtgatgcccaatctcaggtaggtgtagggaagaaagctgcctctcttacctaatgtgttaattgactgacatcctctaatcaccagataagtacttgtgttttctttcatctaccaacctagctgccatctctgtaaactagtagagcttgttaagttttttcacagacgattaacagtgaaaaaatgtggtggttaagaaaggcctccctcaccccgcctccccccccactctcccactactcccttggggtaggtaattcaactttctccttaattccagagtcttcaaaggttcctaaatgttgcttttattgtatcatcagctcttaacaggagccagtgaggaatgtacattgataggcttggacaatacatcaagaagtgcttagttggtgaaatgaaggtgatttgggggacagctcatatctgtcctactggctgccccttggacgtggccccagctagttcatgtggtactggggaaggtcggcagccctggttttgttgtgtggaaatgtgattccgctggtcagccgatggagcggcattactgtctggcagctggaagtacccagctatcaattgatatttcaaaaagggtggcagacaggcctcacgtaagtggcagttcttgcagattgcttgtggattcctagagtattgtggggcttgtgggccatgttttgaatcagaggaaaagaatgttataattgggggttgatggctgctgtaggcttgagagaagtgagcttggatgaaggcaaccaccctggcttaggtgggtggttggcagagttacttggtatgcatttgtactttagctgtaagagttgaaagctaaataacccccaaatttattcattacagacttggaattatttttcttcctattgttgggttatagtcatgttaattgtacatccttgattttcccagtctggtttatagtttgctgtttttaataaaggcaatttgttaaaaatacaattaaatgcatttttaaagccattgtaaattgatacgcaaatttacaaatgagaaaatgtgttctttgtgagattgtgcctcattttttgattagcgagaactgtgatcacggtaggtgggtaacattttacatagtgtgaacttatggcgcctatatacattgttataattaatctttagtgtcacatagataacgcagtggctaaatcatcctctcaaatgattccaaatgagattgaatgtagcctttctggccctaaaatcctgaccagtcaattctggaaagttgtattttagtgatcagcctgtggaaaaagacaaatacataaatgtgtatgtattgactcaaatttttttctttaaaactattcaggttaattatagaaaatgccaagtaggaaatttgccgatggtgaagtggtaagaggtcgatggcctgggagttcactttattatgaagtagaaattctgagccacgacagcacctcccagctttacactgtaaagtataaagatggaacagagcttgaattgaaagagaatgatattaaggtaagagctcctttggtttatcagagtgtgtttacagtaagtgggaaataactctaagtatggtttctaagctcaggatagtcagttcagctcggtttgaaggcagaggattgagctcttgctttgggtcacatactgtttttggctctgggaatgtatgaatgaggcatagtccttgttcccaagaagctcacacttactgggaaagacagccatttgcatctgttggtcccctgggtttactacgttctgtgtctggagtttgctgtgggtggtgttgagtgtatcaagggtagagaagagccctgggcttcaggggaggctttcagaggcagtgacacctagccaagtgctgagaacaaacaggaaaaacagcagttgatggggctgtttctgcagagagggcagtatgccaaagtcaggggtctgggggacacagtcagccaagtgctggaagggggtggtaggggagggctaagcaggagccaggctgggggggcttttatattccatgcccaagggtttgggcttcatcctgaacaccaaggatttaatcaggagagtgacattaattagattcgagtctagcccagggcttttcaacctgtctggtgagggcctgggttttaagatatctgatccgtagtatacaaacatttatataaaatgccataaaaatgagttactagaaaaataaagacatacacaatagacgactcacagttttactatcagattcgatagatatgagattactttgtcaaaatgctataaacatttccatacacctatttctcaattttggtacttgcacagattagtaacgagcatttctaggacccatggctgaggatgacactttgagtgctctagaccaggaataaagcacagaaagtaaatattttagactttatgggagcggctccaggcagtatggaagggagcagacatggcagtgttccagtacaactttatggacagtgaaatttgaattttggataattttcacacttcaggaaatactgttcttttgattttgtttgtaatcatttaagaatgtaaaagccattcttagtaggaaggccacacaaaaattggggtgagggacttggcctggggcataatttgtctacatccctagaagcaacataaggagattcggagtaggtggggacacagtgaaacagttcccagtcatccaagctcatgttttattttcaagatctgcttatgtgttttgttcagagtgaaactgtggtactgtttttttttttttggtctgtgtgcttatttattttgtcctgtcgtctcagttttaatccatgttaattattacccttcttgcatatggtgttggaaataagtacagctaattggtttagatacattcgtttcatggaaataccttcaaagaacaggaatggaaaggctgcatttgtctcatgaaagatggatcattatgaaagcattttccattggcttcatctgatccattctcagatcctaacatttcccgtgctgattttagagttaatggtagcagttcctgcctttgttatcctcttctagtgtgggtctgtctgtatgtgttatgatttgtggtaaagctctttgccttcttccccctttctagcctttaacttcctttaggcaaaggaaaggtggctcaacttccagttccccttccagacgccgagggagtcgatcaaggtcacgctcccgatcccccggtcgaccacctaaaagtgcccgccgatctgcttctgcttcccaccaggccgacattaaggaagcaaggagggaagtggaagttaaattgactccgctgattctggtacttgtgtttatccttatacagccttttgtcttccgctttatgtatatatttactcaagttacttgcagttaataatattaaaatgtcactgaaacatcaaatctaagttgatgactttgggagttttcatataaaacaaatgtttggaatagaaagttttaaatatcaatggaaaagaatgtccttcagttaccagaaatgctatttaatattttagtttttaaaaaagcagcgttcaaatttgaaatagatgtagcttgtagattgaactgcgtaaggtttttacagtgtataaaagttcatatcatgtatgaaatggtaagacaaacctgtattacggaaacattcttactcttagcatcattatactttatcactttacctattcaaagatgattttagtggaattactttcaagatgtaagctttgaaatatcagggtgcatggagcctgtagatcttgtacaaatagtattttagatagtagaccaaagacaaagtatgttaagtaaaaagaataaaagtaatcttctattcacttaatgttaacctcttttctggatagaaggcacacagactttgagacagagtcttgctctgtcacccaggctggagcgcagtggcgcaatctcagctcactgcaagctccgcctcctgggttcacgccattctcctgcctcagcctaccgagtagctgggactacaggcgcccaccaccatgcctggctgattttttgtatttttagtagagacagggtttcaccgtgttagccaggatggtctcgatttcctgacctcgtgatccactcgcctcggcctcccaaagtgctgggattacaggcgtgagccactgcgcccggcaacagacttttaataaactttaaaaactggattatatacatactgctcagtagtcagctttaagacattttaaaatattgggataacctttcagagtgtatttttctacatcatttttgttgttgtattctatagtatggatatatggtaaattgtatacatgtaacttaatcgttaaagtcagctctgtcaatgatagacatttagtgtttttccttccatattttcactattacaaacaagtatttttatgtaacatctgattatttccttaggatggattcttacaagtggaactgctaggtcagctgtatggtgcagatttgaggcttttaatacatattgccagattgcatcaagaaagtttatagtagtatcagtgtatgaatgctcagtttctcattctgagtattataatttttttttttttttttggagaatgtggctgtcagacattttcaacttactgttctaacttacattttgaattagaacattttaactattagtggctctctttaccaccccgggactccaggaacagatgctgtgtgatactttgttatcctttcatttttaatatttagtgactgctatatttttacagtgtaatcttacagtcctggtgtcacaagaaccacagaagctttgcctcttacctggtagtgccttgggcctactgtgtgttgcataagtacccactatttcttagttttccattatgggctattttggagcagtgaatgtctttttgaatgtcttttgttttttatccagttaatgaactaatttaccaatttttactttctctgcctttcatagtaaatacccctaaaatctatcaatgaaattatgacattcagtctgattacgtgaaagatcaaagttgtttttttttttttttgaggcggagtttcattcttgttgcccaggctggagtgcaatggcgcggtcttggctcaatgcaacctccgtctccgggttcaagagattttcctgcctcagcttccgaagtagctggaattacaggtgcccgctaccgtgcgtggctaatttttttgtatttttagtagagacagggtttcaccatgttggccaggctggtcttgaactcctgacctcaggtgatccacccgccttggcctcccaaagtgctgggattacaggtgtgagccaccgtgcctggccagatgaaagattttatgtagaaatctatccaatatttcagagactgggaaattctagtcagttttattccttttcatttttaacaaaatgagggttaaattcgtcagaattaaggctgtgaaaaatctgttttattgcttgattccaaaacagtaagtttttaccatcatgtttctttttaataagttacagttcttttgattaaatgtttatattcttcaatttagaagccatttggaaatagcatcagcagatataatggggagcctgagcatattgagagaaatgacgcacctcataaaaatacacaggtgggaaagtgttccctttcatcttggttgtttttttttttcttttttttggttaaaagtgactctcccttgagaagcacattgaaaattgtaatattttataacctgttctaaaattctgtccttaaattaagactgaatataatttcacaaatttattcttactagtgtatagctgtattgagatgctgaaatagttaatgcagtagcattaatggtaattgttcactgcagatatttaatttttaaatttttcatttaggaaaaattcaatttgtcacaagaaagcagttacatagcaacacagtatagccttcgtccaagaagagaagaagtcaaattaaaagaaatagattctaaggaagaaaaatacgttgcaaaagaactggcagtgagaacctttgaagtgacccccatccgggcaaaggacttggagtttggaggagtacctggtaggcctcagagctgggcccagagagggcaggtggggtgagctaggggtggttgccacaaggtgaactggaaaggcctctctgaagacatctgaggcaggcaaggtaatgagcctggtgggaacctgtggaagagccttccagagaaggaacagtgggtgcaaaggcttgaggtgggagcattttgagggattatggagtagaaaggatgccattgtagctgtgtttaaaacttttagcagtctgttcagaggttttgagcacagaagtacaaagaagtgataaaggaaggttgatctgggagtttgtatagcatagatggttacttatcagggacagagagctctgctaatagtcagacctgaggcggcaggggccagcagtgggcctcagctgcctgcataaaatgggatcccggaggctgccctacctgctaggcgggttgattgtgagggtcaaagatctgaagtgtgcagagttttggagttactaagtgggtggaactgatgaaattttatgagctagtaaaagaaaagacttcttgtctaaatggctcaaaatcctgcatggcttaattgctttgtattttgttataacctttggctagctggcctgttacagatgctgtccagcatcacttaaaatctgcacacattacatgaacgtgacactattttaattgttagaaactgaggaatataaagttttttgttaagattaggctgataatttttagatgttctgatcttcagtttgctggagtttcaacacattcgctccttagtggttggaggtcaaatgttttagagcttggtttctgaggtgggtgtagctattcaatgttggacctctttctttttttttttatttttatttatttattttttttactactttgatgcccatggttgccaggccaccagaggtgacaggtagagatgggagtttttgatggtacattagaaattggtttcagacagttagccagataacgagttctgatcttaacaaatctaacatgattcttaaataaataaaccagattgaaatttgagcctcgaatgttcatgaattgtttgcaggtgtgtttctcatcatgtttggcctgcctgtgttcctcttcctgttgctgttgatgtgtaaacagaaagatcccagtcttctgaatttccctcctcctttgccagctttgtatgagttatgggaaaccagagtatttggggtctacctcctgtggtttttgattcaagtcctgttctacctactgccaattggaaaggtacgtttatggtaattctgttttgttttaataagatgaggtctcactatattgtccaggcgggtctccaatttctgggatcaagtgatcctcttgccgcagcctcctgagtcgctgggaccacaggcctgtgccatgctgcccagccttagagtagtttaaaggttaaaggctgttgttggtcataattcccaaaacttagttcatgaagccatttctcttgtgctgtctgtataacacttgcttattaggaggaacttaaaaaaaaatctgattgagatttcttgtgtaacttttcaaaccaaatagaaaagaataggctattttgcaaagtagccgactctcagtggaggttgctatggaaaaaaaattcactcttagtatgtgtcatttcagatgcagcattttaaatgattaattgataggctactgggctcgatggactttagtctacatcttttactttaaaaaagtatgaaaagtttctaattttcatctctttcagaagcttgttgtcaagaacattttacgttgttttcagattcctgcaatatctttaaaatttgtctctccattgctaagtgtagttttttcttctttcagtagaatcctttacttggatatatttaaagaaacatgagattccctaagtaataaataatttatttaaagatcttattcttagggctttgcaagtttgccaactgtctgtaaaccaaaggatcggttttactggtgaatgccagtgataggagggtagagctgcaggcttaatactgtggagtgagaccataactttagtggctctagcaagaatttttgtgataaagaccttcagtcatttctacagtaagcctctacagttaaattcagattcatttagggtaaggtgatttcagagtatcaaggaaagcagttttggtgtttaaagtcatatatgtatatactcatagactaaagtgactaaaagcatatatattaaaatatatattaatattatgcagtcatcccttgatatccttggggagtggttccaggacctcctgtacataccaaaatctgaggatgctgaaggccctgataagaaatagtatagtatttgcatataacctgtgtgcatcttccttgtatactttgttgcctttaggttgcttataatacctaatacaacgtaagtgccatgtaaatagttatcatactgtattagggaataaggacaagaaaaagaagtctgtacatattcagctcagatgcaattttttccgaaatattttggatctggttggttgaatccatggatgtggatcccgtcgatacggagggctgactgtatatttggatctatatattcacagattaaagcctaacacagcatttactagactcctttaatagataaggatcatctgaaattagcatgtggcattttactaatcctgtgatctcaaacagcttttacgtttctcttgggagaggaggaatgctagctaatgaaatctgtagctaatgataagataaagtagtttagcccagagcaaatgatactatatttatattttacagtttgaaatgaattgctacatttctgaatagttattttgtggggtaaaacgtggctgcattgagcaagtggactttttactgagccagttctattgggtaccatgcctgtgggtatctctgtgctgaatgctgtgagtgatgccgaatgaagagaggagatggttctgatgcatgatgcgtgctcacagtctctctctctctctctctctttttttttttttcttgagacagggtcttgctctgttgcccaggctggagtgcagtggtgcaatctgcaacctcctcctgggctgaagtcatcttcccacttcagcctcccgagtagctgggaccacaggcgcgtgccaccaggcttggctagtttttgtattttgtatttttgtagagaggggatttcaccatgttgcccaggctggtctccaactcctggactcaagtgatcctcccaccttgacctctcaaagtgctgggattacaggcatgagtcaccacacctggtttctcacagtctcttattgcagataaaagaatcacatgaaatggttaaataactggatgggcaatatatatataatatatagcagagcaagtaagcatatgagtatgcgtcatcaaatagcacttgggtcatagtagagtggataaacagggtagagcccaattgaaaaggaccccacaaatggaagacaatggaatcatactgttactttgtaagagtatggtagccattggtagatgtttgagctagggatccactagatataaaggtatttaagcacatttagtcttgaggtggtggtacacaggagtgtggcagggagcgtggctgttgcagttgcttggtcctacactaggaagtcattactgaatttgtatttaagataaattcctgaaggtggaattgcgtcattaaagggcttgccactagggtttttgaaacatattactaaatttccatgttacaagatatcttccttcttgggcgtgttgaaaattaagtgatactagaatatatatatatgtgtgtgtatatatgtatatatgatggtgatgtgcttagtaaatttgtaaattttttttcttttaaggttgtagaaggaacgcctcttattgatggaagaagactcaagtatagattaaatggtgattttctttttttaagactcaaattgatgatttgatagcttaaacttctaagtgttaaactctttgttaaagctgattagaccagagtagtaagtgataaattatttcttagtagttggaagagcaactgtttatacctgtagccaacttgtataaattatgccattaaagtaacatagcctcttagtcactcttgtccactctccagttttattttcttaatagtgctcatcactgttagaaatcattgcacttgtctaggattttatcacctgaggtgttacacggatgtgggcatccaggccactcctgctgcgtgagctgctcttgtccttgctcatgtcctctgggttgtcccttgaatattcgtcacacacacttcctgggcctttgcctggagaacttacccccaaacgtctgacacctgcatcttcacctccatctgtcttctgctgagagaagccttcaggtccctttctctcccctgctctgttttgtttttctgtctgacatttgtgcctccacacatcagtgtatttgtctcttcattagggtctctccactagaatgtggcttcatgggctaggacttggctatgttcattgtgacactcttggtgctaggaagatgggcatgtagtgggtgctcattcatatgtgagtgctggatggatgagttgtgagcttgctgggcagctcaataaatggatagaccttgttccctgtgggtccggcatctcgcactgtaagagcatgtgctgagtgcttcagtccagctttgtcatttgaagactttggcaaagtacagatctattttgtagtcatccttgaatgattttccatttgacaagacggagtagagtgttttccttttcttgagaattacattatgtattgtaatggttgaactttttatcctttcaattcttcattttttaactttggatactttgtttagagacttacgcagcatctactctgtctgcagtcactccactgggttctaaaggggaagccaaagatagtttagacaccttctgccttttagtgccagtcatgtgataaaacgtctcccccagctccagagtctgacccctggtgggtgcttaatacttatcattggtattgttagactttttgttgcttttaccaaattctttgctgatggagcaagttttagaacctttggcaccctccctccctctggtggttcacttaccacaccagggaaggtgagtctggggtgaggtgggttgttgactttgccgccaggtcctttgatttcagtgttttgtgtgtttctctgtaggtaccaattcttttctaagtaatcttgtgttatattttcacttccctctgaggggtgtggtacattcagagactgagcacagcacttggacatggagctcttggagccagtgggggagtggctggccaagttgcttgatcctttttaaaaatttcctcatctaattactctggttcaagtattgagatttcttttcgagattttacgattattaactaaggaggttcctaagacattttggatgattatttttaatccacataggctagagagcaaaagactgctttatctaaccattcttttttaaaattacattttatgaaaggtaaatgaatattttcaaaagtcagaatttagaagttattgtttggagtatttgtggaaaatgtggattcagataatttgagacaactattttactttacaaaaggtttggttttagaattctcatataaataacagctacctcttttttgcttttgaccgtttatccaaatggatttgatgactttttaggatcacagctctttgaggcactcagctcctttgaaagcaaaactatttctttagccaaaagaaaaaaattggatcttccagtgagcctttctgtgtggctgcaggactagcccggaacgagagttctgtggagcgtcacagggcgggtgctttttaacttggcattgcacgtgaatgtccccgcctgctgtccctaccccccaggtactcgcagtcccctgcctagcctcgggcatttgtgttgtggcatcttttctgcgggtggcatgttaagatctctgttctggatgatagagttttactagaatcttttgaaaccattattggcaacttggttaagtataaatatttataattttgtaactaccaacctggctcggtgcctgacccctggtaggtgcataataccctccccttaggtaatggcattagactttaaaatatgtgtttggcccagctctgttaataattagccatttgactttgtgcctgagagtttggattgtgggaattttcaggttgcacttcttgtctgttttcccttaattaaaagcaaataatgaccatttgaactgaaaaagaatcaatatgttaaactatttggaaagttctacaagagataatggtatgtatattgaaaattatacctcagacattgcttatttgcatatttgtgtgtatttagtctgaataatgaaattaagactttaaaaatgaacattgcattgtttcatagtggcgtaagtttcatgtgagccttgggttaatattaattttccacttccttttttttttttttttaaaggattctatgcttttatcctgacatctgcagtcatcggaacatctctcttccagggcgtagagtttcattacgtgtacagtcattttcttcagtttgcacttgcggccactgttttttgtgtggtcttgagtgtgtatctctacatgcgctctttgaaagcgccccggaatgacctgtcgcctgccagctctggtgagcagtgatgaattgcatgttggatgaatgcgtcccagagccctccagcagccatttccagatttgaatagattgctttttttctaacttcatttttgggaaatgaagagaagtaagaaaaaatgaaaagatgaagaaaaacgttaaagagatatgaatttaaaggaagaaaatatttttgttttaccttcatactttcttactcatttcttttttttgcagttgcttggtgacagtaagacgtttagtaaacttacaggcattttgacttatgacaaatattatttctttgtccaaaatagtaaacactctttaaaaaacaaaaaacaacagaggttactggccgggtgaggtggctcatgcctgtaatcccagcacttcgggaggccaaggcgggtggatcacctgaggtcaggagtttgagaccagcctggccaatatggtgaaaccccatctctactaaaaatacaaaaatcagctgggcgtggtggtgcacacctataatcccatctactcgggaggctgaggcaagagaatcgcttgagcgtgggaggcggaggttgcagtgagccgagactgtgccactgcactgtagcctgggccacagagcgaggctccatctcaaaacaaaacaaacaaaaaacaagagaaacgagaggttacaaattggttgatgctgacctgaagtatttcaatataaaaaaatgtcgcctatctaaaaaaaatggagtgtaaagtcctttgggggggcccccatgattttggttaacttttttaagaaacctgggcccccggctcccccaaaggctggagcaactgccttttcagtcgggcaggcatctcctggttccgctcgtctgtgccgtcctgtctgcctctcaccaccagagccctgctcagggtcttgcaggcagtggaattgtgagcctggatagtgggcggcagtgccgttgtaaagcctcctgactgggtttggaatgctgtttgggtaaacacttttcctttctcaggaaatgctgtctatgatttcttcattggccgtgaattaaaccctcgaattggtacttttgatctcaaatacttttgtgaattgcgccccggattgattggatgggtatgtctggttttttttcttctaaatttcaattcaataggtctaattaactgctagaaagaaatgtagaccattcaaaaataagcagtgggtggtatatttttagggataattatggctttccataaatctatcaaaatactttcttgtaagtattttccagaggtttaagatgccctgttacaggttatgacaaattaaataacttttctttgctttatttttattatatcagtttatatttatgtaggaaagtgatagtgtggatgaattaatgtaagaaaaaatgcattttcctcctttttaaattttacctagttttaggcttggagttgcagatagagagcaaagagttcccttccacccttcattctgtttctcacaacattaaccttggaggaaaccgtagtgtagtgatgaagaacagcagattaacatagtgacagcattggttaccaagtccacaggcctcagtcgagttcaccagtttttccgctgttgtcctttttctgttccaggaacctcgacaggactccacaatacatttagttgttattccttcttagtcttctctagtctaatagttgtttaggctttccttgtctctcatgaccttgatactttttggaaggtactggttggttattttgtaagtgtccctcagtttgggtcattccagtgttctctttgattgcggtaaagttacccactgtgacaggaacacagaaaggatagctgtgtccttctcagtgcattgggtccaggggcccatggtgctgagatgtcttattcctggtggcgggtaggagttacggtggcgtctgccaggtgtctcagctgtgaagctcactcatgcctttgtagtgctaaggtctctggggaggtgctttgaggctatatactttccccttttgtttcaggtggttattaacttggtgatgcttttggctgaaatgaaaatacaggaccgcgctgttccatccttggccatgattttagttaatagtttccagcttctctatgtggtggatgctctctggaatgaggtaattaattttaagagccgaggccttggagtcagatggctttgagtgggtgagtgacctgtcagagcctcggcttcttgcacacaaagtgaggggagcatggcctgcctccaaggctgcttgagaggaggacgaggccatccatgtgaagctgacgagggagcactgacaggtgggaagtttctaggcatttgggagtgcttcagtgtttatcagctgttcttgtgtttaaaagtaatattctaaatatttaagattggtggatcttggttttgtttttgtgggtggtggtaattatggtatcacatgaaaatggatggattattactaaattagaatggtgtttcttggactgtcaagagtcacctagtttttaaataatgggggagatgttttattgttaatgttttaaaatacaaagactagctctaattagatgaatgtaaaatcagaaatcaagatgcattgaggaaaccagttgaaataaggctaagtttccatcttgtgtcttttttcatacattgattagtctttctactagttgaagactggtaaatgttttgtttgttttctctgtctcagccagcatattccttttaaaaattttgtcttcctcaggcttattttacaagtattttatcgtatttactgttatctttgtaattatctccaaattccaactctagttttctttccatattaaaaacaaatctggcagctgtacatcataatgttccaaaacaagttttagtgacagtctgttgagacaatctgctgacattttgagagaagaccttttctctttgagcctggaacattaaaaaaaattatattatttggtcatcaatactatgtatctcccccacccctgctggctggtctttaattttggccttctatgcaaaattgcagagaacatttagtcagaacaacttcgcaagtttgatattggtgtttcgatgatctccttgttatttaggaagattagggccactttgaggtaaacctcaattacaagcggtgggattagtgctatccgctaattacgggttcctgttgcgctcctaccacttcacagaccctggctcagagcttgggaagctgtgaaggtggtgataacacttcaaatattgactttaaaaattccacgtcgacccaaaattaaacatgtttttgaaattaaaaaacaactgttttgtaaatgcacttactgttaccagtgtagctttgtttgctgttatagaatgaatcgccaaaagagcatataggttacagtttgcaaatcaaatgatatttcacagttgtgctcacctcagaggcttctttaaaccttcctttctagtagctttccactgatcagtgattatttcttctggtttcttctattactagctttctgccatgttgtggttgtcactttttaattggcttagaagttgatattttctatagatttagccaaacattgacttgtgttaaaagaaaattttttgcatcttaaggcaaaacgcttaatgcaatattaacatagccccaggggtagagaactagagttaggaaattgttttctgtctgttctcagtatctcagccagatgataataagcttcttgaggaaagattgtattttatgatttcttcagcattctggcatgccactgggcaattagcagatgcttaataacttctgtcaggtcacttgatagaaatccctctgtattcaagaatgtgctataccttaagaaaactgagactacctgtttaaatatgcatgacccttcctctgagccgtcctgtgaaagccttggggctcaggagctggtggggctaaagtcctccccctacccggcattgggtgcttaccctttgccctctcactgccactcaccacacctgcttttatctgctcccaccaatttgtcacctttatcctcttttggaccaggaatcagatcacaggccttgagagagaagaataagacactcttggggacagaaagttaaaacaccgtgtgtcctcacttatatgtgggcgctaaaaaagttgatgtcatagaagtataaagtagaacagaggatatgggaaggtgggaagggtagggggaagggaaggatagggagaggtttgttaaaggatacaaaattaccactcgataggaggagtaagttctaagttctagtattctataccactgtaggatgactatagttaacagtgatacatagtttcaaatagctagaaggatattgaatattcctaacacaaagaaagaatgtgtttgagatgatggatatgctaattaccctgattggattactatatattacatgtattgcaacatcactgtgtaccccataaatatgtacgattattacatgtcaatttttttttttaaagagaataaagtactctggttaactaaagagtataagcctaaggagctagattttgtgagattggtttttctgtttcatgtgacatctgtttttctgttccatggcctatttgctttcttttctggaaaaaaatgctatttagaggtaccactctttttctttaacctagaactttgattctccaacagagcttatactggctaatatttctacatcagtggtctgtactgaggttctgggtagtttagagattcccttaggccagaccttcagagtgttgaccttggtggtggttccgtattctagagtctggcctgcccgtatcctgggccagaggcgatctggctcatgctaaccaaatcaccagggagtaatgcacttttattaatttacatgagaagcgaagctgtcagttcaccatgttgccaggcagcttaatttcttctgtggaaaatgcacatgaaatgccagattatgaacagaaattagattggtccatgtggaattgaaacaaaaagagttggtgatcttattccttcagcaagcatattttgaacacttctctccatggcgggcactgtgctaggtactggggtggcaaaggtgaaaacacacagcctctgtcttttagaggcttttagtgtagtgaagagtgactagacaagtacagtaacccaattactgcagcctactggtgggtggtgatatctgagaagtgcccaggtctgagcagcaggtcaggagggcagcagagggtgtagggcctatgtggaggttggaggaggggttgtcagcagaggggagggcctgggcatgggggcatgggagatgctttagagatctgttatctccagagcatgagcgagaggctggcgtgacgggagaatgtgacagcagaaagacctagcaggccaggggaaccagatctctctcccctttaacaaaaaaatgttgattgtggacccgcccatagcactttttacatttgcctgtaaactagtactttatttgaatactttaaacacagaagctccttctccctttccccgtctgtatccttataggaagcgttgttgacgaccatggacatcatccacgatggatttggattcatgctggcttttggagacttggtgtgggttccctttatttacagcttccaagccttttatttagtcagtcatccaaatgaagtgtcttggccaatggcttctctaattattgttctgaaacgtgagtattaattttagtctcagtttaatttattaaatattatgtactgaggcttttatgccctgctgtctacatacttgaaacatgccattttgaatggccagcattagctcagtttgaagccatttatcatgagtaataaaaaatctgcattttgcaaagagaatggatggttcgtacttgggttctcagtagtacttgaaacagattattttaaaccatcttgcttttaaatttaataaatttaagttgttttaattcgttttggtaaccatacgtcttttctcttgagtgcctgctttttctggtaggcatcttataaagtaagaagatttgtcttgccttcatagagctcacattctaacaggagaaataagacattcctgccttgctgtgaggtgtgtgagtgagcactaagaggggcttagatgacgggtgttaaagatagagagaacttctctctggggagcgttagtgtgaacttatcggaggatatggtgttcgattggagttttagaggggaaaatgggatggggagatcgaaaagtcaggcactgggaacagctcagcaagggtgtgtggtggggaagtgtgagatgaggttgggaaagactgagaagtccagtttggctgcagctgcggtccaccagggtcagtcatggattttacttcaggatgaattttcattgttcttacactgttcactaaacacttatactagaggttgggcagggaaaattagcagtgaactgcaaatacagatagttttgctacacaagttagtatctgtggtagaagaagttcaaaccattggttaaaattaagatttagtttcaccagtggtttggatgtccatgtcatccattttattattcaagacagtgtattttatagttcagctaaaaatggggaatgtcttagtttgttttgtgctgctcgaacagaatagctgagactaggtaatttgtcatgaaatttatttggctcatggttctggaggccaggaagtcaaagagcatggtgctggaatctggcaagaccccttctgctgcagcatcccagggtggaaggtggaaggacaagagagagtgagggagggcaagagagagtgaggaagagcaagaggggctgaacatacttttataacaaacccactcgagatactgagcccactcctgtgatagccacattaatctgtccatgagggcagaaccctcatgacctaatcatctcttaaaggtgctacctctccacactgttgcattgaggattacgtttccaacacgtgaactttggagaacacattcaaaccaaagcaggaagtaaagttattctcttactagtttattgaggatcgactatataatagttaaatgtcagtgatagattgatttttgacattctgaaatttggataaaattaggaacttatagacttaaagtgggattcagcatgtatttaaagtgcaggatgttttggtgctgattctaagctagtgtttgataataaaatgtttgtgccatggccagtaggtataactaacagatgatatagcttgtaattttgattatactgaactctagtattgattttattgtaatgtaggctatcttagattttatctctttcatggatgtaactatatttgttttgccttcagagcgtttcctaggtggatgattaaagtagtgtgatagatttcggacgggttaccatctttttacatagtgggatttagaggttttgagttgttcttaagaatcaggccaggtgcggtggctcatgcctgtaatcccagcactttgggaggctgaagcaggaggatctcttgagcctaggagtctgctttggaaatttcctcagagcatagaaatcatttttaagagaaattacagatgctattaagcattagagtataactaagttattaacataggaaaatattttaaaattgcagtttgtggttatgtaatcttccgaggtgcaaattctcagaaaaatgcattccggaaaaatcccagtgatccaaagcttgcacgtaagtattgatttatgtttatattatatatattacatgaaggttttatttttctttttgtctcgacatcattaaaaatgtacttttatttttatatagatttaaaaaccattcatacttcaacgggaaaaaatcttctagtttctggatggtggggctttgttcgccaccccaattacttgggtgatctcatcatggccttggcgtggtccctcccatgtggtaagcatttcagaagagtgctagtttgacccttttagccgccagaaagatgtgtgtgtgtgtcctttgtgtgggacagtgtggccaaggtgggtgtgagtctttttgtcgcccttttctactgtgaggttggcctctgtagaagctcctctggcttctgaggggaattgggaattcacagagcctgaagttttactttaagcctaaaagcactattttaagttttcagctgtgcctgatagcttttttctaagtagaatatatagaaattaattcagcttcttaattcatgattcagtgtacatagattgggaaaaactttggtttttaagaagagaaagagattctgtttttctttttgtgtgtctggcctcgtggggagctgggaaagcaggggagcagggagagctgtgggagctggaggtgcttggggagctggggtgtcagggggagctggaggtactggtggagccaggggagctgggggaactgggggagcagggggatcttgggaagctgggggagctgggggaactgggggagcagggggatccaggggagctggtggaggtggaggagctggcccgtgcctgctgcctgtttggtggcccagcctgtggtggaagacagcagtttttcttctttgctgggggaagaagggcgagaaatggagagatgtgtattaactatgaggacagatgttttgattgtgatggattgttagaatggattcatcagtctttgagtagcttctaatttagatacgaccttctgccactttccagtgggattttacagacttgtttaattattctcatcattattagagaaaatgaagtaccttgtggttccatttttagagaatttgggggaaagcaggaaaaaatacattgtagtgataataaaaatatctaatactgtgtactattattatccacaggttttaaccacattctgccttatttctacataatttatttcaccatgttgcttgtccaccgagaagctcgtgacgagtaccactgtaagaagaaatacggcgtggcttgggaaaagtactgtcagcgtgtgccctaccgtatatttccatacatctactaatgctcttctggcttttctacaaaatactcctgcaattccagctgccatttgcaaaaacaaggaaaaaaatccgaaactttcttttgttgcactgacagggtctgtacttttttttttctttttgagtcaggactatggagccgagtagttgatcttttaatatagccgtgtttacttgtattaacttacagttaacataggaaaaatacaagtaaggatgtgagaatttgcattttaatgggaaattttcaacccttaatctgaaaacagaagacagtcttaatataaatgtactgtgaagaatgctattgatgtttatggtttctgattacttttcaaattttgatgtttttttgccagttggcttttcttaaatgaaaacactgttccatttaaagtacatttatgttttattcagtaagagaatagaattttcatttgtttttctttaaatcctttactaattatataatttgaaagcaaaaagaagggcctatattaaatgctgaaagtgaaaagtgatgacattattagcagacactgcttaaaggagaccatttgtagcagttggcttaacctcaacttctaaaactacattgaaaatgtaaatacatagcttagttttttgtaatatatggtgacttcagatttttttgtacagtattttgaatgtgagatgattgtcaggactaactgtctttttaacaaaacattttcagtattttaaataaaattttgtaaagtaatgtgaattaaaaattttggaacaattagaattcattcactattgtatagaagatgctgttaaaacataggaagggtatttttcttgatccaaagtttgtgaatttggctttgctacctcaattgcaggtgtttgtttgcctttataaactgttgcaaatagaaaaaaaatagaataagtatatatttttggagtaacatcaatatttaaacatttttacacagatcggtgtttgaaaatttgccatttcaggctaatatttttatatatttttgactttttaaaagttcatcagtgtttttgctactgttaagcttatgcagtttatactgtattttttatgtatcctttatatttaccaaacctgactccctgtaaaggagtgctgtcttaaaaacaactgaaggggttaaagtcgtttcttttagtttaatagatgtgcataaggtagctttagcaattaaattctagtgaagttgatatagtctcatttttaattgtcctgtaatggaacagtagcaaattcactaaacttttgtgttcagagttaaattgttctcagtactttcaatgtaggggaatgtaataaacatagtgtgtatgtttgggttttaattacacattttatatatgagccatttagatatgcagtgttaattctatactgcatttgaagtgtatgtaacttagcttatgttaatgcagtcatgaagttggtttgctccagcatccggtagtctttaaacattcttttagtgaaattgtcattgttttatcagtgctaatgtgtgcaagcagtttttttattttgcttttctcctggcatcagaaagtggtggcgttttctgtactggattgcaccaaggaagcttttggggaggaaggaaggacattaaattctttccctggtaatgaaaagagccctttatcaatacagtgctgcaatttctggatatcagctacactttgtttttaagtttgtttttgacatgtttatttggcaaattttataatgaagttttaagttgaaaataaaatgtagcaacattttgatcactttggagccttttttttttccctttcttgcttgaaactgagatttttgggaccaagacaggagcccttagattcccacccctgcccagcctcctgttttcctaggatcatctgtttgggacccctggccaactgctgtttaaaactctcagaatgttggaactcaaaggggttagttgggaatcctaactcccagaaaatggtcatgtgtttagtatttgctgtttgagaaaatacagaaatgctaaaactattgtagatccagtcatactttcaaatgcatttgtatgaatcacagaagcatctgtgcatttgaaagacagtacgtgtgtgagagacacacgagacacacacatgtactgtgcctgctgaccgtgctttagtgcttgtttggatttccagttgactctaagcctgaattgtgagatgagatcagacagcttcacctctcaattcttcctgctgcgacgttacattgtgacattacattgcaaaatgtgggtgtgtcagaatatgcaccaataccaagtatacgatttatattttggtgtttagttttgcactgtttggagcaaatgatgaaatataggattttaacaaaagatacaaggtggagtgtttctaggtgcaatttacttaaatatagatggtacagtttcctagacaattacatacatgttttgttcatggctgttaaaagagtctagtgctgggtacaagtcccaccttttctaccccccttactatggagagaggggactgttgggatcttcatttgtgtacacgtgggttatgctttctgcccatggaccattgccatgataaagagacagtgagatgtggcttcaaatgctagctgtgctccctcttagcaatgtgtgtgtgggcaattaatctctttgagcactggtttcctcatgtataaaatctggctgatacgtccacagagtatagaggggcctgaggatgatataggaattattagtgttcaacatagtgctcagttatgttagccattattagtagaataacattcttcctataggaacattgaatttaccaaattctcaggatttggcttttagtggtcagagaggtctagtgaagtcagaaccatattgcactttttttttttttttttttttttaaagagatggggtcttgctttgttgcccaggctggggtgcagtggcgtgatcatagctcaatgcagcctcaacctcctgggctcaagccatcctcctacctcagactctgagtagctgggactaaaggtgcctcatcatgcctggctaattttttaaacaattttttgtaaagacagggtctcattatgttgtcaaggctggtcttgaattcctggcctcaagtgatcctcttgccttggcctccccaagtgccgggattacagacatgagccactgtacccagccagaccgcaattttttttcaagacagagtcttgctctgtcacctaggctagagtgcagtggcacagtctcagctgacagcaacctctgcctcccaggctcaagtgattctcatgcctcagcctcctgagctgggattacagacctgcgccaccacgcccagccaatttgtgtatttttagtagagatgggtttcgtcgtgttgtctaggctggtttcgaagtcctgacctcaggtgatccgcccgccttggcctcccaaagtgctaggattacaggtgtgagccaccacgcccggcccagactgcacttctttaaagaggaaggcccttctcttttgtttcagaagtctgcagctaggtcagcagtgtagtattctgtgtttacttagagaagccaggggaagtattccaaagatctattctacatgtgtatatttagtttattgtatataattttataaaccacttttaccaaaaagttcataaaggcatgccctgatatcctgccaggtgctgtggtttttactgttaggagagtcaaatttgctgtattccgggttgtgctgacctgtactagagcccaaccacagggacattgcacagtcaggtctcatgtacttagaataaaaagcagctgcaagattcccctctgtgttgaagttttcatgtacaaatgaaatagactgcacctgcccagtctggctgaacacacaaatattttataaagggtgttgactacatgtgaatgtcttgaaacatgtaagtctgattagagtcaaaaattaaaatggtttgatatggacatttatttttcattcttctcacaaagcaatgcaacccgcattgtgatccagtgactaggaggtttcttcgttgataaatacactgatgttaaaaagtttgttggtaaaccggtagttgccaaaattcttgacctctcaggtgtctggtaaactgggcattcaaaagcatagagttctgaatctgtctggttggaagcatttggtgttttggtagaaatctttaaaaaaaaaaaaaatccagtagtcaaattgcatagttcaagtgaatcagtagctcacattttctgtatgctaggcttgagggatttgttatgaattagatacatttaaggttaaatggttaatgtaacagcatgtggaaattatacctggagaatttaaagagtattatggctttatagtacatattattgagaacatgggatgtaagtatagcatctactttagattttagtaatattttgggagatttaaaatctttgttgtctgagtatattatcacatctcccttgcaaaattgtagggaatgggaataagagtggtttgtatattactgaagcaacgctcagaggtttaggacttcaggataatagcagggtgattacctttgttggcaaaaagtatatgtcgggaaaatcacagcacatctccagaggcagcgagtcttccagtattttctgttcacgattccatcttgccccctcgatgaataaaccaaaaatgtaaactccagtgtgagaggaagctgagccctaagatggaagagaggtggtgtcagggatccccaggagaagcagcgaccaactggaggctccgtccggaattgagccgaccgatccagaggggctcatcctgcctaaggcatgttgccccaagttctaaggtgaatacttattttttttcctattctgagtgctttaaaaacgacataggcttaggtgtatctatataatcatcctgaactgaaatatatgtattttttccatgacacccttcctcagcatgaagacaaagaccttcaaacacaataaatatgcaaatttctacaattgtaatcgtgtagccgagctttttaggacagaacaagaacagttacaaaaggtgacagagtacactgtgctcaaacattgtcacctacctttaccatagtggccataactacagttttaggctctagaaatgtaaaaaaggcagaggaggggttttttttttttttttttttttttgacatggagtctcgctctgttgcctaggctggagtgcagtggcatgatcttggctcactgcaacctccaccgcctgggttccatcggttctcccacttcagcctcctgagtagctgggattacaggagcacaccaccatgcccgcctaattttttgtatttttagtagagatcgggtttcatcacgttggccaggctggtctcgaactcctgacctcaagtgatccgtctctcttggcctcccaaagtgctgggactacaggtgtgagccaccatgcctggccgggttccatatatttttgaatgatataggttaaatagaggattacattttaatgataaagggttaagtaaaatgagtttctgatgaggtctgtgaagtagaaaatttagttgcctgcagctccaattccaggtgactccaggtgtgcctgaggtaggcctgtgaagccacatgctctcctgcaggtgtgctggagggatgcccagcctggaggagctggtggccaagtaccaggccaccctggagggctctgccatctcctctgatggggcaggtctctgaagagaaggggtgggcaccgctgtcctgagctctcccttgatgcagcctgggccagcttgttgacacaggggaggcagtgtggaacagcctgtgctgtgcctggtgatgccttctgtgttgtccactctggaatgtgactacctggaggtgcaagctgaactcatattaagcacttgctattttggcttattctataaaagaattttggccgggcgcggtggctcatgcctgtaatcccagcactttgggaggctgagcggggggatcacgaggtcagaagatcgagaccatcctggctaacatggtgaaaccccgtctctactaaaaatacaaaaaatattagccgggtgtggtggtgggcgcctgtagtcccagctgcttgggaggctgaggcaggagaatggtgtgaacccgggaggcggagcttgcagtgagctgagatcgtgccactgcactccagcctgggtgacagagcaagactccgtctcaaaaaaaaaacacaaaaaaaaaacaaaaaaagatatatcactgcacgtccactagaatgactaaaactaaaacactaaaaataccgagtgttggcagggatgtggagcaatcttctacattactggtgggcctgtggattggtacaaccacattgaaaaaccatttggcagtatctacaccaaaactaaacatatggccatgtatgaccctcagtnnnnnnnnnnnnnnnnnnnncacaggggaggcagtgtggaacagcctgtgctgtgcctggtgatgccttctgtgttgtccactctggaatgtgactacctggaggtgcaagctgaactcatattaagcacttcctattttggcttattctataaaagaattttggccgggcgcggtggctcacgcctgtaatcccagcactttgggaggctgaggcgggcggatcacgaggtcaggagatcgagaccatcctggctaacacggtgaaaccccgtctctactaaaaatacaaaaaattagccgggctcgggaggctgaggcaggggaatggtgtgaacccaggaggcggaggttgcagtgagctgagatcacgccactgcactccagcctgggcaacagagcaagactccatctcaaaaaaaaaaaaagaattttactgggaattgctttgtataatgctttttacttctcttccccttaacttatataaatgcaaattttcctatactgcatttgttctagtgttgtcctttcctaacaatcttggaagaagttaatctaacgcatttgacaatgtcacttccatttatacttgtttaacttggtcatagcttacatgggtttttcctctgaaaaatctaaactgtaggtaatttgtaaacagccccttttggagtgatttaactcttcaaagagccactcagaataaatggaagtaatcttacttcaactcagtggaagctggttgtttgtataaagcagaaataagtgagaacatctgattagatggatagaggcaaaaagcaaacttaggcgggcagtccatacccctgtgctccctctgtgagtcataagaaaaggccctggtgcacatctgcctctcggtagccttttcatgtctaatgggttatgtaggaagaggttaggctatgggtgtagagtcagctagacttggtgggttcaaagcttatgatctgcctctttgaaccttagtttcctgacctacagaatgaggctaatttgtgaggattaaataatgcaggtaaagagcttagcacatagtacttagtcagtgttggctagcaagcatcagtgccatcattatcaggtagattgggatcttctagagggcagaggccttacgttgttcatctcgatatttccaacagccagagcagttttggacccatattttaaataaacagttggataaacctccagtcgaaaacacatctgaacctgagctttcttccacgtcaatactcttgccaagcggtcacctgatttctcctaaagctccagtgacagggaactccctgtctataaaaggacacgccaccatcatcatcaatttagatcaactgcatgtgtcttccccttggaggtccccctggttggagttctagcagaattagagtctagttcttcatgtatcacccttttcaatatttctttttctcctcagagtcttttgccttgtaggacaaactctcccagttccatccttcttctgacatgttcctaacgttcactaattctgggtagtctcggaatcatcttagtgcagtctgatgagtgctgaggagaggaagaccaggacccagaggccaaacagcatgagtgtccaccacctcctcccactccaaatcccagaatgcaactatgaaagcaccggaaaacaagaagtatccccagtggaccagaaactgtgagaaccctaaagacagaaggcagataggattagaataaggaaaccaccgtcaataatatgcacaataaaaactaaaaacatcaccctctccaagccccccgccccatcctacagaataatttttttttttttttttgagacgggagtctcactctgtcgcgcaggctggagcgcagtggcgcgatctctgctcactgcaagctccgcctcctgggttcacgccattctcctgcctcagcctctcgagtagctgggactacaggcgcccgccactacgcccggctaatttttgtattttcagtagagacggggtttcaccgtgttagccaggatggtctcgatctcctgacctcgtgatctgcccgcctcagcctcacaaagtgctgggattacaggtgtgagacaccgcgcccggcctaatcctacagaataatatcaaataaaatattgatacaaaaatcttgaataaaatattacaattaagatgattcaaccttaggatcttttaataaatcatattgataaaagtgataaattatgtgataatctccataaaccctgaaaagctctctcatcacatttagcttccattcttcattaaaaaattcctaatacaggaatcataccttataaccaactacactccagatagttctatgtactccaccatgttaatgagataaaggataaaaactatctgattatttcaatagaaacaggcccaggcatgtagaattatttgatctatgacaaagttgaagtagggaaagggccatttcaatgaaaaaatggtgctgagtcaggtgggtacccatatggaaccaaaagaactttgatctcacctcatgccatacacaactcaattctcctttttttttttttttttagacagagtctctctctgtcacccaggctggagtgcagtagcacgatctctgctcactgcaacctctgcctcccaagttcaagcaatactcctgcctcagcctcccaagtagctgggattacacatgcgcaccacccaacctggctaattttttgtatttttagtagagatggggttttgccatgttggccaggctagtctggaactcctgatctcaggtgagctgcccaccttgacctctcaaagtgctgggattacaggtgtgagccaccgtgcctggccttcaattatatatagatcatagaaaatgaaaggtaaagcaatatagtttctagaagataacaggagaatattttcatgaacttagtttagggtaggcaaagatttcttaaacagaacataaaaaagcattaaccctaaataaaagatggatacactggactttgttaaaacaaaaaaatttttgttcatcaaaagacaccattaagaaagtgatttggaaagtcacacactgggagaagatgctttcaatacatgtacctgacagcttatattcagaatacacaagaacttctataaatcaatacgacaaaaacagtccacagtcttgaacagaatcttcacaaaagaggaaatccaaatatcaataatcattttaaaaggtgcccaccttaattaatcatcaaggaaatgcaatttaaaatcataaagataacatcgctgtggccgggcgcggtggctcatgcctgtaatcccagcactttgggaggcggagcagggggatcacgaggtcagaagatcgagaccatcctggctaacatggtgaaaccccgtctctactaaaaatacaaaaaatattagccgggtgtggtggtgggcgcctgtagtcccagctgcttgggaggctgaggcaggagaatggtgtgaacccgggaggcggagcttgcagtgagctgagatcgtgccactgcactccagcctgggtgacagagcaagactccgtctcaaaaaaaaaaacaaaacaaaacaaaaaaaagatatatcactggcacgtccactagaatgactaaaactaaaacactaaaaataccgagtgttggcagggatgtggagcaatcttctacattactggtgggcctgtgggattggtacaaccacattgaaaaaccatttggcagtatctacaccaaaactaaacatatggccatgtatgaccctcagtgtatttaatcatgagctccataacaacatttgtgccaatgacagaccacatataccaagctggtcctataagattatgatggagctgaaaaattcctatcacctagcgatgatgtagaggaatgcatccatgcatttctatgtatagatgtgtttgggtacacaaattaccattgtgttacactgcctgcagtgttcaatacagtaacatgctgtacaggtctgtagcctggcagcaataggctatcccatttagcctaggtaagcagtaggctatgccatgtaggtttgtggaagtacactcttaacgatgcatttctcagaatgtatccccatcgttaagtggtacatgattgtacttatttatttattactattttttcaattcttttggttatagccaacctagtgggtgtaaaatggtatttcattatcattttgatttgcacttctctgactaaagatattgagcatcctttcacattctttttgttttttcaaatctttaaaccaatgtctcccaaccctgtctccccttcctccccagcattagtcctggagcagaaaaatagattcccagaacaaattggaatttagaaaatgacagctgtggcccttcaaatcagtggggacagtggcgtgggagtggcagggctggggtgcatggtgcacctggctggctggtgctctgtgctctgcttcagcccaagctgcctccatgggtccccctcactgcaccgctgaggtctgggtaggtgtaggtttccacttagcacctggctgagctctggaataagtcggttgctgggggcaggaatttcggccatgagcagctaggacaggtttgcccactgatttaaaatatcaccttttgatgctgacctcagcagcattctgtcttcatttataataggggatacttagaaagtctgttgattacattgacttaaatcttttattcatgatttatgatcttttatcccccccagaaagagagtggaagacatgaagtctgagggcatttggacttgaagcagggcttgttgatctgcctgtctagtgcctggcatgtggtaagtgctgagtaaaggtttgtaaagggcacaattgattgaatgaataaatgaatgaatgaatgatcaccgtttctaatccttgaagtattccagtaccttaaacgctctcctgactatgttgagtttctttggcataaatacggagaacttctcatccttgtcagtggtgttggaaatcacatggtgggtgaaggtgagggcatccacagcgattcctcgggacctcccatagtcttgaagcacagcagcaagaaaggctttggagaagaacacacaccatcaagttccttgtgagtctcagggcctcctgctggggttagcaacaatgatgtctcatggagaagaaagggaagagtggaggaaaaagagag

SEQ ID NO: 655 - DNA, 3875 bp, Homo sapiens
tagcagaaaaaaaaaagcttaggatccgtaacagattcggagtcaacaatgacatgactcagcattttggggttcaattaaaaccaggcttgtaggttgcaggtcaagttgtgtttcggtgtgtaacgcataaaacttcttgttccacgctccgcggtgttggggattttctactgcatctcgacagcatctcgggtaacaaccgagcccctcctcgcagcgttaattatagaaaatgccaagtaggaaatttgccgatggtgaagtggtaagaggtcgatggcctgggagttcactttattatgaagtagaaattctgagccacgacagcacctcccagctttacactgtaaagtataaagatggaacagagcttgaattgaaagagaatgatattaagcctttaacttcctttaggcaaaggaaaggtggctcaacttccagttccccttccagacgccgagggagtcgatcaaggtcacgctcccgatcccccggtcgaccacctaaaagtgcccgccgatctgcttctgcttcccaccaggccgacattaaggaagcaaggagggaagtggaagttaaattgactccgctgattctgaagccatttggaaatagcatcagcagatataatggggagcctgagcatattgagagaaatgacgcacctcataaaaatacacaggaaaaattcaatttgtcacaagaaagcagttacatagcaacacagtatagccttcgtccaagaagagaagaagtcaaattaaaagaaatagattctaaggaagaaaaatacgttgcaaaagaactggcagtgagaacctttgaagtgacccccatccgggcaaaggacttggagtttggaggagtacctggtgtgtttctcatcatgtttggcctgcctgtgttcctcttcctgttgctgttgatgtgtaaacagaaagatcccagtcttctgaatttccctcctcctttgccagctttgtatgagttatgggaaaccagagtatttggggtctacctcctgtggtttttgattcaagtcctgttctacctactgccaattggaaaggttgtagaaggaacgcctcttattgatggaagaagactcaagtatagattaaatggattctatgcttttatcctgacatctgcagtcatcggaacatctctcttccagggcgtagagtttcattacgtgtacagtcattttcttcagtttgcacttgcggccactgttttttgtgtggtcttgagtgtgtatctctacatgcgctctttgaaagcgccccggaatgacctgtcgcctgccagctctggaaatgctgtctatgatttcttcattggccgtgaattaaaccctcgaattggtacttttgatctcaaatacttttgtgaattgcgccccggattgattggatgggtggttattaacttggtgatgcttttggctgaaatgaaaatacaggaccgcgctgttccatccttggccatgattttagttaatagtttccagcttctctatgtggtggatgctctctggaatgaggaagcgttgttgacgaccatggacatcatccacgatggatttggattcatgctggcttttggagacttggtgtgggttccctttatttacagcttccaagccttttatttagtcagtcatccaaatgaagtgtcttggccaatggcttctctaattattgttctgaaactttgtggttatgtaatcttccgaggtgcaaattctcagaaaaatgcattccggaaaaatcccagtgatccaaagcttgcacatttaaaaaccattcatacttcaacgggaaaaaatcttctagtttctggatggtggggctttgttcgccaccccaattacttgggtgatctcatcatggccttggcgtggtccctcccatgtggttttaaccacattctgccttatttctacataatttatttcaccatgttgcttgtccaccgagaagctcgtgacgagtaccactgtaagaagaaatacggcgtggcttgggaaaagtactgtcagcgtgtgccctaccgtatatttccatacatctactaatgctcttctggcttttctacaaaatactcctgcaattccagctgccatttgcaaaaacaaggaaaaaaatccgaaactttcttttgttgcactgacagggtctgtacttttttttttctttttgagtcaggactatggagccgagtagttgatcttttaatatagccgtgtttacttgtattaacttacagttaacataggaaaaatacaagtaaggatgtgagaatttgcattttaatgggaaattttcaacccttaatctgaaaacagaagacagtcttaatataaatgtactgtgaagaatgctattgatgtttatggtttctgattacttttcaaattttgatgtttttttgccagttggcttttcttaaatgaaaacactgttccatttaaagtacatttatgttttattcagtaagagaatagaattttcatttgtttttctttaaatcctttactaattatataatttgaaagcaaaaagaagggcctatattaaatgctgaaagtgaaaagtgatgacattattagcagacactgcttaaaggagaccatttgtagcagttggcttaacctcaacttctaaaactacattgaaaatgtaaatacatagcttagttttttgtaatatatggtgacttcagatttttttgtacagtattttgaatgtgagatgattgtcaggactaactgtctttttaacaaaacattttcagtattttaaataaaattttgtaaagtaatgtgaattaaaaattttggaacaattagaattcattcactattgtatagaagatgctgttaaaacataggaagggtatttttcttgatccaaagtttgtgaatttggctttgctacctcaattgcaggtgtttgtttgcctttataaactgttgcaaatagaaaaaaaatagaataagtatatatttttggagtaacatcaatatttaaacatttttacacagatcggtgtttgaaaatttgccatttcaggctaatatttttatatatttttgactttttaaaagttcatcagtgtttttgctactgttaagcttatgcagtttatactgtattttttatgtatcctttatatttaccaaacctgactccctgtaaaggagtgctgtcttaaaaacaactgaaggggttaaagtcgtttcttttagtttaatagatgtgcataaggtagctttagcaattaaattctagtgaagttgatatagtctcatttttaattgtcctgtaatggaacagtagcaaattcactaaacttttgtgttcagagttaaattgttctcagtactttcaatgtaggggaatgtaataaacatagtgtgtatgtttgggttttaattacacattttatatatgagccatttagatatgcagtgttaattctatactgcatttgaagtgtatgtaacttagcttatgttaatgcagtcatgaagttggtttgctccagcatccggtagtctttaaacattcttttagtgaaattgtcattgttttatcagtgctaatgtgtgcaagcagtttttttattttgcttttctcctggcatcagaaagtggtggcgttttctgtactggattgcaccaaggaagcttttggggaggaaggaaggacattaaattctttccctggtaatgaaaagagccctttatcaatacagtgctgcaatttctggatatcagctacactttgtttttaagtttgtttttgacatgtttatttggcaaattttataatgaagttttaagttgaaaataaaatgtagcaaca

SEQ ID NO: 656 - protein, 611 aa, Homo sapiens
MPSRKFADGEVVRGRWPGSSLYYEVEILSHDSTSQLYTVKYKDGTELELKENDIKPLTSFRQRKGGSTSSSPSRRRGSRSRSRSRSPGRPPKSARRSASASHQADIKEARREVEVKLTPLILKPFGNSISRYNGEPEHIERNDAPHKNTQEKFNLSQESSYIATQYSLRPRREEVKLKEIDSKEEKYVAKELAVRTFEVTPIRAKDLEFGGVPGVFLIMFGLPVFLFLLLLMCKQKDPSLLNFPPPLPALYELWETRVFGVYLLWFLIQVLFYLLPIGKVVEGTPLIDGRRLKYRLNGFYAFILTSAVIGTSLFQGVEFHYVYSHFLQFAATVFCVVLSVYLYMRSLKAPRNDLSPASSGNAVYDFFIGRELNPRIGTFDLKYFCELRPGLIGWVVINLVMLLAEMKIQDRAVPSLAMILVNSFQLLYVVDALWNEEALLTTMDIIHDGFGFMLAFGDLVWVPFIYSFQAFYLVSHPNEVSWPMASLIIVLKLCGYVIFRGANSQKNAFRKNPSDPKLAHLKTIHTSTGKNLLVSGWWGFVRHPNYLGDLIMAWSLPCGFNHILPYFYIIYFTMLLVHREARDEYHCKKKYGVAWEKYCQRVPYRIFPYIY

SEQ ID NO: 657 - DNA, 3815 bp, Homo sapiens
agaagcgccgcgaggcggggccggggaggcgcgcgcccggcttgcgggactgcggggcgcgagagcgcggccgggtagcgtcgcgcgcgtggatctgccgccgggttgctgtgcgactattctccgggagccgtccgtgtcaccgccggaacctggcgcaggttaattatagaaaatgccaagtaggaaatttgccgatggtgaagtggtaagaggtcgatggcctgggagttcactttattatgaagtagaaattctgagccacgacagcacctcccagctttacactgtaaagtataaagatggaacagagcttgaattgaaagagaatgatattaagcctttaacttcctttaggcaaaggaaaggtggctcaacttccagttccccttccagacgccgagggagtcgatcaaggtcacgctcccgatcccccggtcgaccacctaaaagtgcccgccgatctgcttctgcttcccaccaggccgacattaaggaagcaaggagggaagtggaagttaaattgactccgctgattctgaagccatttggaaatagcatcagcagatataatggggagcctgagcatattgagagaaatgacgcacctcataaaaatacacaggaaaaattcaatttgtcacaagaaagcagttacatagcaacacagtatagccttcgtccaagaagagaagaagtcaaattaaaagaaatagattctaaggaagaaaaatacgttgcaaaagaactggcagtgagaacctttgaagtgacccccatccgggcaaaggacttggagtttggaggagtacctggtgtgtttctcatcatgtttggcctgcctgtgttcctcttcctgttgctgttgatgtgtaaacagaaagatcccagtcttctgaatttccctcctcctttgccagctttgtatgagttatgggaaaccagagtatttggggtctacctcctgtggtttttgattcaagtcctgttctacctactgccaattggaaaggttgtagaaggaacgcctcttattgatggaagaagactcaagtatagattaaatggattctatgcttttatcctgacatctgcagtcatcggaacatctctcttccagggcgtagagtttcattacgtgtacagtcattttcttcagtttgcacttgcggccactgttttttgtgtggtcttgagtgtgtatctctacatgcgctctttgaaagcgccccggaatgacctgtcgcctgccagctctggaaatgctgtctatgatttcttcattggccgtgaattaaaccctcgaattggtacttttgatctcaaatacttttgtgaattgcgccccggattgattggatgggtggttattaacttggtgatgcttttggctgaaatgaaaatacaggaccgcgctgttccatccttggccatgattttagttaatagtttccagcttctctatgtggtggatgctctctggaatgaggaagcgttgttgacgaccatggacatcatccacgatggatttggattcatgctggcttttggagacttggtgtgggttccctttatttacagcttccaagccttttatttagtcagtcatccaaatgaagtgtcttggccaatggcttctctaattattgttctgaaactttgtggttatgtaatcttccgaggtgcaaattctcagaaaaatgcattccggaaaaatcccagtgatccaaagcttgcacatttaaaaaccattcatacttcaacgggaaaaaatcttctagtttctggatggtggggctttgttcgccaccccaattacttgggtgatctcatcatggccttggcgtggtccctcccatgtggttttaaccacattctgccttatttctacataatttatttcaccatgttgcttgtccaccgagaagctcgtgacgagtaccactgtaagaagaaatacggcgtggcttgggaaaagtactgtcagcgtgtgccctaccgtatatttccatacatctactaatgctcttctggcttttctacaaaatactcctgcaattccagctgccatttgcaaaaacaaggaaaaaaatccgaaactttcttttgttgcactgacagggtctgtacttttttttttctttttgagtcaggactatggagccgagtagttgatcttttaatatagccgtgtttacttgtattaacttacagttaacataggaaaaatacaagtaaggatgtgagaatttgcattttaatgggaaattttcaacccttaatctgaaaacagaagacagtcttaatataaatgtactgtgaagaatgctattgatgtttatggtttctgattacttttcaaattttgatgtttttttgccagttggcttttcttaaatgaaaacactgttccatttaaagtacatttatgttttattcagtaagagaatagaattttcatttgtttttctttaaatcctttactaattatataatttgaaagcaaaaagaagggcctatattaaatgctgaaagtgaaaagtgatgacattattagcagacactgcttaaaggagaccatttgtagcagttggcttaacctcaacttctaaaactacattgaaaatgtaaatacatagcttagttttttgtaatatatggtgacttcagatttttttgtacagtattttgaatgtgagatgattgtcaggactaactgtctttttaacaaaacattttcagtattttaaataaaattttgtaaagtaatgtgaattaaaaattttggaacaattagaattcattcactattgtatagaagatgctgttaaaacataggaagggtatttttcttgatccaaagtttgtgaatttggctttgctacctcaattgcaggtgtttgtttgcctttataaactgttgcaaatagaaaaaaaatagaataagtatatatttttggagtaacatcaatatttaaacatttttacacagatcggtgtttgaaaatttgccatttcaggctaatatttttatatatttttgactttttaaaagttcatcagtgtttttgctactgttaagcttatgcagtttatactgtattttttatgtatcctttatatttaccaaacctgactccctgtaaaggagtgctgtcttaaaaacaactgaaggggttaaagtcgtttcttttagtttaatagatgtgcataaggtagctttagcaattaaattctagtgaagttgatatagtctcatttttaattgtcctgtaatggaacagtagcaaattcactaaacttttgtgttcagagttaaattgttctcagtactttcaatgtaggggaatgtaataaacatagtgtgtatgtttgggttttaattacacattttatatatgagccatttagatatgcagtgttaattctatactgcatttgaagtgtatgtaacttagcttatgttaatgcagtcatgaagttggtttgctccagcatccggtagtctttaaacattcttttagtgaaattgtcattgttttatcagtgctaatgtgtgcaagcagtttttttattttgcttttctcctggcatcagaaagtggtggcgttttctgtactggattgcaccaaggaagcttttggggaggaaggaaggacattaaattctttccctggtaatgaaaagagccctttatcaatacagtgctgcaatttctggatatcagctacactttgtttttaagtttgtttttgacatgtttatttggcaaattttataatgaagttttaagttgaaaataaaatgtagcaaca

SEQ ID NO: 658 - protein, 611 aa, Homo sapiens; identical to SEQ ID NO: 656

SEQ ID NO: 659 - DNA, 81463 bp, Mus musculus
  misc_feature (1)...(81463): n = A,T,C or G
gcataaaaaaactagctgtggggcctcaaaagacagcttgtggttaagatggtctgccgctcgtgcagaagatctggactcagttgccattgggtggctccccagttacaggggatctgacgtcctccccttctggcccctgtgggcaccaggcacacaatacacatgataaacatacagacatccagacaaaattcccatacacaataaagttagaaaggagaaagagatggggtttgggggagggagagagggagcagggaagggaaagagggagccgagagggagagagagaaagctgatccatcaagtaagcaaggcagagacggagccagcaagcaatgttcctccatggttcttgtgctaggttcctgccctgatttccttcagtcatgggtttggtctggcagtgtaagatgaagtgacccctctcctcctccagctgcttttagttgtggacacctttgtttgccgtttcagttgacttcagttttttagaagattgtttcttttacatctatgggcatttagttgcctctgaggccagaaaaggtagaatcccttggaagtgaagttaggagctacacagtatgaattgaggatgggggtgaggggggtggagagagagagagagagagagactgtagttatttacttagtgtgcatgcatgctgtatctgtttatacacccggactccagaaaagggcaccagatcctagtacacatggtcctgagccaccttgtgattgctgggaattgagcacggtaccactgaaagagcagcagacagtgctcttagtctctgaaccatctttccagcccatgtaacacagagttttaaaaagaaaggaaaatgaacttaaagatagtgcaatacaagttttaaacaaatgcggcttctccataaaatttattatattttctccctatttaaagctaatatgcatatggtaaattatacacaacagaaagtttgccatcttaaccactttagactgtagaatttggtggcattggttaaattaccttattgtacaacgagcatcagcattcaccacagaaccttttcatccctgacacaaacgctccacgaagggcaagtattccctgccattcagatggcccagcctgtaaggcccgtatatggaggaagccaactgtggaaagtagtcctttgatctcttacaggaagtctgtgatatgcaccccttaccccgaatgaatgcaattaaaagccaccattcttttccttctttccccagcccctggcagccaccatactgctttatgcctctgactttatgtgttttgggaacccattgtaaatggaatcatatagtatttgtccctttgatccccgcttgtttcgtatagtataatgtcctcaaggttcacccgagatacagcattacaacaaaatttattttcttttaaaggcttgaataaaccgttgtatgtatgtatcaccttttggttctctgctcatctctatttgaggtatttgtttttgaacaaagctgctgtgaattggctatgtaaatatctatttgagtccctcttttgggactcatcatctgtctcatataaatgaacacagataacttggtttgatttttcatgaaaaacagctgaggagactcttaatttaacaatacaaattaaagatatgtgactagtttacctatatattctactttagcctttttgtgagataataagtttataaagagtcttgtcccaacaactgatttaagtgcagcatttggtagctggctcatttatggtagttataaaacaagataaatggctatattggcgtttactgtgtgttggccttttacatttcctacaatagttttgggctcaggttgtagtgtaaattgtacagctgtaggaaagccacacataggaaaatagtctgtattctaatgttatgtctgtcagctctagccatctaaaattcaatcatgagtttaaagtgttctttttgcatttaaatctttataacgaagcattttattcagagtgatagaataaattcccagttaatacaaccattcagtaatacatagattttttttctttttagatttatatatttatttttatggtatgagccttcatgtggttgttgagaattgtatttaggatctctgctcgctccggtcaactctgctcgttgagtccctgctcactctgagtcaaagatgtacttattattatatataagtacactgtagccatcttcatacacaccaaaagagaatgacagatttcattacagatggttgtgagccaccatgtggttgctgggatttgaactcaggacctttggaagagcagccagtgctcttgcctgctgagccatcttgccagcccaatacatagtaggtctttagttagggtagtagatgtaaccacagtcatacacttctcaattttttgttgtttttcacttgttcagagggtcttctgtggttttaagttagaattttatcttaacttttctagtcactacttttctataatgaactggtcaaaatatctttgaaaaaaataggtagccatatccttctactcgcctagtagatttaaaggtcacatttgtgttctttagattttcatcactgtgacagaatacctgacacaaacagaatggtttatgtttcagagttttaatctaagtttatattttagagatttaattccaaggtcaccgagctccattgattctgggccagggcacagtgaggcagggcatcacagtgaaagcatgtcatgaagaaaaattactttgtgaccaacaggaagctgagacaggcaggacacaaaatttacccattttaaaggcaccctccagtgactgttttgtagttcccactaatgccatcaatttacacatccaccgccagattaaaccattaaaaagggaatcctcgtggtctcagactgaatgagtgggaaagcaggcgagctgagtattttcctaagtgggtcttctcccactccctcagacagttgtggtcccaccttctatgcttcttcctctgtaataaatgcagcaaaccacgaggaaaagaagtcttttccagttgctttggtcatgtattttgccacagcgataaaaataggtttttgttttgttttttttttttaagttgaaaggtttcaggagaaatctgctgtgtttctgtcctgaggggcttgctctccggccgggtaggtcttcctcaggatgtgccccatgaggccgtcacatcctgttcacggtcagtctcactcgctaccttactgctgttgcctccttctgatagataggttttcattttctctccatgaacgcttaaaaattccatcccagtttctccttaattgtggttctaagaatagaatattgtatatattccttagttttatattttctctctaggcatgctgttgacaatagcaggttctttttattgacttgtatttactgaattttacggatcctgtacttgagtgccagtaagaatgatttcaggtgggtattgtgtgtggtacaggctgcttatccaggcagtcgggaggcaaaagcaggaggaatatcctggaactacatgttgagatcctgtctcaaaaaacaggcaataagatatttttatagctgctgttgttagcacagtttcatgtaacctaggctggcctcaagctctatatgtacctgagctcctggtcctacggcctccatcttccaagtagtggtgtcagaggtgtgtactaccatatcaggtaccgtgcttggagtcaggtcagcacttcaccaaccaagctatatcctttacctgaaattattattttaaagcttaccttccagattcctaagcacgcagctatgttcagtaaggaccttctttctacataccgaggaaagaagtacagttgcgggatttttcatcctgaaaggtggtccatcaggttaacaaagtattttcaaaagcacactgttgtgcttcgggtgaactgacactttttcttggctgtggatggattgttacacctggctgcatttgcattttgtgtatgcacttggatcctgtgggataaagagcttaatagtaacattgctgttgtacctcttagagattaataatactgcctttgtgaaagcgatgactgatgatgcatcttgcctttctacatatttgaagtgtctgcatcccagatggctttcttgctttgcaaaaagaaaaaggaaaaaaagaaaatgtttgtttgctgccattatttgtgtctgctctttgtcagtagcattcacaatgtttttgcaattttcttcaatcggtaaaccacgagaggagaacctgttattagtaagcagaatttctcccatctttagcaggtttcttttaatggaataataacaaaggggaaatgttatttaaaagagaagccttcttatgaatctgctgatatttgaatttagttaatgaaaactttggtatccttaaaatccttcatgtttactttcaattttattttaattattgttacttggcttgaactgaaaattacttcctgagttctagagacaggaagtccatgatcaaggtaaaaataggattggcgtcctctgcggcttctccccaggcacttgtgctaaccatcctattcccacctcctagtatgcccttgtgtgtgtggtgcttctcatccctagagtggttagtgtgtaaaaagtactggtaggcagaagctgtcctattcagttcttcagaaattaacaaccaggcagggtggtacacacctttaatctcagagacaggtagatttctgtgagttcaaggctagtatggtctaaatagtgagttccaggataaccagaggttctgtcttggggagggggtgtgtattaaggatcccatttttatgttgcctcttgaatctgttaaaagaggtacagggttggaatcctgatggtcattttttttctgtgtaagtaagccatcaaatgactcttaagtatgactgctgcctcccagttaaattatggctttggccctgaaattcccttgatcagatagctaactagtgatttctatttcagagagctgggggttggggggagttcaaaacccaagttattcctattttgaaaagcaagaggagggtgtgtgtgtgaaagctactctaggggctggagagatggctcagcaattaagagcatggcagcccacaactgtctgcaaatccaagatctgacatgctcacacaagcataggtgcaggcaaaccaccagtgcacataaaataaacatatatgcatgcacacatacatacatacatacatacatacatacatacgccagagtttaggtgctcagctgtcataccatttactacatctgctgacaattttaaaactacagttactgacagtgacttttcagtcattgcaaagccccaaaggtcacttatacactcctacatacaaaccagccatgggtttggaaacctgtaaacttgaggggaaaatgacttgaagaaacaggagcaaagtccagtgagaagaattttgtctactccttccttggttcaccatgaggaaggcaggaggccacagaggggactgaattttttcaggtgaatagtcatagtgtcttttggggaaggggctgtaagaaattaacaaaaacttcatctcatatatgtaattggcttttatacagttcatgagtgggttcctgagcagtagacaacaatgggttttgtaaggtaggagcacataacaggagacatgggctcgttactgtcggttagctttttcttaagggttaaagccaaggagccttatagaccccttcctctgtgtgtgtggggggagggggcaggcatagaaaattaactgttacccgaggataaatctacttaaagtttcaatttgattgtggcttttagcattagtgactccattttggtgtgaaccagtctggtcttttgaacctagtaaaggagctcagatcaaaatgttttcttagcattgtaacatggtggttatgttcatcctttgtatcctttgtgttatcttccagcatcccatgcattcctctcttgttttctagtctagtatccttgcttctgtccttcatttcctggtcaccttctgcagtagccagagtcatatttttaaaaaccaagtcatgttctactttaagcccaccagtatttttcctatctccttcctgtggctcaaatgctacctcctcagatactcactaggggaccacaaaaaggaagcaactaatgatggctttagggactctaggaagacttaacaaaaggaaaagcatttgcttctgtattttttatgatttagattttgttagatgcatttatttactgaacagtatttaaggatgccactgtgtgatagcactggtgtgtttcttgacaaatgatcagtaactggtgtctttgacagggaactgctgtttgttaaagactgcgttctgtatcattactacataatatatacaggaagtgtttttttccttaaatataaggaacatctcatttattggtgcctatttttggtaagcattctttaccataatatataactacctgtggaaaatttaactatattcagaagtgaatttactgaccaaggtataaaactatacataaagtagtatcgtatttctttacactgtgtgtgtgtgtgtgtgtgtgtgtgtgtcgggggtggtaagcattttaatgctgtacttcactggtaaataccaaaattaacattaggaacatgaagtacaatgaagtctgtacactagctacattacatcataaagatgtggttttgtttgtgagtgttaagtatccagtcttcacaaagccacagtttagtactttacttattttatcttttttcataattgtttcactgattcagaaataggaagactttgacaagtttttattttgaggcttgccatggttgcatataaagatgcattgctctgttcttggatatatcccagcaatactttctgtgtggctgagaacagccacaattagctaaggttttctctatagccaggcttcttttgaatcttggatcttccagtactcagcctcctgagtgttgtgtgccatacgtatacactgccatacctgacagatattgctgtcttacttaaagcaggtctttgacaaattcactggaatagactttaacagggtgaaaacacaaacatggatagtgtaatgtctggaagactaatgttttgcttatgtatatggtgttttgcctgtgtgtatatgtgtatatgtgtatatcacgtgtgtgcctggtacttgcagaggccagaagaggtcgtcagatttcctaagactggagttacagacaatagtgaaccagtgctctttcttgctgagccatctctccagctcttttgtacctatttttctgtttaaaaaaatcctcagccgagccatggtgcatgtttttaatcctgacactcaggaggcaaatgcaggcagatctttgggagtttgaaaccagcatggtccacagtacagccagagtttagaaaaacaaaacaaaaatcctccttctaacaacttgtgatggatggtcttcccctacaggtttttaaaatctacccagttgctaagagaccaaaatatcgatatcctcttccatattgattcattagatctgttttttaaatttttaggtaggtccataaaattaaaaaaaaaaaaaaacttgattgccgtcttttaatggcagtggcaacatagtttaatggcttacttgtgtgtcacatctgtggtcacagttgctgagagagtgctagctggtctctgagcctgtgtgaacctccttagtttatatctcccctgagattgctggaatgacaggtgttgcagctaattcaagtcatcaggctttcacggcctcctgaatttttttttttttaaagagatgtggtcttttatagccctagctggccttgaactcacagagatacatctgcttttgcctcatgagagagtgacagggttaaggcctgtgccgctgggcctggccagaactgagttttgaacactggacaataaaggtttgcattaatttgaaggctttttttcctcatttcatattaaatgagtttctgcagctataagctgtaggaagcactgaccttttgcttatttcagtcatctttgctatacttatataaaagttgtcatttagtacgtgtttgtattgtaagtaatgagtcttcaactgctgtactgacaagtatctttaaataatgctctctaaaaaataaatagttcaagctttagtcattgacttgtttccagtctcagaaaatttctaggcaacaaaagcaatttgagacagcaccaaaggatcttctacaccatggttgtttatagctcaggttctgcagaacttctgtaacggaaacttagagcaattctaactaatttctccgaagcaagtttatcgttcagtgcaatgatttctttaggtttcccatgatcttgtcatcaaggcaacacaaccccctcccttggagctgtgcttacatggatgagagaggcatgagtaaggtgggggtgggggtaactttttgagggtgtttaggaaaagcatattgagtattgcccgaaatctcttgaggcagaacctggtggactggacaagcaccttctgttcagatgatatgggagtgtgtgaactatttcagagcatctgtgttaaccactcacatgtaggcttagccttccagaccaaaggttctcagctttcttcatgattggtgaccttaaccataaaacgatgtcgatgctacttgcctactaactttgctactgttgggaatcatatcagaaatatctgatatacgaaggctgtctaatgagggattgtgtgacccacaggatgagaaccactggtctagaagctgtgtttcactgggtttgtagtcagcagtgtgcttgttttgatgctctcctttgataagtgatattaaaaaggagctgtggcgtgggataaggtaacaatcggtgtcccgttcccccccccacacacacacacattagaaaatatttgaaaggtaaatgtattgttccgtaagaaactgaccttgtttctgtttactggtctgcctcaatattatttagtagcaagtaattaggatagatggcaaccataaattttggtcatttgcttttttagtatttatatgtagagaagagggttttaaatctaataggatccttagaaatcgtcttgtagtcttaaacttttaatttagtggtgtgtgtgtgtgtgtacacatgtgtatgtgtgtacttgtatgtgtacttgtgagtgcagatgcctttggaagccagaggcatccggcctcctggagctggaattacaggtagttttgggctgtccagtctggatgctgggttgatctcaaagttgtgctctctgcaagagcagtaagctctcttaaccctgagctttccctccagccccttattcttctacttttaaaggaaaaagggagacaaatgcttaggtataagatagtagtaacctactaaagggagtgaaaggagccggtcatgttgtccgccattgaccgtttcaactccctgtttgaagaacagatactgtgttgtttgagaccttgaagtgaccataatgataaaagtaattttgtcaaatgtcaggttaccattgtatacttaaacaagtggtgattaacttagtataaatagataatgttgatgatgataataagttagatacatttagaataaaatacttctggtgtccttgtgtttttatgaatcgcacactctgtccatattctacgttgcatttgtctttcccattagacttcacccccaggagttgattgttaactgactgccaggttggctaaccctggctcatggttctgtggcatacctagcatattttaaatatctcatttaaattttatttttttacagtgaacagagtatctgtcaggcaagagctgctgtgatggtctatgatgatgccaataagaagtgggtgccagctggtggctcaactgggttcagcagagtacatatatatcaccatacaggcaacaacacattcagagttgtgggcagaaagattcaagaccatcaggtaaggggctgctgaaattcttcatgtttgtgcatgcatgaatatatgtgtgggtgcagacttgcacatgtgatacaagcatgtgcagggcagaggacagttcttgcgagtgtattttctcttggcactttgtaggaactggagagatctaaaggaggtccatcaaacctcgctgaggaggggtttgtcttccttagattgtcgtatcaggccatccatctggcccctttttataaattcagaatagacaataggaaatacagtataaggaacacattgtatgctgtttgtttgtttgtgtttgtttgtttgtttgtttgttttcaagtcagggtttctctgtgtagccctggctgtcctggagctcactttgtagactaggctggcctcgaactcagaaatccacctgcctctgcctcccgagtgctgggattaaaggcatgcaccaacatgcccggcacattgtatgcttatgggacatttttatctatctacttattgatcaaagatatagtttgtgtggctcaagaagtgatttgaaagtataaatggtttcagaaagtattgttaaattcataagtgattaataaaaatgtggtaggcattagtgttgctggaatctttaggcttttctttccagttcatatctaaggtgagcttttggtaatttcctttttcatatctacaagacagtagctgggttgtctgattacttgatgccttggtcccgtccgatccagatcaggatcctcaggcaaaggaaaaagtagatcatgccttactgttgtatactaacagtggggacttttacagattgtagacttaataagttcccttgtaaaagtgtttttttaaaagatgtaatttaactaatgtttaaaaccaccctgctacaaagtgcagggaaaatatacttagattctatttggtgccctgtgagttcttgctcggagagagttagagctgtacttttccagtaagctgtaatgtaaacagatgctgcagtaaccctgaattttaagtttgtttgtcaactggtaatagctaggaatttataatcgtcacgcatgcttgaaaggaatgggcattgaaactggttcttctgcaaaaattgggactccaagaggctgtgtctcataaaaagaggacacagagaaaaatccttctctttttactgaggagactgtttgcctgagaaatagaaaccgcagtctcccttacataacttattgactaatgctgatagcaggggcagtggggttctttagacacctgattaaaagtgcagtgctctctgatgagaaactgtcatagttgtgggttagtctacagaaattagttcacctcttctctgttgtgtgcccccctcctccctagctctcctttttctctcactttcctcactgtccagacacagcctctgatctcctgtttctctaccaaaaaatccacgtatcactgcttgtcagtagctgagctatggtgtctgcttcctttttatctgttcccctgctgagtggtccctcaggttaaaggcatgtcagatgctgcccaggatacaaataaaaaatcattgaactcttttccccttgtttttacatgcatgaatcttgcctatgcatgcctgaatcaaatgtggaagccagagaatggcatctgactccctggtactggatggttgtgagccactatgtggatcctgggaactgaatcccagttgtctagaagagcagccaatagtttttactgtctccagccccctgttgaaccttcttaacatttcaagctaagagctgtaagaaaaggctgagaaagatattaatagaattgaaattatagtaggtagatgattactttgcttttaaaatatgaaacttttaaaatctgccaatggtgacacagtatctctctctctcactgtgtgtgtgtgtgtgtgtgtgtgtgtgtgtgtgtgtgtgtgtgtgcgcgtgcgtgcgcgtgtgtgtgtgtatgtgtgtgtgagacagagagatcctatcttcaaaacaaaacaggaatcaattctctcaatcatctaacctttgagaaaaataactttgatctttaaaaataagaaatacaatctggtgtggtggtacgtgcctttaatcccaccacttgggaggcaggtagagctctgtgagttcaagaccagcctgatctgcatagccaattccaagacagccagggcttcataatagaacctgtctcaaacccaataaacaaacaaaagaaatatatgtattctcacttaatggtaactatctagggaatgactaaccacaaaagcatgctatatggccaggttgtgttatagtttcatgcagcctaactccatataggtggtagttccattaatatagccctattcatttttagcctggccacaacgaagtgaaaagtacatgaatacctatttttttgtgacttgccacagcattagccttgtctaaagtcagctataactttccctatcttctcaacaaatttgtttcttttatgtccctgctgaaatttatcacaacataaatatttcacattgtatctttattcacaagcttaagatccacacccttcagaagctagcatcatgcaaaaagacaaaagatacttggtatgaaccacattttttaaaaaattaatttattttttatactccatatttccttccccgtccccaccttccagctgctccacattccagaaccacatcttttttaacattgttctatgcctagccagtaggtaagcaagaaaaagggaataaaacagagggattaaagagtatgaaatgaagaagtcagttgttggtgattatgtttttagatagaacaaaatctgatcataaatcatgggaatcagaggatgttagaattaataataaaccttgggttagtaataggttagaactaagtaaatttaataaatattccagataggttgtctagaaatggttttcctctgagttagaaaatgaagaggttaagtagatactgtttccaatagtgtcctagttactttggtgattctgtgaggaaatatgctgactaaagcaacttgagggagcaggaacaacaatctgtctggtcacattgcatctccatctaggaagcagaaagtgagcaggaagtgaagccaggctgtagatgttcaaggcttgtgtacagtgaccactttctcgagaaatgcccagcctgctaaaactttacacctttgccaagcagtgttagcagctgggaaccaagttgttcaaatatgagcctaaggaggacattttaagaccacaaccaataacaataactactttatcagatcccacgcaaatttagtaggtgttcaagataccaatatagagaactaatgagtgttaatgtcagcccaagtaaggactatatgatactcatgaagtaaagatagctttgtgacattagtgatcaaatgggcctttttagctttagtacagttttaaatttgggaattgacaatgttttaaaagtataaatggcagctttccacaaaggaccaaaaatatctaaagcagtaatgaggaacagagtagaaggcagagtctggaggtggcacctagtgtaaaactgcaatagagaagacactactgttgggcgaatattagctatactgaccagtggggaaaaactcaacttgtaacaaaaggtaaacctgtagcttagctaaaataatttggacacacaaagaaaaaaccccaggaagcttgaactacctctcaccagattgcaaatcagtttccgttttactggggtgcaggtgttcatggttaacagtagaaagcttccagaagacaaaatgaagtagtatttttataactttcattgacaaatatctcttagaacacaaaaacattaaaagagaaaagcatttttaatttgaaataaaagaaaaggaacttcttaccatattattaacattgaataggcaagacagggacaagatatttgtcatataaatatttttccttgggcaggcgnnnnnnnnnnnnnnnnnnnnggaaaaactcaacttgtaacaaaggtaaacctgtagcttagctaaaataatttggacacacaaagaaaaaacccccaggaagcttgaactacctctcaccagattgcaaatcagtttccgttttactggggtgcaggtgttcatggttaacagtagaaagcttccagaagacaaaatgaagtagtatttttataactttcattgacaaatatctcttagaacacaaaaacattaaaagagaaaagcatttttaatttgaaataaaagaaaaggaacttcttaccatattattaacattgaataggcaagacagggacaagatatttgtcatataaatatttttccttgggcaggcgagatggctcagtggttaaaagtggacagagaaccagtgctatcatttgacctccatagatgtgccaggcctgtgtgtgttcttctaatataacttagggattactttaagtatatagaaagatcaacacaacagtggcggtgctacacaatatacacagcatacaaacttttgtatactgctgtgggattgtaaatgataggacacatttagaaagctatgtggagttttccactaaagttaaatatacttatgacatcgactagtccaacatgggttcatgttctgtaaaaacgtgcactgtgtgtaccagcaaatgtttaataggatgttcatgttattatttgtagtagccacagattctgggcaataaaaatgtcagtgaaagaatgggcaggttgagccaggcggtagtggcgcacgcctataatcccggcacttgggaggcagaggcaggccggattttctgagttcaagggacagcctggtctacaaagtgagtttcaggacagccagggctacacagagaaaccctgtctcaaaacaaaacaaaacaaacaaaagaatgggcaggttggtagtttatacaataaagcgaacaaaccatggttgatatataactggatgactcttaaatatgcatctgagtaaagagggcaggtacatttcccaacatgaattttgtgatgctgttcttatcaaatcgcaaatcttataaaactaatttgtagtattagagatagatactctgcctggatgggagaagtccaaaggggactttacagttaatattccatttttcaatttataatttatcaataaataagttaaagtatatttaatgaagtacattgctttttttgtttttgatttattattttgaagcaggccttttgtgaacatacgatggcttaagttccctcagactcacttctgtagacttgcttttattctaggcaactgttccaactagttttcataaannnnnnnnnnnnnnnnnnnnttatcagatcccacgcaaatttagtaggtgttcaagataccaatatagagaactaatgagtgttaatgtcagcccaagtaaggactatatgatactcatgaagtaaagatagctttgtgacattagtgatcaaatgggcctttttagctttagtacagttttaaatttgggaattgacaatgttttaaaagtataaatggcagctttccacaaaggaccaaaaatatctaaagcagtaatgaggaacagagtagaaggcagagtctggaggtggcacctagtgtaaaactgcaatagagaagacactactgttgggcgaatattagctatactgaccagtggggaaaaactcaacttgtaacaaaaggtaaacctgtagcttagctaaaataatttggacacacaaagaaaaaaccccaggaagcttgaactacctctcaccagattgcaaatcagtttccgttttactggggtgcaggtgttcatggttaacagtagaaagcttccagaagacaaaatgaagtagtatttttataactttcattgacaaatatctcttagaacacaaaaacattaaaagagaaaagcatttttaatttgaaataaaagaaaaggaacttcttaccatattattaacattgaataggcaagacagggacaagatatttgtcatataaatatttttccttgggcaggcgagatggctcagtggttaaaagcactgactgctcttccggaggtcctgagttcaaatccagcaaccatatggtggctcacaaccatctgtaataggttctgatgccctctttctggtgtgtctgaagacagctatagtgtacttacatataataaataaatctttaaaaaacaatgaaaattttttcctttggagtcatataaagtaaaggtggatcagttaggagagaagtgggccagaaatttattaatgaatgtaatcaggaattcacaaaagattatcttgaaacaacaaaaaaggagacctgtgagatagcgtagagggtaaaggcatccactgtgcagcctggctacctgggttttatccccagagcctacataaagatggacagagaaccagtgctatcatttgacctccatagatgtgccaggcctgtgtgtgttcttctaatataacttagggattactttaagtatatagaaagatcaacacaacagtggcggtgctacacaatatacacagcatacaaacttttgtatactgctgtgggattgtaaatgataggacacatttagaaagctatgtggagttttccactaaagttaaatatacttatgacatcgactagtccaacatgggttcatgttctgtaaaaacgtgcactgtgtgtaccagcaaatgtttaataggatgttcatgttattatttgtagtagccacagattctgggcaataaaaatgtcagtgaaagaatgagccaggcggtagtggcgcacgcctataatcccggcacttgggaggcagaggcaggcggatttctgagttcaaggacagcctggtctacaaagtgagtttcaggacagccagggctacacagagaaaccctgtctcaaaacaaaacaaaacaaacaaaagaatggnnnnnnnnnnnnnnnnnnnnatggacagagaaccagtgctatcatttgacctccatagaatgtgccaggcctgtgtgtgttcttctaatataacttagggattactttaagtatatagaaagatcaacacaacagtggcggtgctacacaatatacacagcatacaaacttttgtatactgctgtgggattgtaaatgataggacacatttagaaagctatgtggagttttccactaaagttaaatatacttatgacatcgactagtccaacatgggttcatgttctgtaaaaacgtgcactgtgtgtaccagcaaatgtttaataggatgttcatgttattatttgtagtagccacagattctgggcaataaaaatgtcagtgaaagaatgagccaggcggtagtggcgcacgcctataatcccggcacttgggaggcagaggcaggcggatttctgagttcaaggacagcctggtctacaaagtgagtttcaggacagccagggctacacagagaaaccctgtctcaaaacaaaacaaaacaaacaaaagaatgggcaggttggtagtttatacaataaagcgaacaaaccatggttgatatataactggatgactcttaaatatgcatctgagtaaagagggcaggtacatttcccaacatgaattttgtgatgctgttcttatcaaatcgcaaatcttataaaactaatttgtagtattagagatagatactctgcctggatgggagaagtccaaaggggactttacagttaatattccatttttcaatttataatttatcaataaataagttaaagtatatttaatgaagtacattgctttttttgtttttgatttattattttgaagcaggccttttgtgaacatacgatggcttaagttccctcagactcacttctgtagacttgcttttattctaggcaactgttccaactagttttcataaactctgctaggaatatgtttaaataaatacctacagtctagatttgtactgacttctattttcccagtttttagctggctttataatgaattaattgttttttaggttgtgataaactgtgccattcctaaagggctgaagtacaatcaagctacacagactttccaccaatggagggatgctagacaggtgtatggtctcaactttggcagcaaagaggatgccaatgtcttcgcaagtgccatgatgcatgccttagaagtgttaaattcacaggaagcaggtaaagtgtctgtgctttcccagtactctgcagtggaaatgctatgtatatgttaaagcaaaactttctcctcagcttttaagtcatatatatatattttaaatagttcctgttactttctagaaaaatgtgaactctttcttacttgtttgtgttaaaactatagtctatctgggcatggtggcgcatacctttaatcccagaatttttgaatcagaggcaggtgggtctgtgagtttgaggccagccagggctatctagagaaaccctgtctcaaaaagggaaaaaataaaaaataaaagaggagaggaagaaaagaagaagaagcagcagcatagtctagaagcataatgctatgagtttaattagtctagttttttttaaagcctcatttgaattatctagattagtttgtcctgctgtaaaaactaccaggtctctgtgttgctcaggctagcctcaaattcttcatttcaggcaatcctcctgccttctgctttccaaagtagctgaaacttcaatcattttcttatgccttttattattcgccttttatcaagaagtacataggtttctaaaatgtacttttcaagccaccactgagcctagggacttatattgagagtatgatctcctgatgcttggctctaatgcaatgattccataactgcaattttgctattgttataaattgtactataaatatctgtgttttctgatggtctttgttgaatccctcaacccccaaagtagttgcgacccacaggttgataagatttgaggcacaccctcatcgtccaagccataattggattcttaaaactatatgttgctaagaaggaagaatagaaataattcactttgaaaagctcaagtattcaaaaccttattatcagagatatactaaattttgttttggtttaagaaacagaaaaagaaatacacaaatgtatggttctcattagcaataaattttatgatcagaaaatgttatatatgaaaaaaatacaaatgtagttactccttcctgtgttgtatgtttggtagtgattttattgatataaatgttccgtgtaaaacacatatagcttaatgaggagtattacagccagataaaatattgatatttttttgatgatatagaattctaaaaatccataataaatggtatatttatagatcttactctgaagcatgaaaggttcaaggtatcttaactcctttgcctgttttaaaaatgaattttagaggaataggcattttgagatcttgcagaaggttctgtgtgccattgtacctctatctgttttatatgaagttttctttagggggaattaacatctgtaaggaacatatttgttttcattggatctcctttgagtaaataagctgctgggacttactttggtttgcctcttcaagatggcgaagtctggtctcctgtaaatcatttctcctaataactatactgtctttgtcagcataggactttattagcatatgttataggaatagtttacactgtaataattaggagacaagcgagaatcataattcctgtatcttaaataggccagttacgtaatttaaagcgtgtgtgtgtgtgtgtgtgtgtgtgtgtgtgtgtgtgtagcagcttctgttcctgtgtttggaacctatgaccattttcatttctcagttttcaaatggggatacagtttagaactaaatgtcacttagcatagttcaaattattgttaatggtggttttgtcttgttattaccaagttgaaactattgttcttaccagtgaataatattagtttgtttgccaaatgccaatgcccaataacttgttttattctgatcctgattgtttgaaattcagtcttcatgaagagactcaaactacattcttttacagaataataaacattaaaaaatagttttgactcataaagttttacaagtgaaaattaatggttttatttgctatagaagcatttttggtgtgtacagtatataggattattgttatgggtaagtttgacaatacattgtctcttctctttcatgttttcaattgtagtgtacaaaatggttgaagttagttatctttgtcatggaccaagtaagtcactggcagcgaagttcttggttctattttgttcattcaaaaaacaaagcattaaaatagttcatttgtacatagcatgatgtatttatttacggaattactttcctttgtaaatacctgaattttgatgacattgtctttgaagcagaaatatggggaaatttttttaagaatctagtgagtgcctggagagatggctcagtagttaagagcactgtctcttccaacgaccacatggtagtttataatactggaatctgatgccctcatctggcatgcaggcatatatactgacagagcactcctatacataaaataaataaatcttaaaaaaaaattccttaattgtcatctggtggtgtatgcctttaatcccagcacttgctaggccaaagaaggtgggtctctgtgacttcaaggccagccagagctacaggagcccctgtctcaaggaaaaggacctggagagtcctccttgggaagggatgcctttcttattcagattctcactgtaggggtggtttgtcctgtacctattgttgttgtgctgacccctcccatccacctaatcaaacacactcagtaattctgaatactatcatggtcttgtctttccttgccaaagcaatttgcttttagttcacagccatatgtgtgtgtgtctgtgtgcctgtgtgtgtaatttttaaaatcatcttctgtatgcaagcttttggaaagcttgactcttttgcaaacagtagcccaacacacttgaccagaagcaaaagaacaaatatattcatgaaggtagagctgttatgtacatccatctgcctgattcacagatttttgtctctttcaagtttttattagtatatattaactgtaccgaataatggattgagtgatgttgatattttcataatacacataatatactttgaccatactaatctccattaccctcttttttttatttaatttttatttatatgagcacactgctgcttcagacacaccagaagagggcatcggatctcattacagatggttgtgagccaccatgtggtttctgggaattgaactcaggacctcttaaagaaagagcagtcagttttcttaaccactgaaccatctctccagctctctatcaccctcttagtttttactcttgtactgccatttttcttccttctttctgcctttccttcttccttctcattcgctcgctctcccttcctttcttccttccttccttccttccttggtgctaggagttgaactgaatccagggccttgcacatgctgggcaagcactctaccaccaactacatcctcagcctggtttaccactttataaagccatgccccatactcactgttactggtcttatttttcttatgtatactgttaacttgaggatctgccattaccattatcagtaaatccttagtgattctcagacttaaaggtcatggacatcttcgttcaaacagaatctttctgcagctcagtacaaatggaccaaaagtccggaagaggtggcaaggggatgtcctctgattaatgtggggcagggatcacagccactgagggtctgcatagctctccaccgcatggtttagctctgtgctctcttctgcttgagccagtgattctacagttctttctccctttttggctgccatttttcaaagccctctttttttttttaatttttttttttttttaaagaaaaagaatgcagtgttttggactcgtcattctaacctttacaagctgtacttgcatatatgtgtgtgtttcatattttcagtttttttatgaaaaggtgggtggcaggaatgttttcctttattttgtttttaacatggtatgcaattatctaatatactggaaagtacaggaggtgctaaatacagtgtgttatatttggaatttaaaaaaaaaacaggaatcacatgttctatcattttttttaaaggcgatgaattagtgctcctgcttttataccaaatgctacagtataactttccttctcacctatggaagttgtctcagtttaaattaatgtattctatagaccaaacaacaatctttatttctatatttgcttatcaagtatatttataggcttttgtagataatagctgtggcttatgtaagctacaatgccagtcctgttgatggctggttgaggtgaatttgcacagccttgttgcatttttgtacatggtttaaattgtttgaaaataggaaatatgtctttaaattcattttaaagaaagaaaatgtcatgctagttagattattctggttttgttcaaccatgattaaacatagcttaccaaaagaaaaacctcaaaatattttttactattaactaaggactgagtttgttggtttgttttttaactattgtgaaagaacagagcgagagataacctttctatggttaaagttttcatcagatttataataaattttggttctattaattttttaacataaacttggcaaatgttacttccttgagccttagcgttattctcagcattatgtgctgtctttgttatgcttggaattggtaggattttcaaaacccccaaatatctcaaattcttggaattttttgtttttgttttctttttgtttttttgtttggttgggggctttgtttgtttgttttgaagcagagtctctgtataaccctggctgtcctggaactcccctatgaaaaaagccctggctctgaactcagagatcctcctgcccgttacttcctttgttggggttaaagtcatgctccactgtgccacaccctcgactactttgtcgccagtggcagttttaatttgtgtagtcttgtagctgctgagattaatatgaacaatactaagcttatcatctcaaagttttatccataatgtcctctggctcacctgctctttgacatgtcactgtccagcggtctgctgatgccctcattttgtcactgctgcagtttgaggccgggcttcatcgcttacctgtggtgcttctgatcctcttctaggataaacctcactggcaatttttatagaaaccctgtgagtttagtgatattgttttagaagtaagatttgggctcaaggtcagtagattggctcgccctaggacctacagccagacagtagatcttaagatcttatttcaaaattcagataaaagataaataaatggatctttggggggagggagagagagaatgagaatttctagcttttgaaaaagaacaggaactaccgaatcaaactttcattttctgttccctctcttatacctcaaagcctaaatttttgttcagtgtgacaaacgttttcaatccgaaagtgatttgggcgagtaagttctcattctgaaagagagcgattgggtggcggcactggacgacctgtctctagatcgctcttctgggtttcccttagtcctactcttgccctgttttcttggtcctcctgttgacccacaagaatgtgttgagttgtgagctggaattggggcaagaaagtgaccggtttctagaaccacttaaagctactgctatcatttgttcagttcggctttagcttttagcatttgtattgacatttgaaatcatttcctatctagctcttctcggtcattaaaaagtaatagcaggtaacccatttaatagtgtgtagactatcgtcaccaagatcgctctgcagttttgcttcttaaccatggtctcctcctttgttaaaccagaggtagaattcataatttgagcttaaaacccttacttagggattcagtaaatgtggctcaaggatgcttgaggggagctcctgttcgtacctctacaaagtgctatgtagaaaagttcctttctgtatgcataaccagaatgacaaactgaatgccgagagaataaataatcctgttgtcttttgtgaaaccaaacatcaaaggctttattttagcccatttcttttcctagttctaaagagcaactgactgcataaagaaaggcctgttagccaacagttcagcccatttacataggacagacttctgctgaaggcctcagtagatgacatcatggtactggttggctatatgtgtcattgggagatcactttgccagactagaaagcagctgatggacctctcctcttagaaaagccttcctatggatgaccctggctcccttctgagggcaacactcccagctgcttcctactaggctatccctcagtgttatggagcctgcaacacatgcagcatccagacaaaccacagcagagcttataaaaacataaaactgtgttgttgaaatcacatggacatgtttctttgttcagtttgacagttgagtcctgttagtgcttccagctgggatgttgtccagtcttgttgccttggccttatacaggcaaccatggctgcagtgagttcctgagcagtgggcatgtcagatcagatgacagcatcccagcaatcctccttgtgctcactcttacattctctccgtcctctttcatgaagtctcctgaattcgtgtttgatttttagggagcaccatgttagtctttggttgttgtcttagtcagggtttctgttcctgcacaaacatcatgaccaagaagcaagttggggaggaaagggtttattcgggttacacttccatactgctgttcatcaccaaaggaagtcaggactggaactcaagcaggtcaggaagcaggagctgatgcagaggcaatggagggatgttctttactggcttgcttcccctggcttgctcagcctgctctcttatagaaccaagactaccagctcagagatggtcccacccacaaggggcctttcccccttgatcaataaatgagaaaatgccttacagttggatctcatggagacatttcctcaactgaagctcctttctctgtgataactccagctgtgtcaagttgacacaaaactagccagtacagttgtaaaactacttctctgaagtggggttatgaaaattaagaggctggtactatttttgtggtgagtctggagtccatagactttaaaggttagtgtaatctggtgtcatgcagcccatatcacacccttgtgtgtctgcatatctggccagaagctgcactgtctccagactcgccttacacataatttcagtagcagtgctgttggcctgcagaggtcattgaccatttggatgcttttcttgcacaagcataaaactgcacatatttgttggttttttttttattagcattttactggatgccattaagtctgatatctttgagatacaaaaaaagataaacagccgggcatggtggcacacgccttttaacccagcacttgggaagcagaggaaggcagattctgagttcgaggctagcctgttctacaaagagagttccaggacagccagggctacacagagaaaccctctgtgtgtgtgtggggggggggggaataatgatagactcctctgtcttcacactgatttaaggaacgatcaggaaccatttctaccttgatggaattgcagctcagaacaccagccaaacctttcctatggattttaccttgtaattttgaaaagatttacacacacacacgcatatatatcttgtccatgtatgttgcagtaaatctccaatgcaaatatgccctggcagtcaaatcacaactcagttaatatgagtacatgctgtgcgcctagattgcactacactaccatcttgcacatctatgagaccccttagaacttgcggtttctccaggccatgtgcttctgctctgcttttctacttcctcctcctctgtgtcctctctctcaaccttcccctccactttccttttatctgcccatgcatcagctctcctttattttacaaattaaggtgggaagcaggtttacaggaaatcacccgagtgctgactcatttttttcctcgtatgcatccccacaccagagaagggaattaacatcaaatataattagccctagagctatccacaacaattcccctttctgtccaattaaaagactattttatcacagatataattaaacacagctattaccattttgtaatttataaagtataagagccctaacaccctaacatctttgttaatgccatctatccttacttaaaagactatagttctgtacctggctatgtcttggctttagattgaatgccatctgaacaccatcctctcaaatctgttcctctcacagtaaaaagcctgggttggctaggagactatgcagttattcaaccccatcagaaatccaagaatgactgatattaactgaaaatatatagagaggttaacacagcttccaaaacgtagccaatacatagagacctctgatcacctggacagtcccttacttcagcagttggagcatccgtcttcagcctactggccagggtcatctgacagacttagagaaacaggaatattaaggactagcctactgtctcggcagaatcaggatgtcctaacctgtaattgtgtccttcctttctttggacagtattatgtctgtaaatgaaatgaggcaatttttgcctagtggctgtttcaccacaactggagtaactcaaagatactcagtttcgtctttgaatccaagacagggaaaactgttaggagcagactggtctcaacaagtgaataaataacattaaacttgtggacttttgatgtttttgaaaaccaactatctatgtaaagtaatctagactgttgtctgttaactactctcagccatttgtaattaaaataactgaaagcactctaacaataaactcagagccatgaatttcctatttggccctttactctcaaggcttaaacagctcagatctgtttacaataacagcaatagaaggactgggtctaagccctgtgcttcaaaatttttagcatcaaggacaacctgtaataaccaaagcctcgggaactgggacgaagacttcataacttcaagatgaacatgggcggtgaaatatttttgaagagagggggaagggtagggaaaatggggaaattcgttggccacaccaatgattgtattagtctcggatgtttatgtcctgactgaatccggatgaaaaaccaagatatcaggagttcaggcaggtcagttcagcatgtctgatagtgaaattcaccaaggctgtatgttctgtaatctataaatctcaaaacaaaattttagtattatccagataacctttttgtttgattcactggaatctagttctcagggggtctccttctatcaaatctgatccatataagtctggaaggtgtaataccttaatcaccttttccaaaaacacaaagacaaaaccttttccccaaatgagcatatcctttagctggtaaccaggaaaacctgtagcttgccctatgtcccagaggaacaataaaacaactacaacactcaaaatcacacacattttagcctatttaggcctttctaatttgtcatgtcaggatattaacccaaaattcctgtgaagtccaagttagagcatatgagtctcctgcagactttattatatcacctttaaaacagtcaattcacacgtctatctatacgtgcttataagatgcagcttgtcaaatcaggatttaatctcaaaagtcccatggagcccacgttagacagaatatgaggatcctgtaagacttattagagcaatatatctttatactatctttaaagcaattagttcaaacttccactaatatctgcctataggaagcagatagtttttaattgttaagctctctaccaggagccacagtcatttatttaatacctattattacatctatttgttatgctctctacctagaaccacaggcttctatttaattaatacctgttataatatctatctgttatgctctctacctggagccacagacttctattaattaatacctgtccatagcaggtgattatctctgctctctgtatttggagttagtgagtagtattccctatctagttctgaactgcatgcaatatttcccatctttaagtatcaaaaagttatatttctctctttatatcaataaattacctggtccggaaccttttgtacctttgtttcctgattctttattcacaggcaggagctgaatatagaaagacatgtgttgtctctgtccctgtttggaggtagaggaggcaggttcgggagcgaaggatacagggaaggaaacacagaaaggttctttctggcatagatgcctttcgttctctgtaggcccctcaaacccagtcagcttcaaatccaccctgctgcagcctaggtcactgcccaagccccattcaggggctgggggacagtgaattttcatctcaggttagttgagttcaaatcaatatgttgggcatcattttgttgcggtaaatctccaacgcatataaatgaaaacacaactcagttaatatgattacatgctgtgcgcctagattggcagatctaccgctacactaccatcttccacatctatgagaccccttagaacctgcggtttctccaggccatgtgcttctgctccgcttttcttcttcctcctcctctgtgtcctctctcattttctcctcctcttcctctctctcaacttttcctccactttcccttcatcagctctcctttattttacaaattaaggtgggaagcaggtttacaggaaatcacctaagtgctgactctcacaggagaagggaattaacatcaaatatagttagccccagggctatccagaacacatgttcacatgcacattaattagtaccttgtctctcagctaacaccatgcattactgttttcatactctacacaagatagaaatacctaaatcagtttttaaaatatcgaatggtagtatctttgaagtttgtatttcatatacagattgttgtaatgctttattaattcccaaaatattcctaaaatttaatagtcttagaataaaagcctcagtggacagatttttttgtatttgtacatagatactgtgttacaggatattagaggaataaaggaacaatggaatgattgaaagcttggtcttatatgtcttttacttcatcagagactacaatacttggctggaaatatctgcaaggcagtgtaaatactgcacaaagtggtgattgggaaatggatttagcaaatgtagcatgctatttgtgtaaagttactaaaaatggttcttctgaggtagacttgctatttctgtgagtttaatttctaagatgattcacaagaaaaaacacaggagtggtgttttctgaacgtgttcaggtctttgtctttgtttttgcttttgcctttttttgtttgtttgtttgttttttgttttttccagacagggtttctctgtagccccgtctgtcctggaactcactttgtagaccaggctggcctcagaaatccgcctgcctctgcctcccgagtgctgggattaaagcaccacacctagcgcttttttgccttttttaagataaggtctcagatcgggtcactcttactgtgagaaaatcataaccaaagctacttagaaagggaagggcttatttgatgtttatcactattcataaccgaaggacatcaaggcaggagttcaagtgggctaggaacctggaggcaggagctgaggcagaggccatggaggggtgctgcttactggcctcctccacatggcctgctcaacctgctttcttatagagcccagaaccacctactcagggttggcccgacccaaaatgggctggacccacccccaattaaccactaattaaataaataccttatagctgtatattacagaagtattttcaaaactgaggttccctcctttcagataactctagcttgtgtctagttggcataaaactagtcaggatagggtctctgtacaaagccctggctgtcctggaattcaccatgtagaccaggatggcctggatatcatagagatccacctgcctttgcctcccgatagctgattaaaggtgtgcaccaccatgctcaactgaagtactttgttatgccagtgctgtctatataagaagaaagaaattttcactgagggatttgtttagatacattttcctaatcttttttttttttttaactcaaaccaaagttttcgctcttacaccccgagtttgaaagtatgactagataagtgatgatgaaagatcaccagtgggtctcccagtggctaggaagaaggtggggtgcacatttgccagctaaccttgaagcagctttctgttagactggtctggtacatgcttcccttgggtcctttatagccagacctataaacacaccacctacaccctgtgagatctgtggtgcgcatctttcttttccatgcttttttcaaagcattttaaatagtcaatttctgggttatagaaagaaatttagtaaatccagagttagccacaagtagcacttaattgcttgtaaagagtaaatctccaatgtgactcttttatattaaagctcagatttttcttttgaaatggaacttctagaccccttaaggtagactgaagggtgtgtttagtgcagtaatatagtatttgcataagtcaatgttgaatttccttctttggaaagcagagctgtctcattgctcttcctgggacctttgaaagtaagtctgcttaccagaagcaagcgcttccatctcagtagatatgttctcctcagtttgaacagtgcagtattatttttgagtttcacatttcttgtaaaagaagagctaagttgctccagccatgctttcttcactcctggaaacaatggtgagcaaggatgtatctttgatttttttttttttttttttacttagaatttttctctggctttttatgacaaccttacagtccattaaaagcttcagaattccttctttttttttttgattgtttatataattactaaattggattatatagaaatctgtagtttttctttcttctcttttgtttttgagacaagatcttactatgtaaccttgcttggcctggaactcacaagccagccagtacctcacagagttctgccggcccctgccttcagagtgttgcgatcagtggctgtgtcaccacagctagtcagtatgtacataaaggttattttaaggaaacgtttcctagaatttcaagtatttctggtcctgtatatttctcttactcctttattgtaaaagtacatacagatttcattaattcttgtctttattctttttcctcttattagctgtattatctagatgtaggtacatgatatagttaacatgtagtagaccttcttgtttaaaagtcgagaaaatgttgtaaaaatttttaaagttgtatcaattatctgcatatgaaagtatatagtagttgatagcagtaggaaggtaaatatggttgttaagtctcaaacctggacagaaggctgaggagcctcctattaatacatgaacgcatcagagcagacttggcttccaggttctcccagcatccctcagtccttacctgttatagggtatggctggcatcccaaccccctgccttaaacttctccatttcagggtctgggctgccctcctctatatagtccagccatttggctctcctcatgtggtccagctcagggtcatgttcactctgaactctcccagacgtcccagccaatgggacagctaacctcctccaccttacctaggagcagtcatgttcttcccttatttcttttttgcattcagtggtatagatgttatctatctttcagccactttaagtctagtgcagcagccagcttattctaagaagacagtgtaattatccagcaattgcatgacaagttagagaagccttaggccctgcctctggttgggcatttataatggattgttgataaataaaggatatttctgttgctttgtctctttttcttttttgaggtcgaatagtggaaggctaaatttaacatagaaattgtcagtgaagaggtaaaatgatggagaacctgagtatgagaagtatttaaaagtactttactaggttcactatacagctttcttaaactgaaacaattgattcatgtttatagatttttttttaaatgttatgctcatttctgcttttgcctgtgtgtatgtttgtgtgaggttgttgcatcccctggaactagagttagagacagttgggagctgccatgtgggtgctaggaatagtaggtcctcttgaagagcaaccagtgttcttggatctctagcccgtcatttatggagtttatttttaaagatttatttattattatatgtaagtacactgtagctgtcttcagacataccagaagagggcatcagatcccattacagatggttgtgagccaccatgtggttgctgggaattgaactcaggacctctggaagagcagtcagtgctcctaaccactgagccatctcgccagcccctggtttaaatttcttaatttttatggttctttttgtttggttggtttggttttcaatatatttcatctaaacaacaaactatgtgtttgaaacggcatgacattagaaataacttgaccataaaacaggacattgtttttgtttgtttagactgggtctgcctgtgtggtcttttcagtcagattgcttcagactccagagtgctagtagttcaggtcttgctcagataccctgtttctgatttctgagtgggagtcacaggtggctccccaagcccacctgacacatatatagattttggggatccatcctccagtcttcacacttgggaggcaagattactgagctatcgcctcatccctaatacaacatatttttaagagcagttaataaaagaaagaaaggtagattgttactacacctcagagatcatgatactcagtttgtcagcatttgtgtttgggtgtgggtgtgcttgcttacaggcacgatagtctgtaaagaaggaaggtgaagatcagaggaccttgtgggattggttctttccttccagtgattgaactctggttgtcaggcagccttgcatggttggctgataggcccctggtcttagtttgggtttctattgctgtgaaaagacaccatgatcacagcagctcttttttttttttttttttttttttaagatttatttattttatatatgtgcgtaaactgtcactgtcttcagatacaccagaagagcgcatcagatcccattgcagacggtcatgagccaccatgtggttgtttggaattgaactcaagatctggaattgcaatcagtgctcttaaccgctgagccatctctccagcctccacagcagctcttataaaggaaaataattggagctggctcacagttcagaggtttaattcataatcgtcatggtgggaaacacagcatgcatgcagacatggtgctggagagggagctgagagttctacatcttgatcagcaggcatcagctgactttagcttcctagatctcaaattgcccctgacaatgtaacgccctcttaacacttccagtgggctatgcagtcaagcacggggggggggggggggggaatggatgtatatatatggggggccagtccctttcaaaccaacacacacctttacctctgagccatcttgcccattcctttgttaacactttctcaggtcatttcaaatactacctgctaaagccttacatttcctcacaatggaaatcacagttttaataaaagcattaaaactattataataaattttaggttatcttgagtctcaaaaacagattatgttatttacatatttgctgccccgtgtagatagaggcttcttagtgagcaacttgtttgaaatacagtgagttattgtgcagagagaaagatgaacacaggcagtataaagttcccatgggaaaggagccgctgacctgtatgaggggaactgtcctggtttttgatgtgctgtcctgaatggatgtatatattcaggcttttgacttgttatctttggaagctatgccatacagtaaggtttattttgttgtttgtttcattatttgtgaaaagtagccaaattgcagaactgcctcagactttactcttgtattgcttatgcacacacacacacacacactgttggcatattgtatacattataaagcaagtatagaaatattttaaaagaaaaggaaagtggggctggtgagatggctcagtgggtaagagcacccgactgctcttccgaaggtccagagttcaaatcccagcaaccacatggtggcttacaaccatccttaatgagatctgactccctcttctggagtggctgaagacagctacaatgtacttacatataataaataaataaatctttaaaaaaaaaaaaaaaaaagaaaaggaaagtgaacagaagtcttactgtttcttctctgagtctgctaaatgtttcagccctgcacactcataagcgagaactcataagtcatcaagcgagaaccttgtcagtggaaatagggaggagacatgggaagggttcatgggcaggctttggaattggttaagaaatactaaggggtgtcaaagtgttctgtattctagttgtgcaactgatagataatgctggttcaaagatactctagtcagaaaattaacatgttaccactgtagaatgtcctgacaaagggcagggaggcatgaaaagtgatttgatgagcaggtcttgatctgagaacagtaggatatgacgggcttggtaaattatacacccttgaacttctagttgatttgactcttaaaattttcctcaggcagaaacagtctgtagttccttggctaaaaataaaggattaacaaagcatggtggactgaggggctggtacaatgtagtaaatgacctgcagttactctatggttagcagtcatttttcttcttttttttttttttttaaatttctattagatattttccttatttatatttcaaatgctatcccgaaagttccctatcccctcccccccccgccctgctcccctacccacccactcccacttcttggccctggtgttcccctgtactgaggcatataaagtttgcaagaccaaggggcctctcttcccagtgatggccgactaggccgccttctgcatttttcttctttttttaaatttgaagccataaattgaaggagggttacctttttggtagcaaaagagggaggagaggtcaggtacatacacacattgccctagattaaataaagaaatgacaggtctagatgatgggagtttttcatatgtagttacaaccacactgctccatttcttgagattaatgaagattttctttcattaaacatgtttgtttcaaaagaaaatttgaaataatactgtgaaagagttttttaaaaatgcaaccttacagagccaattgccttgaatgaatttattgtttgcattctctctacagtactgtgcaatttggaacacggttgttgcggctttagagtttaagtgtttttaattaaaatgtgacttgcaccatgtcccgcctctcttctctcccttcagactctctcttgccctctgctcccatgctccaactccctctcaaattcaagttgcccccccccccccttttaaaaagcttttggctgttgtagaactcactctgtagatcagtctggcctcaaactcagagatcctcctgcctctgcctcctgagtgctgagattaaagtcatgcgccaccacataaatatataaatacagcctgttgcgtctgttttatgtatgagcttatctttttaatgtggacagctatcattgcagtacctgcgtctgggtattttgagtcctctcttctctttcagatacctcagtcttagaacaaacacagccacctttgctttgaccccttggttatgaagggcttcatcacagtggtcagaagtgtgaccatcgaatgctaacactcattctgtcactcagtggccagcttcccagaaaggcaaatcaaattcagaccagtctttaagcaaacattatctcatttaacccttagaaataaaagatgcagagaggaacaatgttcatctggagatgattagtagctaataatagaaaaaaataagtactttataaagtacaaatgtctagaagtctgctgtagtaatgatatataataataaaatgcagtgatatggaccaaagctgaaaagtctgtcattttccatcactgataccctcacttaacaaagtcttcatttccttgttgttgctgttgttgttgttgttgttgttgttgttttaagtcaaatggtaaagaataataacagcagtgggcaaagcctgaagggtggcagttttgcaaattacattaagagaaaaacatctgcaacaagatcaaaggccaaagtagttatcaagaatgttgtattacttctagaaatataatgaagatgttcaattttacattcttgattcccttagccttaactaagctcctatagtatggccttctttaaaaagtagtgtttttgcagataagtgctagtattaaataatactagcattactaattaatactgaccttacctatgcaatcagtcttctcaaattgagtaaaggaagagttaatagcatcaacagtaagcaggaagctgctagccttatgcatatgatggaatgaataatttactatcttcggggaaatgcaaactgcagtagaattcaagcaaccctatcagaaagtaaatcaatgtttaacttggtaacagaaataaaagtcactggaaggaagacacttaaggatgacaaatgcaggacactgcttagcagctcagttgtgtgagagagagactgagttcttgggtggaaagggttagtcccctgcagtgataacagtgcctgcattctgacgattgtcaggtgactttctgctgaaatgattgctcatgggatggggcagcttctttgctgtctgaagcaagatactttctcagggctttcatgtaagttttttctcttaattgtccttgtatgttttcctgtttgatatggattaaaggaactaaagagtaaaacctcataactaggtgtgttcactcatgaaggttttgtggaagtagcatttgtaaataccggtaaggcatatttttatacaggagtttaaatttaaaatatgactatataatttttctgaactgtttatctccgttagcatcacctcgttcttgttgagcttgccttcggatgcttgtggttataaggctgctctacgtactgtgcatgcacttggctgagagatgggtgcgtgaaaataattagccaagttggccctatcaattttttctactggtgtttaaatacctactgtattgatactttaaagtaagagttcattggattatgttgtctattgctaaaaatgaagaaaaattttgtgacttattgtattaagataagcctttgaatataaattggtttggttctgattttactaaaacttttcatttagtaggcattatcttaaagaatatacttttaggtaaatctaaaatactgtcttgtttgctttaatatggtcttccttaaaccaacatacatttgagccattaactgttttcttagtacccataagaaaagaaaatctttccttgatgaaaagggttttctgaaaaattattattgatgtaccttttgcatgttattaatagtaagaaaaaaaatttcttatcccagttttgagtaataccttgattttggataaagcatttctcttttcagaaattaccactttctctttgagtttttcttcttaaaaaagaatttatgaatttatttcactgataaactaaactttaatataaatcatgtaggttaaatggctggttgtggccacacaatttttacttatttattattatttactatgttgtatatatagggaaaaatagtaatagagtgtgtctctgtaaaccttgttggttattgctaagtataaaacaatctcatatcagtgggtacatatatatctttttatttataacttttgggcttttctccagctggtataaatgaccagtcttaattaaatgaatcttgagtatttcccctgaactttttttgactatagttctcctaaatgggaggttagacctcatgaaattaattctgttagccatgtatcttaactctctatacttcattttcactattgtttttaaaaaaaaaatacagtcttaaaatgcaggttgcattctttgattgtatagctcaggaaatatttaagttataaaatcatcaagtttccagaatgaggatctagctaggacgcatgtataaatacattttgaacatttcaaagccccttttagttaatgcgaagttcttcagatggccctattgtccttcgaagcgtctaacaccaaggtgtctgttgcagcccagagcaaggttactgctacgcaggacagcactaatttgcgatgtattttctgtggtaagcaacattatgtttacattactttttcaagctgtggtacatactacttgcacatagccataacttttgtttctctaggccatagtctggtttgtggtatttgagatatgaagcaggcttctgcataatgtggtgacagttgttgtgttcatgaaggtcattttgggttagcttttgagttggcttatttgtgaggatttaactagaaataaaatcttaaaatattctttcacctcttccaatataaatgagagagatttatttttttaattataattttcttgtgaatagacatctggtctaatttaggaggaaaaggcatgcattcctcatgacttgagtaggtgagtgtgcattgttgggaaggagttctgtttccctcgacgtagttccagctgtgcggattgtagaggcagacggagcctgctctctcagtgcgttgctttcagaggacagcgtgctttatttagtttctgtgccttagaagtgagtttaggtttatagattattttctgtcatgctcactctaataaatatacatgtatctatatacatgtattatttgcatgaataaattaggtatatcacttagtcactccatgctagagctgatcaatcatatgtatatatatttcatatatatataaatttcttttatatatatatacacatatatatatctttgcacagggaaatttttatatagattagtatgtagatacattttgtttgaattctttttttctatttgattctgaaacatcctagtttagaaacccaaatttcaaaataaagtgtttcttattttaatttttttgattcacgtatgatatgcctttttgactcctaccttgactagactatttcgtaagagaaaattataaaatggtatgctacaaaaaattttgaattaatagttcagctagtgtatgtactttttctatgtaactcggaatttttagtgtgacttcttagtattgttgatatggtttctggcttttaagtttctatgcttggattagataagcatgttataataagggaaaaaaaagaggaaattctaatttatctcctggtcatgtaagtttcctttggatctgctctagctggtggttacagcagtgagcacctattttatggcgagttgtaaatctctgctcctcgcccccagactccagcttagtactgcagatggcttaacatcagtaatgttatctctggtctggtcttaccccgggcttctcctgggcctctaggagcaatcattgatatttgtgtgatgttatacctctcttcagctcattttggaaatgcacttgatactgtaacttcgtgcttttcgggttgagatccacgtgtagaatgatagcttacccagttttaaaggggaaaaaggaatttgaccgtattaacaaaggggagtttttaaaacataaaataacaggtttaaaacacagatttcctttataatggccttttatttatatacagtcttccatctgattgctaaatttaagtttagctgtattgtatataacagcacctacttgtcctttagtcctgtttttagtctgtggctaattgttacctagacttgtgagaattaaaatgaggagagtaagtgaaatgcgctttggccaaaactcagaattgaaggcaagactgaagtgccattcttattggagagaagttcatatcagatttctatcatttatagaatgcatatccgcaacattgctactctgtctttattaggaacagtaattcacaaactttcctttgcctagcctgggcatattaggactagccataggcctggttatcaggcagaccctcaggcagagggctagatagagcagaatcccccatttctgcaccttggttgtttctccccccacccccaccccccttttttcttcttcacaacgataactgataaaatgctatttacccattgagatggttgtgaaagtatctattttgtattttatgagaagacagatactcagtttggaatatggcccatttgaaaaaatagtatacatatcagaaaatagagcaactgatgaccttggctaaccgtagtctctgctttttgttgttttgtaacacctttgatacagctcactaattttatatccctttaaaatgtttgatgaaaaggaatatgtaattgtgtacctttagtttataatttacccagaatttttatctaataattatagtattctataattatgcataattgcatatatatttcaggatgctggatttttacaacttggcaatattggtgaagaaggaaaacaaaacaagcagattaaatgtagatgtcacagaatgccaaagagggattttaagaatgcccggataaacagatggcttgttatcatacagctatgtagtaaagaattacaggagttaattcttagattaaaatcctcatcttaaaggattccttgaagttttcctttttatgtggtaggagtgcactgtagtgaatttccacattaagtttgttttatgagtcacatcaggattcttaggggctttttggaagttttgttctgttgagagtatatttaacccacggtgaccctaacctcaaaattctcctgtgggtgcctcccagatgctggcatacactaccatgctgggcccagagctagattcaaacaaacaaaattgtttagtaagatcaataagattaaattgaaattttaatatatttgacttgaatatataaatttcagctaaaagtataggcttaattcattgataggatggttgagatacgatgccttctctagatgtgagcatgacaattagactcccgatttccagctgtttcattatactggccaaagttttcatttaaacactcagacataatttttaaactgagccataatgatcttttaagttggttttaccaaattcttttactttatagttttaaaataaaataactataagcatagatatataaattatactcctcccaattttatatgttcttaaatttgtcctcccagctcagtgtctctctacttttttctaaaaggatcttttctctataaaataggaaacattaatgtacagcccaatatggcagtgtttttcaaaacatcattgtgttaattttctaaacattctattagacaacatattttcatttatgtaaacatttatatgtgtgtttgcttttaaaacgtgtttttggtttttcttgttaattacatggggttgattttatattttctttatttggttctcaaagtatcaggcttatatctaatgaaatacattgctgcagttgtcatctaatttgtcattagagggcaaattaaatgactaatctaaaatcatgtaaagagatgaagtttagtaggtaagttcagatcattttcctgcttttccatactgggaggggccagtgctgtcttacatcctgatgaaccttcgcttccggctgtgggtctgctccacgaggggaaatagccgcttccatggtcctcacgcagcacagcagcatgttgtagtacacacggcactgagtgtcaggccctcacacagcacagcagcatgttgtagtacacacacggcactgagtctcaggccctcacacagcacagcagcatgttgtatgtagtacacacggcactgagtgtcaggccctcacgcagcacagcagcatgttgtatgtagtacacacggcactgagtctcagggccctcacgcagcatagcagcttgttgtatgtagtacacacggcactgagtgtcaggccctcacgcagcacagcagcatgttgtatgtagtacacacggcactgagtctcaggccctcacgcagcacagcagcatgttgtatgtagtacacacacggcactgactcacttactttttatagtagtgctctacacaactctgagaagtcaagtgacacttctcagacggtggaaagaaactgtctttactttcttgcttttactcttgaagatttcaaggtcgttctagcttaaccttagattgttcatctcattgtatattatactaggtgcaacaaggatctcacttaatttttatatcctgtgacaataagatttcccataatttagtgacagtctaagataataaaaatgggtctgcgttatctatggatgctgggagtggctggatggtcagtggtttctcatgacagttccgtgtttgtgtaaacacagggtctccccaaccctctgcctttcttaccccaaatgaaaagttgttaagatgacctagaacattacaaattcagctaagtaggttaatactatagagtttagcaaatgtttgtttcaccagtcctggaaatgccaggtcattaaacaggaatggcagctcaggtgggcaggtttgataactgcattagcatacttccgtctagtatgcggttctcacactctctctctcctgtttttcatttccagtgttctatttaggtgagtttttaaattctgatctttcatttaagtttttcctctccacctcatgaataattaccccaaacaaaatgtctcattgtctcggaaactgtcaggctcgctcgggcgcctattcagatgctcattgaacacttgtttcaccaagctcttcatatataaatgtttattttccctttattgttggtgtttccatttgtttgaagtaagccttctggagatgatgacagcattatgttgcagtctttcatttgctgtgtgttatgtaagcttatattttattttgctagatgaaaagaagatgcattttttttaatatgtgatggttttatgttgttctcatggtttaatttcctccacccagcttagtagaatagtaatattcatctgtaatgtttcctccctttgtagggccaacattgcctagacaaaattcacagctacctgctcaagttcaaaatggcccatcccaagaagagctggaaatccagagaaggtaaatccatgtgtttacactttctggttttgtagcagacccaaaggacctaacaacacattgggcccttaggtctttgaaattgtgacttttcattctatctgctttttttgtagaaagcatacttgtgatacatctaaaactatattaaaaagactcaggggtctgttcccttcagtaagcctttttctttttttcagtatgagtgtgtgtccaagtgcacctgtatgtcccatgcatgtagaagttagaggtcaatctacattggctgtcttcatttgctctccacgctattttttgaaacaatctttcactgaacttggagctcactgattctgtgacccagatgaccgcagagctccgagatcctcagccccaccattcagatcatgggcacgtaacattcctagattttctttaagtccttctccttgcataggaagcactttgccaactgagccatctcccagccccatgaagtcttcttttatactaaatatctgtgtccagtatcactttcatatgaccattttaactagaaagtcaaagtgttatctaagtaagtctataaggctctgatcttagggctttatggggttaggaaaatacaagataatctgttgatggctaatggtggttaaacaaaaatagcaacattatctgtcatttcagtacaatctagaggtaggcttgaaattataatagttttatccgttctctgccttttagcgaaaatcaagtgcataatacctcatttaggggtggatttttcttaattagaatacacacacacacacaaacacatgtatcacttaccctttcagtatgaactatgaaattattaagacagtttacatgcgttggagagatgactcagtggttaagagcaacggttgctcttctaacacccacatagcatctgaaagctgtctgtaacttcagttcttagggggccaggggcttcagtgctcttttatgctccttgtaggccctgtacatatgtgatacacagacgtacatgcaggcaaaacacccatccatacacataaaataaaaataaatagttcttttttagaattacagtttgccctgggcagtgatcttaaaagcctttaatctcagcactcaggaggcagaggcaggcagatctcttgagttcaaggccagcctggtctacagaataagttctgggacataaagaaaccctgtcttgaaaaaaaaatagggggctggagagatggctcagtagttaaaagcacagattgttcttccagaagacctgggtttaaatctcagtacccacatgtcagtttacaactagctataattcaagttccagtggatatgacaccctaatacagacatacatggaggcagaacaccaatgcaaataaaataaaatttaaattaggaaaaaaaaatgttagcaaagtttacatcctgcttttcttaccaaaatttagtgtttattttatactcaaaaatacttctttaagtaaccacatttctagtgcttaatggccgtatatgggaggcattagagtaaatcttcttctagtgaaaattgaatttacatctccaaggtctttttttttttttttttttttttttgtacttacccgttgttcatactggtatgtgctgtgaggaaggccaatttaaactgtcttctcagccagggacagtggcacagaactataatgtcaacacttagatgccaaagatgaggattccagattcaaggcaaaatgaaatgtattttgatatctcatttacattttgtatttaaacataagtacatatttgtacttacttagtgtgggccagggcctgtagtatctgtttattttgaaatctagtttccttttctaagcagcttcatagaagctattaaatgttctcttaaaatgagggaagaaatcaagagctgtataacattgttgtggtccaagaaaagtggaattgaacttgaaagaaagaagtttgtgcctagcttgggaacagcctgcttgcctgagtcaggaagcccgtgggctcctgattggtttctcacgaggaaacaggagtgggtggggaacctgagcatttgacacgtttaaccacatgaagagggttgtgtgcagttctgctggagagcttggagtggcgcattggtgcatacatagggttgacgtggggaaagccaaggaaagtattagtgttcaggatacaaataggaagttagtttccttggaaagtagctgatggatgggcagggaatgaaatgctgtgtcaatactgcaggggaaaggagaaagaaaaattgggaggtagccagagtaggtaaggagctagagtataacgcagggatagagctcatggaggccccaggttcaattgctgaccacccagatagtgggaattaaataatttatcaagtaggaaaagagttacatctaaatatgagaagtcgggtatagatatttgtaaagaaattgctgttcagaaccttgagataaattcaagaatgttaaaacttagttgcttctgtaggaagaaatcaggagtagtgagcattattaagatgctctataataatccccttttaaaaactaggtatggcttttatacgttgtagtcaacataaagttgttggatattttaaatattactttgttgacctaatacttttattatatcataatacaattttctgtgtgtgtgtgtgtgtgtgtgattcatcaagtcagtttctggttcctactcattattaatatttggcttccttggctgtgatgggaaaatatattctaagaaacatgagtcagtcctacattcatctcaacacagaagatagtttagttaacatctaaaaatagctttcaaatcatcactactacctgcaagttataaaggggaataagaacccctttatagcacagaactaaggacctggagtaatgaaagtgtacagcactcccattatcctccagaggcaggatggaccaagagtcgatcgcattctgctgtaagtattggctcttgtcttaggagttttgtgatattcaatttcaactatcttctttttttttttttttagtagagcggtgaaatgcccacacaggacaatgaaaagtgtgtatctacaccagctgtagtagtacacacctttaatcccagcacttgggagacagaaactgttgagtctgtgtgagttcaaagccagctggggcttcatagtgagaccctgtctcagaaaagttaactaaaaaaaatacaaatttttacattttgacatatcagcattatttagtgttagcaaccagaatgctttttttttttctgatttgttctcccacttcattttatgaaattgaaatttatatttacccaaaaactgtcctaggtaaaggtgaataaaatatatcttgacattttatttatattttgcatgtctcacaagactatgtcttcataaaaacataaactaaacatgtatttgtatgtatattgattttgttgtgggccagtattttgttgttgtgatggtagtgggttttgggtttttgttttttgttttcatttgtttacttttagggactgatgttttgggggaaaatacctcaatgatagatagatatatatatcttttatgtttttacttaatatatttaaaatactttagtggccataatagtattcacttatgtttgtttctggaaaaggtatgttaattgttttctctgaagaacattcaaatgattgaaaatgttacatctaacttaaaaaaaacaagcatcttggaattttctcacagctcggaattcagacacgtgtgttaataaaatctggagatggttttactacttggcagccagcagacagatgtaaccaacctctagaagaagggtttcttgcattttctgtatgcaagctggtagtgatgactctaaggaaagcatcgtttataattttggagactccttaaaaagatttggaaatgtctcacattatagcttaaaatgttatggtcagatttgtaagcctttcaatttaagtaggaattattcatgccaccacaaatttgtaagtcagaaaatttcttgatggtgttttcattcccatatacatagacatcttttcaatgacctggctaaaagtattcactgctttattcaaacatcagtctcttaagtgtatcaactgcatacttgagttatctatcggcaaacttggaaatattctttggcgccctgctcttttccttagtacacattctatcttttattggctggaagcctttaagattatattggcatgtgcaaaactcttcttaagtcagtacattctagttataagggtcattatttcaggactgcttccagactcagccatacctatctcacctatggtgactaccaaaagttacttatgcttgtgttaaagcattatgatgctttgagaaacacgtgtaaaagttactggttttttgtttttgtttttgtttgtcttttaatgcccagcaattagaaaggaatgcagtgcagtcagagtaccatgtagctcagctgtggacagtgattatctaatgttagtgtcgccctgacattgatttttttcctatagctctgtgtgtgtgtgtgtgtgtgtgtgtgtgtgtgtgtgtgtgtgtgtgtgtgtgtgtggtatctcagggtatagtataacctaactgtagtttcattctccctccctccctccctccctctctccctccctccctccctagttctccttcctacctcccatctccccaagagccattccctaattctcatcagaaaagagctggcctcccaaggacatcaggcaaaccacataactagctgcaataagaccaggcacataccatcacacaagcatccagtgctcaccactgagccatatccctagcacttaaaggcctaaaattttaatacaaacctcagttgagtttcctcattaaatgtgtgttattgagggtgagtgctgttttttttttttttttcgtgatttaaaatttcttaatgtttctaatgtctttgcagcataaccacattgatagctatccctcaaaactggtatagctgataaattatcaaatattatagtaaatgtaccctgaaagtgtgatttcattagtagtctgtttcttaatgactcaaaagaagtactgcagttggtccctgcctaactcgccattgatatgtgaacgggacattgtgtagagaaaggctgttttgagtgaggtatgtaaagaattgatttgaaggatgggctttttccttttgtttttatagctgccttagacgggtgaaagttctttttccagtattttactgttgttttctgtttgtgggttttgttgtgggtttgtgggtttcatgtaactcttcgtcttaccagagcccagctggatggttggtccagaaaaggttccagttctaagcttttctgaacgatcatcaatacaacagtctactttatggagtactatacattttaaagagcttttattgtgttatcttctttaatattagctaaatgctgttgaacatgtataaagaaagataactgctttttagataatttcctcaaataccagagaaccatatattaagaatctttagaattgcctgcctgtccacctagaagtagttggaggaggtttcagggttagtaagataaatgtttattgtaatatgaataataataatagggtaaattatatcctacactggagactgcttaaactcaagagctaagcagtggtgctgacgtgttcgtgggagttaaagatgccaaactaaagttttagggtaatttttccagtatgtattgtatcagaaaaggcagatttcagagtcatggtgacatggtactgatttgcttgaattttaaagttgtatgtgtatgttattataaggcaaaagcctacacatatgtaccaaataactatagttacttatggatataaaatgtatagtttatttcttacttaactcggtttattttcaattcagtaaatgtttatttagctgtggctatgatcattgtgttttctgaaataacttgtgcagctaaaatgtttcatttttaagaaaaggagattactcagggtgtggtggcgcacgcctttaatcccagcacttgggaggcagaggcaggcagatttctgagtttgaggccagcctggtctacagagtgagttccagaacagccagggctacacagagaaaccctgtctggaaaaaaagaaaaagaaagaaagaagggctggagagatggctcagtggttaagagcactgactggctcttccgaaggtcctgagttcaaatcccagcaaccacatggtggctcacaaccatctgtaatgagatctgatgccctcttctggggtgtctgaagacagctacagtgtacttacatataataaataaataaataaataaataaataaataaataaataaatctttttaaaaaaaaaaagaaagaaagaaagaaaaggagattatacttcactttataattatttcatcatctgattaatataatgacttggccatcaaagtggtaggtttatttgcaactctattctcataaattgtgttgattgaacccatgttaagagcttactagtcccattggaataaaatacaatttttttatatcctgactatacagattttatatatctgtaaggaagctttcctaagtggggaagtagtgacagcgtgttctgcgtctgtctgaatcagacgtgaggtgaacatccactcactgtagtgatgtatagccataagtgcatatttttattcgtccaatgtttaatttcaggcaactgcaagaacagcagcgacagaaggaactggagagggaaagaatggagagggaaaggttggagagagaacgactagaacgagagaggctagagagggagcgcctggaacaagagcagctggagcggcagcggcaggaaagggagcacgtggagcggctggagagggagaggctggagcgcctggagcgagagaggcaggagcgggagcgagagcgcctggagcagctggagcgggagcaagtggagtgggagcgagagcgcagaatgtccaatgctggtaaggagtctgcagacgcgcatgcgcgacacgcgcacctcctacagccgagatgggccaaggctcctgcagctgtcagtggcgatacttcccatgtgcggtgcttgggaataagcagtacagtttgtagttaggataaatgctcaacaaatattgcttcagtgttccttttattgcttagaaactaaaaggaagcccttgggaatttttagtctgtcgttttaatttttcttaacgccctaaaattcagctataaagtgtgaatgtttttatgcaaaaaaaaatttataatgatcttggaagatatttcccttgtgccattgcttaaaattatcacatactgtatgtattatgctacgtacaacaagaagttagcttggttatagttagatttctgaaggaaaaattaaaatagattaaaaatattctcaaaaataaccggttatttaaacattttctggtatgatgaagaaaatcacagtctgatggaatttatagtgtcatagaggattatgatatagtataaacatttaagatggttaatatttatcaaagaattttaatcttgagctatatgagaggccaatgccggttcagtattggttaatttattgttcttaactgcataattgtctggagttatggctaagaaggtagagatgtccaaaaataagacactgagttgggcattcctttcccatcgtagtaaacatttcgccaggtttgaaaccacaactcggtttattctgctgtttataataattttgatgcagtttttagtggactaagtaataaacattaagactgttactatccttgtagaggataaattattaatccacatatttaaaagaacttatttcatcctcttttgggtttcgaaatgtgcttacaagttaagttttctccagtggagacagttatttgcctaatcccctggtgctaactgtcatccacgtttgtgcgttttgtctgatgctggtctcgggcttcactggctccctttttctctctccttttttatcctgtctttgccgctgctttccaccttatgtccagctccatcttcagacagctccctgtctagtgctccacttcctgagtattccagttgccagccgccttcggcacctcctccatcatatgctaaagtcatctcagctccggtgtcagacgccactcctgattacgctgtagtgactgctttgccacctacttccacaccccctacaccaccactgagacacgcagcgacacgttttgcaacatctctaggttcagccttccaccctgttcttccccattacgctacagttcctcgtcctctcaacaaaaactctcgaccttcttctcctgtgaacacaccctcttctcagcctccagctgcgaagtcctgtgcctggcctacttccaatttctcgcccctccctccatctcctccaataatgattagcagcccccctggcaaagctactggcccacggcctgtccttcccgtttgtgtctcctctcctgtgccccaaatgcctccgtcaccaacagcacccaatgggtcgctagactctgtaacatacccagtgtctccaccgcctacctcagggccagcagcgccacctccgccgccaccgccaccgccgccgccaccaccaccgccgctgccaccgccgccgctgcctcccctcgcctcactctcacactgtggatcacaggcttctcctcctccaggcacccctcttgcctcaactccctcatccaagcccagtgttctcccttctccctctgcagctgcccctgcctctgcggagacccctctaaatcctgagctgggagactcctctgcttccgagccaggcttgcaggcagcctctcagccggccgagtcgccaaccccacagggtaaggcttcacttctgctgctgactactggtcattctgaggagtgcagagcaactttgcctgcctagaagagtggctgggtcctatggatttcatgattgagcgtctctatgccaaagtgctatttggggttgtattattattattatcattatcattatcattatcattattattattattattattattattattattatttagaacattaaaatgaaggattttgtttttttaaatcctgggccttagttggaatttagtatgggagatgtccatattaaacttaggttttagatcgtttgcagtaagtactgtattataggtgttttctaatatttagggatcctagtacttctacattcatcttaaacttcactaggagcacttgactgtttcatcttccctggggtaaatatgagatattttcctagagacatggagatctgtttaatagataaatcatccctgagttttccctggagcactcctgccctaagatccctttttcatttccacttctcctgtattgagctctctgtattagacctttagggtaggtagcctcaggccctttgcagaagcagagggttggcaggcttggtgtatcccccagagggttctattgcaagtgttgctatacaggcaaacagaaggtccttgaaggtttcctgtagacacggaccgtgatgcagggcagcagggaagggccatgtaacattaagtgcagcctgtggacataaagatggacgcggttctgtacataagaaggtgcatggaaccctgcctttgttcctctttataagtataggatgtagagaggaagtgtgcttatacaaacaatgtaataatctggatttagacatacctcttttgttaaaagtagatttttttgatgctgtcttactagatttttgtaaaaggtgaaaagaaatttatcatgtgtaatttagtatctctctgattgacatctgagcaagaggccctgccaggctaaagcctactggtgctcggagctcagtccgaaggatggaagagctcaccgtcagccctctgttgctctgtgtgtattccctggtgaaacctccgaagtgacagctactccccaagtgtgcaactcactagctttacagaaagaaaattagccctgttaaggcttaagtaaatacttactaatttggtgttttcaattttaagtaaattctttactctgtggtttttttgtttgtatgtttgtttgtttttaacaatatttaaaagtacttcctatatttctacctcaaagcctaaaatcactttatatttaaattctttttggttttttcgagacagggtttctctgtataaccctggctgtcctggaactcactttgtagaccaggctggcctcgaactcagaaatcgcctgcctctgcctcctgagtgctgggatcaaaggcatgctccaccacgccgggcatatttaacttcttaattctcagttagtttgaggttttacctcatattagtttattatatttcttcagtaatgcctatctcagactacatgtagaatcattttaagatactaaaacctaagacccatttctccaaggtcttcatcttgtctgtctgtagtcagatatgtttgtcatcataggtcaaaggcttaggattatcttgggtctgttatctcaggcagtactaactgcatgtctctctctctctctgtgtgtgtgtgtgcatgcgtgtgtgtgcgcataattttctaaatttgtataaacatttgtcttcaaatccctggggggggcggagctcattagttttattagaaaaagttgaatattaaatggttgtatgtgcaccttggctttcaattctaatatccttagttaaaaacaagtattatgtattaagtattatgatagatcattttgttcagtgcagtgtctgagtcacttacttgagcatggcattctgtatatctgcccgtgtaacccacagtgatttagctgtgttgttaatgactgtgttaactttccttcctctcaggccttgtcttgggaccacctgcacctccgccaccaccccctctcccatcaggccctgcctacgcctcagcacttcctcctcccccaggaccccctccaccacctccactgccatccactggtcctcctcctccaccccctccaccaccccctcttcctaatcaagctcctccccctcctcccccacctcctgcccctcccctccccgcatctggaattttctctggatccacgtcagaagacaatcgccctttaactggacttgcagctgcaattgcgggagcaaaacttaggaaagtgtcccgggtaaattaccaaattactgaccttctaaatgtgtgtcttaatgtgtctaaatgcctaaaatagtgacattactggcatgaacactgcctttaacttgactgattaaaagccaacataattcaacattttagaaaagtgtatcgtgaggagtttctgagaccatcggctcaggcttagcagtcagcatctgactgacagctgccttttgcttgctttgcctgtacatccttactacacctcagtgtaaatttggagggagtagcgagtgacttttaggccatggtttttctagttcaagatcatttgttaaattagctgtaatgtttgtttgttttttttaaatcaatgacagttgctcagtttctatcacctttaaaaacaatgacagttggtttgttttgttttgttttttaattatctttcagtttggtttatcacatttccccctcaatattggatttaaatgatatgtttgggatgaggacaaaccataacaaggattttatctttcccagtgtatcatgtagatagataatattgtttcatcccattattggtgatcgtaactttgataaaaattttcactgataaatgaagtccatgttattcactctcttggctcttcaaatttaaaaaaatatactgttttggaatcaataacatgttcttctgtgttgaatatattggcaaaagttattatctacaaaggaaattattatgtatatgtgtgctctcattaaggtggaggatggctctttcccaggtggagggaatactgggagtgtgagcttggcctcatccaaagcagacgctgggcgtgggaatggacctcttcctctagggggtagtggcttaatggaagaaatgagtgccctgctggccaggaggtaaggaacttaatgtgatgcacatgtccacagtcagaaagatttagaacaaaagtagatagatgatagccagaggtaggtaggtaggtcatataaaatctttaatgaatttaccttttcaggagaagaattgctgagaagggatcaacaatagaaacagaacaaaaggaagacagaaatgtgagtggatgtaaactaactctctctctctctctctctctctctctctctctctctctctctcagttcattcagagacgcatgtgaagattaagcatctgaatgaacttaatgtttgatcttatgtttgctcattttattcctaactacacaaccagtaaaaaatggcttgagtgttatgtattaaattgtaatctcatttttttttaaggtttatttatttattatatgtaagtacattgtagctgtcttcagggcgtcagatcttgttacagatggttgtgagccaccatgtggttgctgggatttgaactttagaccttcggaagaacagtcgggtgctcttacccactgagccatctcaccagcccgtaatctcattcttagtgaattgagttgaatctggggaggtgtggggaaagttgaagttcaaacctataaagttaacttgttcttatattcaccttgaagggagtgaatgaattcttacactggtgaaattttctaatgtgttgggtttctcaatttctttgtgctatgtgagattaaagaattttattaagtcaacagtttataggttaccttatacttttagctataccccttaggagtacccccttcatgccttctccacatttcagctgggtaaacttctatctgttctccatgttgtcattgaacacagggtgcccatgttgtcattgaacacagggtgtcgtggttctctgtgatgtctggcctcctctcatagcagatctgtccatgaggttcctaggggtgactagtacaggtgcttggaacttagcgagaaagaaagtgctttgggaaggcagcagggaggagcctaaggggaagatgagagaaacaagcaggagaagccagagtgtcagacagatggtggaaaggggagtgacagagaggacatggggaaggaagttgggaaagctagctgcagagagccgcactttctagtgactgtgatgttcatgtgactctttctgaatgtttaggaagatgcagagcctataactgctaaggccccatcaacaagtacacctggtaagttcaggagaaaacgatccctaagtgctaatcccctctcattaagaaagtcccttttcctgtgtttggatcaagtgactgcttgctcacaaaaatgttaaaatgctgtgtgtatatttgaagacactgacctttcgtctgccttttgttttttttgagacaaagtttctctgtgtagccctggctgtcctagaactcattctgtagaccaggctggcctcaaactcagaagtctgccctcctctacctcccaagagctgggatttaaggcgtgcggcgccaccactgctcggcttcgtctgccttttgtgatctcattaattagggcttttcttcctgaccctgaaatctgttaaaacctaacgtttttgttagtgctgtctaggcaaataccattgtgtgtgtgtgtgtgtgtgtgtgtgtgtgtgtgttctttgtgttgtgtacttgagagtattcattacagggaattatttttaaaagttttttcttttttaatttttttcaaagatttatttattttatgtatatgcgtacactgtagctgtcttcagacacaccagaagagggcgtcagatttcattacagatggttgtgagccaccatgtggttgttgggaattgaactcagaacctccgcagtcactgttgttagctgctgagccgtctctccagcccctaaatagtcttaaaaggagagaatgaagtgagcatgctaggacgtgtatttcagaacagccccagttgaagctagagccctccttctgggcagccattgactgctgtagctctttgtctagcagttgggaggcgtggaattttctgtctgttggcgtattagctggtgttatcactatgctggccttggtcagcgactgtgttatcgtgatttcatgggtacagcttctccgtcgtgtctaagggatgttatcttgtaaagtaacatttatttgccagatgtagttgttgtctcagaggctcactgcagagtaagtccacccttcctagttctttctcaattctggctggttggttcacctcagctgttctggctcaaaacttctgaccaagctgactgattcagattggcctcaaactgactctggagtttgttctaatcttctgactcctcattctctggctcattctgtcttcacctacaacctgtctctacaaaactgtcccgatagaactgagccccttcctccttcctcctcccttccttccttccctccttccctccttccttccttccttcctccctccctccctccctccttccttccttccttccttccttccttccttccttcctacctacctacttatgtgcactgctcccctaagtctcctttctttcctctgctgttcttgtgagatttgggcatatcctatctctgactcttttgtcaaatctttctctgatctgtcactttgtctgccttgcaattagatggcactttcaaacatagctgcttccttctgcaagctaactttacttccattgtttgggattaaaggtgggtactaagggcacgtctgtgttccagccagagggattgaaggtgtgtcgttccagccagactctatacatttagctgtgaacccagaacagccatgctcctggattaaaattcttgtacactgtctagcattcggcctggtcctttggctctaagaagctccccactctctgtgtgatgttcctgaactttagatgtaagagttacatttcagagatactaattggggttggcaaacagtcaatcattattctgcacagctgtggatcttaacaacagtctccatctgttgcaaaaaaaaaaaaaaaaaaggtgaaagccatatttatctgtggatgtaaagacaagtatttaatatagttagaaattatgttagcttaggaaaatgacagtagtaggttttcctttcaggtcattttcccactcgtaaattttcttttgaagttagctgtcaatagatttattcttgtcattaacatcctgacttcatgaggtggtaactaggattcacctgtcgaatctgggctgtctctggagaaaacggtgttgcattatgcattgtaaagtacttggcttggctgtggtccccagagaagagacaccctaccctctgcttccacggggctgagtaactcttcttcacaacaaggggcttaagattaacagagcgcgattactaacaggggcttccctaatcgagaaaggcccccaatcgtctacgctgttacctagtcacacccttccactgcatcatctttgataactgtctccgtggcccccacctggctgctattctccccacctctgttacgtagggtagtgtggtggatgcattttttattccatccttcttgtccctgctctgttttttgttttgttttgttttgtttttttgatgttctcttgctctctctggaacttgcctttcctgtgttcactgacagaatgccttagcatgcccacgcaaaagggaaaccgaaatcatgataaagtacaggaagacccacggcagcccgaggttcttcccttagacacctggccacagcaattcagggcccaaagcgggacctgctcacatttagttttgcatatatttgaaagagactaaagcctccccctgagtgaagctgtgcagaagccacatgaggggagacattagaagataaaacaaagttcttatttaaaactatacagtgacatgtgacccatatgtagacttggcttaaacgtgactcaaatgctattcctctgtgacagagattcagtcttttgattttctcaagttctgtagtcaggtcagtggtagcgcacatcagtgagtcagcccagttagagagtcaccgcccagagcacccagatggcccgtcacggaggggccggtctcttaggtcctgagaatgactggttttcacgtttatttggagctgtttttgccaagagagctgtttagacttatgtgagatgttgaacagaagaaacacatcatatattgtagtttttatttactgttggcacaaaaaagtttagtacatttgaatttatcagattctagtataaattatacttatttctttatcatgcttgttaccattatcatttggattatagaactgtaatatttagattttttttgggggggggggtttccaagacagggtttctctgtttgccctggctgtcctggaactcactctgtagaccaggctggccttgaactcagaaatctgcctgactctgcctcccaagtgctgggattaaaggcgtgtgccaccatgcctggcttagattttctaatacaggggtttttttcttgctattttctctccctctcccctcccccttcccccctttcccctcccctcttccctctcctcttttgttgttatttggcagttttttgtgtagccttggctatcctagagctcactttgtagaccaggctggccttgaactcagatccacctgcctctgcctcctgagtgctagctaaaggtgtgcactatcacctagctttgttttgattttttttcttttagacaaagtcttactatgtagtcttggctgcctgaaacctattatgaagaccaggctagcctcagactcatagagctctgcctcccccatttctgctttaagttctacaataatacaatttagaatccttactgtttagaggtttttgggttttttattggtattacctctgtgtacatagagtgatggtactacaatggcttgttctgtaatgattctggaaggttctaagacgtgtttaatcacccctgtttcttatttttgaagaaccaaccagaaaaccttgggaaagaacaaacacaatgaacggcagtaagtcacctgtcatctccaggtactgactttcttttctacgctttatgtgacatgcgtgttttctaaagagaagctagcgcaagttgtacagaggagagcaggcgctccagatccacggcactgagctcctggcgcgtttgctgctcccgcttgtctgataaattctacagataatttgtctctcacatggactgatattttaggagagtttcatcccttttaatttgtttatttttgaaattcaaattaaaaggaaaaccggtgcggcaagttatacgtatcactgaacttaacaagtagtcctatgtctgtggctttgcatctatgttactttcctcttacgagtttgaaagaaacttgcaagtaaatggtgttccaccctaaatacttggacaagttcccaaagaaccaagggtatctgcaacataaccagagtagaattcctgccccacagtaacttagtattgaacaataacgaaaatctgatacagtattgagcaataatgccccattagtcccgacatagttttaagaattttagaagaaaattttatgctttatattgaaaatcagctagatgttctagagaatgcaagagagcaaacataaatttactgtatcttagtcaaatcttctaagtgtggactggagaaatggcctagtggtcgttttggcatatacaggttctattcctagcacccgtatggctgctaacaaccatctgtaactccagttcctgggggatcaaatgctgttttctggtctacgaagacactgtgtacccatggaggcaaaacacccatttgcatattatttaaaaaataaataatctagatttggcagtgcacagtttttactcctagcattcatgaggcagaggcgagtagatggccaacctagactacagtagcgagaccctgtttcaaaaaattaaatcaatcagtcgagatcgtgtctcaaaaaaatacagagcattcatcacaacttctggcctccacatccacgtgcacacatccacacacaccacagaccaggaaaggcaggttggaggtgaggctcagttgggagcacccttacctaacatgcagaaagccctgagttaatgtccagctctgcatggactgggcgtggtgtcgggtgcctgcagtcccagcactgaggtgcaggggttggggttgagacgggagaaggtcaagctcatcctaactacagcctggcttgcgggaaaggaggaaaggatgacgcctgagttctctgtagcaagaacattgtggtaaaagggctttaagatgagtgatcgatcaccttggaatgttctgtggttttcagtaaaaatctactggttttattcatgatgggagaaaatgttctttacatgcctgtgaatagtcagtctgttgctttgaaattcatcaaattgcagtgtctttgcttgtgctttgatccctggtaagtagatcgctgcagcctacagaagtggccattgtgtcttcatgtaaaccagtttgagaatacccttttaaatttggtaaaatagatatcttaaggataattaacaccttttgtttttgttttgcttgctatgtaactataaattggtagcatcgtgggaattattttttcaaggtctgctgtataccctttaaatggtttttccccttcatagacgggattctccaaggagaaatcagattgtttttgacaacagggcctatgattcattacacaggtatcatcctgctgctgtgactttgtggtttcagacctttcagtaacatgtccaggggagggctgagctttttctacctggattggtaatcaccacaagggagacacttaggaggactgaggtttcttctgttttagctgtagtttgacacttaaagtagaacgctgctatcgttcaatagttggattcatatttgctggaatgaagaggaaaatcatcctacattgtctagttggggctttagagtttgcctttaaggctgttctcatcataattatgtgacaaggcttttttaaaatggaattgaaagtcctgtgctggttttgctagaacacaggatagaatttgtagccataggcaaagctgcttgtttccttaatgtagtgaaatgagtgtctttaacagtttggtatctgacatcctgagcacattgtttctagatcaactcagacctcgggatgttaaacatacaggtatgggagtggagcttagtggtcagtcaggtcctcagcacacgtatggcttaggttcagtcattattagcattgcccctgacacctctaaagggctggtggccagtatcagtcatctgcttctttcttaattggaaaaaggcaactttttaaaagtctgcagatgcttttcagctatttgcagaattaatttgaaagaatagaaagtttaaaaattgtggtatcaatatgctctcttaaagctaaaaacaaaaaatgtgtagccaggtggtgcatgcctttaatcccagcactcaggaggcagagagacaggtggatcttgttgagtctgaggccagcctagtctacagaatgagttccaggacagcaagaaaccctgtattgaaaaaccaaggcgggggagggaggaagaaaggaaaaaagaaaaaaaaaaaaacacatgtatttaaacatctaataaactcgggttttattctcagttaaaatgaaagcccataaggtaaaagtaacataaagaggggcgtggtagtgtgtgcctgtaatctccaccctcagatttccactgaagcagggttatgaagtaagggtcgccaggactacatagtgagaccttgtctctgataaatgattgaacacataaaccactaaaatatgtgtaatttattagaaatatattaatgtattccaggcacagtggcgtattctgtaatcctagtgttgtggagtcagaacagaaccaggatctctgtgggttgaggccagcctgatgtacgtagagagtctcaaggcatccagtagttctgtaattggactctaatcaaattcttatttgctaaaatttcttttatgccactggcaaccaaaatatttgccagacttattttgctgaccagttaattttccataaatgtccagcctttttatttgtctaattgttctgaacaaaaggtttattaggaaaatctctggaacatagagagaaaaaatagtaccttacaacaaaatcttctaagtcatgtgactgccacacacacctggtgccaggatagtgttcctttttaagaaaagaaaaaagaaaaaaaagtggtgattgcttctttccttcagtatgaaaagttcccccctgagtcagttctcatggtgctggtgctggtgctggtggtggattgcatggtagcatgaattaatttttttaaaaattgcatgtttgcacaattgtttattaacattttaaattgtttaataaatacaagtatgtttatacccagtagcatatttcttcattaagtagcagattgtacgtgttagtttgaatgtcagaaatactcgttctatatcttaaggaagaaaatcactacttgacctcaaatgggaaaaataaaagcagattattaataatttaattctggaaagcagaaataattaacaagtataaaatgcagtgagccaaccctcaaaaatatttactgcacctgactatacacagtacactgggtcttgaatcataaatgactgcaattaagtaggcacctcaacacagaaaggtgtggcctcatgggagggggcaggttctttatataaacagagtttctgtataagcaggtacccaatacgttgaaattggttattcttgtttcataataagctttttaagcagtaaaatggtttgatattaaagcaaattaacataagtatttcatcttcatgaacaatgcctttgggtttggagtattatatcttatgtgaattataaaatacagctttatagcaagttacgcatgttgggtcttgattcagatacatgtctagcattggtgctctgcagaattgaaatacctgattgagcagtggtttatagagcggttactgctctaaaccagaaaacggagacctgagcgaccgaagcgccaggtctcctcctgaggctttccatccattttcaggattggagagggagccatgattgattttggtgttggaacttatcaaatatgcctaatcccttaatttactttgtaaaaattttaataaaagctaattttttaaaagtaattgacagcttctgtcctaaaatttcccaattttttttcttgtttttattcattccattttcttcctcttcaaagcagagtgcgtttatgaacctgcaggaagttagggtaaactggacacgagggtgcttctaacccaatagtcaggttctagcttttgtctaaatactgaaaatggaagcaaaccgactagaaactgaccttaggaaattatttcttcctacaaactgaggctcagaacttacaaactggtctttgttaaatatttaaggcagtagagctttccctttgttgatttgcctgatatttaatgcctaatatagtttttcaaaagcaccaaacatggctgtgttgtatgggccttgagggtttcgactggttgctttgttgtgtccttggccagcatgccgtgtgttctctggtaccagggagtgctgtcttctactttctccataaaggagtttcactgtattgtctcctttttcttttaatatagatgattaaattgataaagtaaaaaacattttctgctgccccttctaatcagtcctgaaattttgacaattaactttttagcaaaatgtgtttaagaaatgaatttaaatctggctttgggatggcaaatttatagttacttacaaactcattatatattgtaaatataatttatctgtcctggaaatttcttttgtacagacccaaatccacaccttcatcacagccaagtgccaatggagtccagacagaaggccttgactatgacaggctgaagcaggtgggttctcagtggagctttctgtaagcctgattgttacgcgggcgtgggaaaccttaccctttaaccccacacgggtcctggagtgtgctgaaagcttacacaagcacagatactttagactatttaggctgtggccacagtcgtcccatatcgtacagctcagttcctttctggttcattgagctccctttaaattccagcagcagggcaaagaatagcttaaatgtaaggacagggctggcagttctaccttctagaaagcgtgggcttctacctttcggtggcatgttggcaacagtacacccgacaaacctgaacaaaagtgatactggcaagaatgtaaggaaacgaacggccaccctcacacacgtatgatttctaagaagctgcttgcaaagcaaagctttaacttctgaccagtgattgtatttaaagtgatttataaaaatagattggagcaaaagtaaagaaattttaacagattggtagtcattggccttactcggacatgaaaagctttttctgtaatgaattttaaaagagaatataaattcttcctgaagtgaacagcatagcactcacataacttaaagagtaaatcttccataggtagctcttgttttttcaccagtcattgtccttttaaatttaagtctacaattgaatctacaatttttgatgggagacagagcatcattctcacacacacacacacacacacacacacacacacacacacacgaatagtctcataaaaaatgaacaggtgaggctggagaggtggctgcttagtagtgaagagcacccactgctaaggcagaggacccacttcccaacgcccgcattgtctcacagccatccagcttcagaggatctgacaccctcttttggtttgttaaggcaccaagcacgcttgtgatgcacatacgttaaagatatgctcaatgatctgacattttaatgaattgtttcatttagtgaattatttctgctctcagagaccagaacgggaggtctccctagaactaagttcagaggattgtgggtagctatttggaaccaaacctgggtcctctataagaatcagcctccacactagttttaaatgttaagtctgaaatctggtgcatggttaacactcacagtccatctcatttcagactaacttcattgtaagagctcagcagctgtgtgtggcaggtgcctgctctgttaggtacttgaagtagggcttggtaactgtggtgctaagaaattgccatacttcaaatgaggtgacaaatttgccaagagctaattatccagtgacctcttccttgaaacttttgtatgtatcacatctcaggaagctgccagagggttggccatcacagccatctgagttatacttctctgaatgacaggactgacttttgatgttctagtctttctatcccatatcttactgggccagagtaagcaaagatgggtcaggaggaaataatgtaaacagagtttacccaggccaattctgtcctaagaagtagaattggaactgcggaatcaagtgtcagggtagctgagcataaggactgagcttgacctgggagcccagcaagccaggcatgttggtgcatggtgtccttggcctgctggccagctagcctggtctactagatgacttccaccagtaagagattgccttaccaaagggggttggggccctgcacttgtaaaataatacccaagactcctctgggtacgtacacatacaagtatgttgtgatacattctctaacttacctgaacaagaaacctcttagacatcccttcatttttgttggttttgctttgttccctggtgttttctcttgatacctcaggacattttagatgagatgagaaaagagctggcaaagctgaaggaggagcttattgacggtgagtacctggcgcatgcacgtccctgtagacagctgtgagactgacttcacactcgggggggggggagggttgctagcctttgctcaggttgttggaaagctgctgtatttttatcattggagttatttgtaaaaatgaaaataaacagatttctaagtgtcaagtgtagaatttggtgtaataataccaatcaggcagatttttctctccactcgtccatttccattgaactgcccttgtttttgagcccacagaaccagtgttcctgtcttaaatctacaagggagggagtaagtggacatagtcgtgtgtgattagtatctttataaattaaacatctgtgcagtgaagatgtagatcctgtatctttgtatgaaacagttagaacagaaccttgaaagttgttcaggagcgacccgttcctctgtatctcctctggtggattgactctggaaaccgtttcttccctgttgtagcaatcaggcaggagctgagcaagtcgaacactgcataaagaagcaaactacggaggggcaggacttgaatctggagaaaacaaaaattcctacaaacaactcttaacccccaaacttttaagctgtaagaagaaaatggatacacagtcaggagggaagccgtcaacctctgaaagcctcagacagtgactctggcgatcagctgtcccctcagtgtgctgctttattctgtctgacctttaccacaggatggagaatgatattggagttcccttagcagtactaaacccgtcaggcaagatcaccgtgcattgaaatattttcatgtctagatgagtctgcacgttttccataatccattgctaaaataaagacgagaaaggcttcagagatttttttccagagggcgctgatgaagaatttgatttagtaagttctgctgttgcgttgtaaatgtttctctcaggtttgtcttcctatcatatttgatattccgtgaacactaagatcataaaggatggaacaaacggagttgtatgtgctttcagagggtggtgtttaatacgaaaggtcccaaaatgtttagtcccacttgaggaattttagaatgataggaagtctctcgggttagccttcatgcaattttgtagtttaaaacataaagtccgtccagaaattaaagatttagatgccttcctaaattgttacaatgctttaccaaatctatgacttctacataaccaacagtggtcaaatggaaaacattctattatagatttactgtaggttttcaaccttttttagacatatgcatgtggacatttttataatgtaattacaatcaccacaaagttagcttttttaattacagacaataatgcatgtcacactaatatgtagtggccttttcagggcctagtcccagggaaaatattttgtagaatatagggaagtgggaggaagggaaggaataactttttatttaaagttaatttctgcactatcttttttttctcaattatctgcatgaattataatgaaaaatattttgtgactttaatcagtaaacatgttaacaaaaccaagtacttaatcttttacatcatgtcttcagctatttgtattttaaccagcaatttcaacggtctgaaacatgattctgagcgtaacatgtgagtccgtctcactgtggaactcacgagtttgatcactgaatttggcagttattttcacgcggcccccacagtgctgcagtgcttgggttcacgctcctgactctgcggctgctccttgacctttgctgtgctaaaatacaagaaatatcaataatggcagcaaccagggtcacataagtcactaggtaagggagaccaatgaggagttctgcagctttcttttaatagaactaaagtgaggcttaagtggtagggagtgtctgctgttacaccctgagtgtgtgtgtgtgtgtgaaaaaaaaaacacaccaaaaaagggcgaaagaactgaatacaaggggttgtgaaatgaactgagaagtgaaacggggaaatgtgcaagaaccacaaatggaataagctggcaaagacacgtccagaagaggaattcgctcattgacacaaaaaaacattgatggaaggattcttcgtaagggtaagcaatgaaggaaaactgagttagttcgaaccattcctagtggcccagattaaaagcccgtaaacagacagtatagatggatcttaagagcgtacgtgcnnnnnnnnnnnnnnnnnnnnagagagagaaagtgatcgagcttaagagtgtgtgatagatattatgttccacccctttataattggcaagattaaaataagggagaaaattttatatgttgtaatgttagctttttggaaaatctaggaaatcaaaaattctccaggctgtccatcatgatttatgcttgagttattaatgtgccatatttgctttggaatctttggctatcaaaacttttgctaaaaaaatagtagatacaatccactttgatttgctttctagatttcctatgtctcagctgtaaagcaaagcttgatgagagtagttttctaaaccctgcagtttgcagctaaccccactgcagagccgtgtgaatgaggggttttgttaagagtgtttgtttctgtagaaacttcatctttagattaaagtgtgagggatgagcggtcataagtcaattctgtggctttctctacccatcagtcgtcgtctcgcaggaatagtaaaggcattaaggatgcggcaagcatgtacgctgttctaaaagaagtatgcatctcatttactgttgaacgtttgattacgcaactactttgattgtgtacgtgtgtacatcccttacagatctgatcaaaaatcgcttttcattttgttgctaatgttaaatagtctgtagtacgtagagtactgggtctagatggtccaaagtgagacaaaaatgctgaagtcaaatgctaagtcctaaacaaagctggtttatgcactaaacgttttgtgccttggtctaatatttaacacaatgtctgtaaaaatgacaaaaaaagaaaaaaaaagaaccgacattggctcatgctgtatctgtatcctccatgatagtacgtcctcccacatgactaaatgtgctcctacctggatgcttcactgtcacccaggacagtcgtgtcgtcgctagagatttcagtgactacaatcgcaagctaaagcttgagttgttttcccaaaactgttccttggaaccatattgtgacggtgggtccttgcttctgtgtgttgactgtcttcagctgagtccagtttagggatcgtctgtgatgacaggaaggctctgctctcctcaacactgtgatctgacctgcgacaactctacaatacactctgaatggctagcacgtccatagcaaacaatctgaatgtacaaaccttagcgtggtgctgaaatctcttgagaatagtaaccgtgatctcaaagtctgttcaaaacgtgtcaatcagaactgaagatgaaccgctgatgaatgtccggtcctcatgccgcaggcgtgtttcctgtctaggttttcagttctctgctgttaccaccatagctgttccagttaactctcctacacactaacttcatttgtgcgattgaaataaaattgcagtatgtgcatgtttcttgtttgtgacacttagatggtcttctgcaatgatgtgttaattccaaaccaagtgatactgggtgtgaaatcagcaccttaggaagcccagggtttcactgtttacagtttaaacatcatgtcactgttctttaaagatttcatccacgtctggcgtagtggaaaacacgaagggaatatgtaatgatctttctaccttttgttttgcagtaagcgctgtgtgcctcttctgtcttacatgctcccagcacagcttgtagtcaatgtggtgaaaagtgttttactccattcttttgtcctataacacagtcatatatatatttcacttcatttacacggttcattttttttctttatgtaatttgcatattaaaggatattgccaagtaattaactttaaatgtagcagtctgtaccctctacagtgatctctttatgttggctttttatatatacttatatatatgtctcagcacctttatctattacaaagttccattttccaaacttgtaatttcctcattagaagtacaactctgtctgtgtgtgtgtgtgtgtgtgtgtgtgtgtgtgtgtgtgtgtgtgtgtctgtgtgtgtgtgtgtgtgtgtgtgtctgtgtgtgtctctgtgtgtgtgtgtgtgtgtgtgtgtgtgtctttccccctttatcagacctcggcatctctcccaagctcctccgtcctctttgtgcttcctgttcctggcattaatttgcatttgcaaccaccttgtgttgctcactgttgtgaagacagccagctgatttttcttttggttccaacttacactcctgctttatctacaaattaaagtcacttaaattcgaaaatgaattaagtagcaagtcctaagcttttccatttgcttagctaaaattactgtctcttaacttttgcccatctttgcagtgaggctgtgaagaattcatgtttgtacgattcagggcttgccaggcagggctgcaggaactgtttgatttcttgtcgccatgagaattacttaagccctttaccacggtctttaatcctatgggcgtatctgtaatccagcatcctggagacagaaacaggaggattgtggatctgatgtcaggctgggatgcatagagaaaccgtgtctaaaacaaatcagtaaaatcctatgggtcgtaagcataaaaacgcggagcataaaggaactcaagatgaacataaaaagcagagtgtaggggggtgtctgtccctttatcacactagaaagcccacttccaaaggcagaatagttttcacttccagactcaacctgttctggtgacggcatttttgtttttaatacaattggtatctgatcatctccccagagctctgtgactctttggtgagaggcatttactgttttataagttcagttcctttttttttttttttttaaatcaaaacttgttgtattttaaagaatctgactaaacagttattctggtcagtacttcatgtgaagatcctggagaacatgtacgtacaggaatcgctttcagttaagcatacgcctgtttgagaaactaaaatcgtcaatctctcaagagaagccatttatttatgccaaatattcttggggttgagggcggggatatgatatagtctttctattcccaacatcaaaataggctctgcactaaatcttgttcccttatgtttaccttggtggctttttgaagtaccaagcttctttctaaagcctctttgtgggtgaatgtgagaatgagcatgtagaaaccagtgttcaaccttggcacccacctgctttgagacagggtcacaaattcagctagacctgctggcagtgagcctcaggagatcctgtctgctgcttgctgctgggttgcctagcttgtaccaccacgcccagctgctctgttttacatggattctggaatcttaactgatgaccttgtgcttgcaagggaggcagacactcttccaattcagctagctttctagccctgcccccccccttttttttttctttatatcttaatgctggaacaatgaaagattcaaaatttaaacattaagattgattagttgattagaaaagaaagtaaaatggtacagtaaaattaccatttacagacaggggccttctatcggtacaatattaatgaatacctcacataaggaagatggggctttaggataaatttgaaaattgttgaagtatgaactatgttaatttgtaaagcaaccgtcactgaagggtagaaagtgacttggttactgtgacttgatgttaaaaagaattttctacaatcattggttctatttgttgaaattgtaaagatagggattgtgtgaggaggagagggtttgggaaagggcgtttcccttcggttatagatgctctgttgtagaactccctgagcacctgtaggtttccagtgcttgctcattaacatagagaataactgaaaactgaagctttggttaagtgcttgaaccagagatcagtcaccacaccctacctagtttgaagcttactgggtattccaataaagagcttttagaagtttttggtgtggaaccccaggattcctggataaaggaggcccagataagagcggagagggaggagtacttgactctcttgagttaggaaactcaagagcatggtgaactcatcactaaatccagccttttctaaacaaaaattaaacagagttaaaagaatttcacattctaataaaagttagaaatgtccatgcacttcattgaagagctatttgtaagtgacagtctccatttagcccgtaaatatgtctcagctgcccccttctgagtccagaaagatgtccttagcagtagaaacagactccttcaaaagaaaattacatgtctaatacaggcagtgagtgatgttgccgatagatagggtgttagccggcgctgggtgtcgcaaaggaaataaaaccccagggaaagaagtgtgcatcgagtctggctctgggattcatccctgttgtggtgggaatacacagtgtgtatgaggtccctagtattgaaaaaatcaaaatgcagctttaatcatgaagtaagtaacacaggaacctttttcaagtttgatacctaaggaaaaaaaaatgtttgaaattcaatattctctagtcaattctgtctacccagccttcctataaagttttggtttgtttttgttttgttgtttttaagattttaaacttcttttagtagagacatagaagattgtcattccatggccaagtttcacctaggtgagttttggcatttgatattctaacttctggaatttctctgagtattttgatcctcagttctgaggtctgtctgtttgggggtggggcggttgtctttaaaccacaagccctacatgatgccaaagccaccaggcctctcttgtgtatcaggagtagaactaagttggcttagccctttggggaccaaccttgttgcgtagtgtgtggtaccagctttgcgctttgcctgggaaaactgtatctcagaaaggtaattaggaaggtctcaatatttaggtggtggtggtagggacaggttaaagtctagatacaatttctgttgaccacaagggcagggagcagtttcaggagtttgtctacttactctggacaccttgcttcatttgctgacagtgaacttgggcatctgtggttcctgtgagacatctcagatgtgtatcttgtctctgtgctcctgtttaactgtggatgtgagccctgaggcacccagccgttgacttgggactctgccagattacatgtgtgtaaggtcccttctacttctgggatgtagtttgagtttcttcattcacatgtcctcaagctgtgatcagtctgttatttcacccaagaaaacagaattcttctgtatgcatatgggtgttttacctccatgtatatatctgtgcaccacacatgtgcctgctgcctttggaggtcaaagaagggcatcagatcccctggaactggagttctagacagtagtgagctaccctttggatgctggagcttctgaaaatacacacaaagtgctgttaatggctgagccatttctccagcccccttctctctgaccttaaagagtagcttttgaatgtttagaattactagatcgtgtttggtgaaatctttatatcctatttatgagtgaagtaagagcaaatggccattctgagaccaggcagtggccattgttagtcccagctacgtcagctgtgtgctttgctgaagcactggggcagcttggtggcttcaggacaagcatgtgccatcagaaaggccagtgttctctgaggttcttctcttcttccgtggtaggaagcctccccatgtactcatgcctcgagctgtttctaagctagctgactgctgcactgctgtgagcagtatcttaaccctcctctttgccaggggagaatgcacctcagctgtgttactgtgtaccgtgtcactagcaacttgaaaaggtgacaatacgagtctgtctctagcctttttattatacaaagtccattcattcctagcttcttgtttttaaactccgactttactgcaattaattgacagtcccctctgatactgtttaagtgttgtgatctctcgtttgctttgtttgtttgtttgtttgtttaaggcagggtttctctatgtagccctggctgtcctcgaactcttcttgtagaccagaatagcctggaactgagagatccaccctcctctgactcctgagcactgggactgaaggtgtgagccactgcctccacctgccccactgcttgctttttcagataagtgactagaagataagtctgggcatcttgtcttcctagtgtattttactctgattctttcctggtttatgtattgagattcatttctcatagacagaacttgctttttattgtgtgtagatttggagggaaggatcaagttattcccgtaaatgtaagcaagctatcttgaggcatctgtagttgatacaaaatatttttataatatattaacaggcatggggtacttttgaggcagcctctgtaatctgtagccacccacttaatctccagggtcccccattggaagataaaaggccactgtatctgtagtttatctagaacagagcttcaggattccagctggaaagacttgagggcctaacccctgagagaggtccagcccctctgcctgatgcaggcctcctgctgccttcatgctttctggagggcctctggcagtcagaatgagtaggtcagtgtgtggcttgaaagctgtttctaacattgattttgtttgtttttcttttgttagggttttttttttccctgttttgtttgtttttaagagattttggttggttttggttttggtggggttttggttcgtttgttttttgacaggttaggaagtcagtgatgacccttactgtttcaagaagcagattaaattcttaaatacattttccttctcagacctcaacttgataaaccaaaaaacatacactaggatagcacagtgtgtgggattggaaggggcagtctcagagatgagctggagcactggagccctcggcgcaggacacgctgaactttcagtctcgtgtcctcgtcctttgctgtagatactagcaatgtgctcttccgtcctttaaacacgcccacagctggactccttggtaaagggtggtgaagatttgcagcctgccaactgggacttttataccctagagtcgggagtggactgaagtcagactttaggagttaagtagatgctcctccggaatggagagttgtgttgtaaatcatttgccagctggaactttgtgtaccatatctcggtgaatcttagggattataggccttgctaaagttcaggagaaaggaaactggccacagcttactgtaaggttttgctcaattgactgaaattatttgaaagtctgtctagaacacgatttcatcaagtaacaccttcgtccaagctcggcccacgtttgaggaaggggaagcgagggggcgagagggaaggcgggatgggtggctgaggatcaggtagcgctggagcttggcaccaaagtttctcatgattgcatatggaggaccacttgtgatccaccctcggaagactcgccagaaagtagcagttcctgctacacactacagtgccttccaacgacgttctgtgtgaactgcatgcagtttcgtgtaactccagagtgtaacatgtatgtgcatgatctgtccagaatgtgcagagctgggattcaacagaaagggctgcgccctgctgctgctgggtcagcaggctgctggggtcggacttgtgacttaggcttgcagccttggatcctggggtttgcactgatatggttctgtcatccaatcagatctgtctcccttttagctcctttcctactttgcagctttgctgattttaactgcttcattcttctgcttcttggtatctttcttttgaaataaaaagacacaatacctaattcaaaagagatttgtattcatttttccagttcctcttcatttacctcatgtatggcaacgatgaagcctggtgccctgttcgcatgattgtgagtggctcgcactgcactgcacttggcttgcccactcgcccactcttctgtattcccgtccaaggaggagcaggcaacctccttccatttcccaggatgctcctctgccccctttatctaacagtgttgatggaaactcagtgatacattcaattagtgcaatgatggggcctcagtggaaagaaggccccagccccttttactgagagactctagtcctctgcttaattgcaagcctgatttctaagtagcaaaatgtgctggtcagttttctgttgctgagaccaaaatcatttttttttaaagatttatttaagggctggtgagatggctcaatgggtaagaagctctgactgctcttccgaagggcctgagttcaaatcccagcaaccacatgatggctatcacgtaatgagatctaacgccctcttctggtgtgtctgaagacagctacagtgtacttatttatagtaataaatctttgggcctgagggagtatgtgagtacaccatagctgtcttcagacacactggaagcatcagatcccattacagatggctgtgaaccaccacgtggttgctggaaattgaactcgggacctctggaagagcagtcagtgctcttaacctctgagccatcatctctccagccctgagaccaaattcttaagtcaacttaaaaggaagaaaggtttatctggttgcggtttcagaccacggtcatgagaccctcttgctttggtcttgtggtgcagcagtacaccatggcagagggaggcctggtcgtgtcatggtggctgggcagcagtacaagcaaaaggaggacaattgctaacacgtttgaagacacagactacaacctatctttcactgaatcctgactcccaaaacttcggcctgatacttccataggcctgtaaccaagccctggagcataccacatccaactggcactggagggcacctcctgcacagcgagggggaccaaggtaatgagcggaaggaaggcagtctggtgagcgtgggcaagtgtaccaagccatggagctgctgcttgtattgtgaagggttagggtcgtcagaaatcaccctaacatggtttctgtggttgcaatgtgctgaggggtagctgcctgctgccgacagcccacgctgtccatcagtaccacagtttttgacacagcttcactcactatccttctcaatcttgttgcaaattttgtgtatagctcagactctgatcctcctctgtcagtctcccaagtgctctaggcgtaggccttaaccatcttgaagatgtcttcttcagagctaggttttaaaatcatccccagggtctagagaagtggccccaagattaagagcacttgctgctctgtaaacctggagtcggttcccagcatttatgtggtggcttacatacaggcatctggaactccagttccagaggatctgacctccacagtcatcaggcacacacatggtacacgtacttacatgcaaaacaagaaacaaaaaaaaaaaaaaaaaaagagggctagagagatggctcagcggttaaaagcacttgactgctctttgaaggtcctgagttcaaatcccagcaaccatatggtggctcacaaccatccgaaatgagatcctatgccctcttctggtgcatctgaaaacagctacagtgtacttagatataatggggcttttttgttttgtttaaaagaaacaagaacatcagatgcaacgttgttgctgtggtaatcggatagttgtcgctgtgattcatacaatacacagttgaatttgtgaaaccaggaagcttagtcgttatgtatcctgagactttttttttttttttttgtagctctgcctctgagcctagaacctttggaacctacctttgaagataggtgataggtttcaatctgctgagacaagtgtgtccgcacaaacaggccacctaaatgctgtaaggagatttgatagtttttagccagaaccctgataagtggttgaggccttaccatcatgtttggccctcttatcagttggactaaaacaggaaacttgctgcacacagctcactaaatgcatgtgtgactagcaccagggtcaagaagcatccatatgggactccatgtgagccccttcatgttctttctgtagttcacagccagcataacctctcctgccttcttctcgccacacttggctgtctcctgtgcttgatataaatggaactgtgcctttttgtgcttggcatctttctctcagtcttgtgcgtgagcctcatccacagcgcattgtggtgggtagtccgtgctcagtgtgatagagtagttcccagcttggggctattacgagcagtgccactatgagtctcccagcatgtgtgctgaacagatggacgcctttcttctgcgtttgtatctaggaatagccatggtgggccaccacagatgccatgccacttcagcaggcacctcctctatgtacacactatggcggtagccacctgggaggatatcagaggggactgtgagcctcctgttgtgagcctggcatcaatccagcaaacatccagagatccaaacccgagcacaccacaaaccgtgttctttgtttccctggaatgtaaatgagaagcacctttcattcatgactacacctaccaaatggatacttacaagacaggactccctgcccctctcgagatgtttatatttgattcgtttttaaatggattgcatt

SEQ ID NO: 660 - DNA, 3425 bp, Mus musculus
tgtctcctctcctgtgccccaaatgcctccgtcaccaacagcacccaatgggtcgctagactctgtaacatacccagtgtctccaccgcctacctcagggccagcagcgccacctccgccgccaccgccaccgccgccgccaccaccaccgccgctgccaccgccgccgctgcctcccctcgcctcactctcacactgtggatcacaggcttctcctcctccaggcacccctcttgcctcaactccctcatccaagcccagtgttctcccttctccctctgcagctgcccctgcctctgcggagacccctctaaatcctgagctgggagactcctctgcttccgagccaggcttgcaggcagcctctcagccggccgagtcgccaaccccacagggccttgtcttgggaccacctgcacctccgccaccaccccctctcccatcaggccctgcctacgcctcagcacttcctcctcccccaggaccccctccaccacctccactgccatccactggtcctcctcctccaccccctccaccaccccctcttcctaatcaagctcctccccctcctcccccacctcctgcccctcccctccccgcatctggaattttctctggatccacgtcagaagacaatcgccctttaactggacttgcagctgcaattgcgggagcaaaacttaggaaagtgtcccgggtggaggatggctctttcccaggtggagggaatactgggagtgtgagcttggcctcatccaaagcagacgctgggcgtgggaatggacctcttcctctagggggtagtggcttaatggaagaaatgagtgccctgctggccaggaggagaagaattgctgagaagggatcaacaatagaaacagaacaaaaggaagacagaaatgaagatgcagagcctataactgctaaggccccatcaacaagtacacctgaaccaaccagaaaaccttgggaaagaacaaacacaatgaacggcagtaagtcacctgtcatctccagacccaaatccacaccttcatcacagccaagtgccaatggagtccagacagaaggccttgactatgacaggctgaagcaggacattttagatgagatgagaaaagagctggcaaagctgaaggaggagcttattgacgcaatcaggcaggagctgagcaagtcgaacactgcataaagaagcaaactacggaggggcaggacttgaatctggagaaaacaaaaattcctacaaacaactcttaacccccaaacttttaagctgtaagaagaaaatggatacacagtcaggagggaagccgtcaacctctgaaagcctcagacagtgactctggcgatcagctgtcccctcagtgtgctgctttattctgtctgacctttaccacaggatggagaatgatattggagttcccttagcagtactaaacccgtcaggcaagatcaccgtgcattgaaatattttcatgtctagatgagtctgcacgttttccataatccattgctaaaataaagacgagaaaggcttcagagatttttttccagagggcgctgatgaagaatttgatttagtaagttctgctgttgcgttgtaaatgtttctctcaggtttgtcttcctatcatatttgatattccgtgaacactaagatcataaaggatggaacaaacggagttgtatgtgctttcagagggtggtgtttaatacgaaaggtcccaaaatgtttagtcccacttgaggaattttagaatgataggaagtctctcgggttagccttcatgcaattttgtagtttaaaacataaagtccgtccagaaattaaagatttagatgccttcctaaattgttacaatgctttaccaaatctatgacttctacataaccaacagtggtcaaatggaaaacattctattatagatttactgtaggttttcaaccttttttagacatatgcatgtggacatttttataatgtaattacaatcaccacaaagttagcttttttaattacagacaataatgcatgtcacactaatatgtagtggccttttcagggcctagtcccagggaaaatattttgtagaatatagggaagtgggaggaagggaaggaataactttttatttaaagttaatttctgcactatcttttttttctcaattatctgcatgaattataatgaaaaatattttgtgactttaatcagtaaacatgttaacaaaaccaagtacttaatcttttacatcatgtcttcagctatttgtattttaaccagcaatttcaacggtctgaaacatgattctgagcgtaacatgtgagtccgtctcactgtggaactcacgagtttgatcactgaatttggcagttattttcacgcggcccccacagtgctgcagtgcttgggttcacgctcctgactctgcggctgctccttgacctttgctgtgctaaaatacaagaaatatcaataatggcagcaaccagggtcacataagtcactaggtaagggagaccaatgaggagttctgcagctttcttttaatagaactaaagtgaggcttaagtggtagggagtgtctgctgttacaccctgagtgtgtgtgtgtgtgtgagagagagaaagtgatcgagcttaagagtgtgtgatagatattatgttccacccctttataattggcaagattaaaataagggagaaaattttatatgttgtaatgttagctttttggaaaatctaggaaatcaaaaattctccaggctgtccatcatgatttatgcttgagttattaatgtgccatatttgctttggaatctttggctatcaaaacttttgctaaaaaaatagtagatacaatccactttgatttgctttctagatttcctatgtctcagctgtaaagcaaagcttgatgagagtagttttctaaaccctgcagtttgcagctaaccccactgcagagccgtgtgaatgaggggttttgttaagagtgtttgtttctgtagaaacttcatctttagattaaagtgtgagggatgagcggtcataagtcaattctgtggctttctctacccatcagtcgtcgtctcgcaggaatagtaaaggcattaaggatgcggcaagcatgtacgctgttctaaaagaagtatgcatctcatttactgttgaacgtttgattacgcaactactttgattgtgtacgtgtgtacatcccttacagatctgatcaaaaatcgcttttcattttgttgctaatgttaaatagtctgtagtacgtagagtactgggtctagatggtccaaagtgagacaaaaatgctgaagtcaaatgctaagtcctaaacaaagctggtttatgcactaaacgttttgtgccttggtctaatatttaacacaatgtctgtaaaaatgac

SEQ ID NO: 661 - protein, 395 aa, Mus musculus
VSSPVPQMPPSPTAPNGSLDSVTYPVSPPPTSGPAAPPPPPPPPPPPPPPPLPPPPLPPLASLSHCGSQDPPGTPLASTPSSKPSVLPSPSAAAPASAETPLNPELGDSSASEPGLQAASQPAESPTPQGLVLGPPAPPPPPPLPSGPAYASALPPPPGPPPPPPLPSTGPPPPPPPPPPLPNQAPPPPPPPPAPPLPASGIFSGSTSEDNRPLTGLAAAIAGAKLRKVSRVEDGSFPGGGNTGSVSLASSKADAGRGNGPLPLGGSGLMEEMSALLARRRRIAEKGSTIETEQKEDRNEDAEPITAKAPSTSTPEPTRKPWERTNTMNGSKSPVISRPKSTPSSQPSANGVQTEGLDYDRLKQDILDEMRKELAKLKEELIDAIRQELSKSNTA

SEQ ID NO: 662 - DNA, 2754 bp, Mus musculus
agtgaacagagtatctgtcaggcaagagctgctgtgatggtctatgatgatgccaataagaagtgggtgccagctggtggctcaactgggttcagcagagtacatatatatcaccatacaggcaacaacacattcagagttgtgggcagaaagattcaagaccatcaggttgtgataaactgtgccattcctaaagggctgaagtacaatcaagctacacagactttccaccaatggagggatgctagacaggtgtatggtctcaactttggcagcaaagaggatgccaatgtcttcgcaagtgccatgatgcatgccttagaagtgttaaattcacaggaagcagcccagagcaaggttactgctacgcaggacagcactaatttgcgatgtattttctgtgggccaacattgcctagacaaaattcacagctacctgctcaagttcaaaatggcccatcccaagaagagctggaaatccagagaaggcaactgcaagaacagcagcgacagaaggaactggagagggaaagaatggagagggaaaggttggagagagaacgactagaacgagagaggctagagagggagcgcctggaacaagagcagctggagcggcagcggcaggaaagggagcacgtggagcggctggagagggagaggctggagcgcctggagcgagagaggcaggagcgggagcgagagcgcctggagcagctggagcgggagcaagtggagtgggagcgagagcgcagaatgtccaatgctgctccatcttcagacagctccctgtctagtgctccacttcctgagtattccagttgccagccgccttcggcacctcctccatcatatgctaaagtcatctcagctccggtgtcagacgccactcctgattacgctgtagtgactgctttgccacctacttccacaccccctacaccaccactgagacacgcagcgacacgttttgcaacatctctaggttcagccttccaccctgttcttccccattacgctacagttcctcgtcctctcaacaaaaactctcgaccttcttctcctgtgaacacaccctcttctcagcctccagctgcgaagtcctgtgcctggcctacttccaatttctcgcccctccctccatctcctccaataatgattagcagcccccctggcaaagctactggcccacggcctgtccttcccgtttgtgtctcctctcctgtgccccaaatgcctccgtcaccaacagcacccaatgggtcgctagactctgtaacatacccagtgtctccaccgcctacctcagggccagcagcgccacctccgccgccaccgccaccgccgccgccaccaccaccgccgctgccaccgccgccgctgcctcccctcgcctcactctcacactgtggatcacaggcttctcctcctccaggcacccctcttgcctcaactccctcatccaagcccagtgttctcccttctccctctgcagctgcccctgcctctgcggagacccctctaaatcctgagctgggagactcctctgcttccgagccaggcttgcaggcagcctctcagccggccgagtcgccaaccccacagggccttgtcttgggaccacctgcacctccgccaccaccccctctcccatcaggccctgcctacgcctcagcacttcctcctcccccaggaccccctccaccacctccactgccatccactggtcctcctcctccaccccctccaccaccccctcttcctaatcaagctcctccccctcctcccccacctcctgcccctcccctccccgcatctggaattttctctggatccacgtcagaagacaatcgccctttaactggacttgcagctgcaattgcgggagcaaaacttaggaaagtgtcccgggtggaggatggctctttcccaggtggagggaatactgggagtgtgagcttggcctcatccaaagcagacgctgggcgtgggaatggacctcttcctctagggggtagtggcttaatggaagaaatgagtgccctgctggccaggaggagaagaattgctgagaagggatcaacaatagaaacagaacaaaaggaagacagaaatgaagatgcagagcctataactgctaaggccccatcaacaagtacacctgaaccaaccagaaaaccttgggaaagaacaaacacaatgaacggcagtaagtcacctgtcatctccagacccaaatccacaccttcatcacagccaagtgccaatggagtccagacagaaggccttgactatgacaggctgaagcaggacattttagatgagatgagaaaagagctggcaaagctgaaggaggagcttattgacgcaatcaggcaggagctgagcaagtcgaacactgcataaagaagcaaactacggaggggcaggacttgaatctggagaaaacaaaaattcctacaaacaactcttaacccccaaacttttaagctgtaagaagaaaatggatacacagtcaggagggaagccgtcaacctctgaaagcctcagacagtgactctggcgatcagctgtcccctcagtgtgctgctttattctgtctgacctttaccacaggatggagaatgatattggagttcccttagcagtactaaacccgtcaggcaagatcaccgtgcattgaaatattttcatgtctagatgagtctgcacgttttccataatccattgctaaaataaagacgagaaaggctt

SEQ ID NO: 663 - protein, 797 aa, Mus musculus
SEQSICQARAAVMVYDDANKKWVPAGGSTGFSRVHIYHHTGNNTFRVVGRKIQDHQVVINCAIPKGLKYNQATQTFHQWRDARQVYQFGSKEDANVFASAMMHALEVLNSQEAAQSKVTATQDSTNLRCIFCGPTLPRQNSQLPAQVQNGPSQEELEIQRRQLQEQQRQKELERERMERERLERERLERERLERERLEQEQLERQRQEREHVERLERERLERLERERQERERERLEQLEREQVEWERERRMSNAAPSSDSSLSSAPLPEYSSCQPPSAPPPSYAKVISAPVSDATPDYAVVTALPPTSTPPTPPLRHAATRFATSLGSAFHPVLPHYATVPRPLNKNSRPSSPVNTPSSQPPAAKSCAWPTSNFSPLPPSPPIMISSPPGKATGPRPVLPVCVSSPVPQMPPSPTAPNGSLDSVTYPVSPPPTSGPAAPPPPPPPPPPPPPPPLPPPPLPPLASLSHCGSQDPPGTPLASTPSSKPSVLPSPSAAAPASAETPLNPELGDSSASEPGLQAASQPAESPTPQGLVLGPPAPPPPPPLPSGPAYASALPPPPGPPPPPPLPSTGPPPPPPPPPPLPNQAPPPPPPPPAPPLPASGIFSGSTSEDNRPLTGLAAAIAGAKLRKVSRVEDGSFPGGGNTGSVSLASSKADAGRGNGPLPLGGSGLMEEMSALLARRRRIAEKGSTIETEQKEDRNEDAEPITAKAPSTSTPEPTRKPWERTNTMNGSKSPVISRPKSTPSSQPSANGVQTEGLDYDRLKQDILDEMRKELAKLKEELIDAIRQELSKSNTA

SEQ ID NO: 664 - DNA, 179487 bp, Homo sapiens
  misc_feature (1)...(179487): n = A,T,C or G
ctcagcctcctgagtagctgggataacaggtacctgctaccatgaagggccttatattctattggttgatgccaaatgaatagaacttaaccaagagagcaaattgcctcattaactttatttatttatttattgagacacgatctggccctgtagcccaggttggtgtgcagtggcatgatctcagctcactgaaacctctgcctcctgggctcaagccatcctcccacctcagcctcctaagtagctggatctacaaggcatgcaccaccaagcccggctaatttttgtatttttggtagaggcaaggtttttcaatgttgcccaggctggtcttgaactcctggactcaagcaattgcccgccttagcctcccaaagtgctgggattacaggtgtgagccacctctacctagactgctttaattcttccttccctattctatctcctcatctagttttggaacagagttactctggaaagcaactcttgaatcaaacctgacataaactattaacttagctagttacatcaactttcaaaattaaacagactgtccagtgcttgggataccagaagaccatgaagaatcacaggccagctttcttaggaattgcttcttaacttaatttgggcatcattcagtaggaaaagaatgccacgccagacttgatattaaacagaggccggaagatataaataactcaaataaagcaaatcaagaatcaccatctcactagtaggaggagagaaaataaagtgaaaaataagaaggaaaagaccagactgtgaacttttgaagggaaatattatttgcaagtgagagacactgaataaaatcaagtacaatgagttcctcagtgaacattacaaaaaaacacacaaaacaggagctatttaaagactaattatgagatgttgacagatataaaatgccacctgagttagacaagaaaacctgaatgggaagctaggatagtggttttctattcagggcctttccctgaaatataagcaccctcattggtgataaattttaaatgagcaagtcctaaaaaaaagtttttcacaagaatataaatgaagaaatagatgagttattgtcaaagattttggtacatctcatcctagagtaagacttttatggcaaattgctttgcagacaaccaaagctaaatatagcatcaggttacttttggggtacagtatcccttagctactctctgaatctaattagaacgttaataaaaagaatgctagacattctcagaacacctttaaaaacacactggcgccgggtgcggtggctcatgcctgtaatcccagcattttgggaggccgaggtgagtggatcacgaggtcaggagattgagatcatcctggctaacacggtgaaaacccgtctttactaaaaatacaaaaaattagccaggcgtggtggcgggcgcctgtagtcccagctgctcgggaggctgaggcaggagaatggcgtgaatgcgggaggcagagcttgcagtgagccgagatcgcgccactgcactccagcctgggcaacagagtgacactccgtctcaaaaaaaacccccaaaaaacaaaaacaaaaacattggcttacaagtatatgcatatatccaaactcagcaaattgtatacattaaatataggcagtttttttaaaaaaaatacaaaaacacaagagacaacacacacacacacacacacgcacaggcttggctttattttgtttatcaccctgtgttcaacaaaaactgttagcatttctatgagttttttgtttactgagttggtttaagtaactctatccctataagctttataaaacctccactagttgtatgcctgaaatatctaagttgaaggagtggtgagtgaatgaatggctactggctacttctctagtagcattactgttctggaaatgaagtcctaacattaatttggagttgtaatttggaggctcatttaactcatttattgagcccctacagtgcacaaagccacaagcctaagcactaggaatcaaatctgtgcctaagggaaggccttatttattgcttgggagatagaagtgtcatgatttaccagataggatatctctgtagtttctagtggcagaatgaggaagttaaggaattgagagtattttgtttgttttatttttaccttccatttcctaagtgggccttgaggcttttttttcttttctttttttaatcagaggaagtaaagtgaaatagaagagatcctgtggtgcagaggttaagagtgtgggctatgaaactggcctttctggccttctcatttactagctgtgtgacttcgggcaagtctcttaacctttctgtgcctcactttcatgagttgtatagcaggcatgactataatgatacccacttcataggaatattgtgaagattaatggagttaatataagtaagtgcctagcaggtgagtaaatatgactattggtcaaccaatcacttagctacattcatctcttacattcctgccactcaaataacattatttttcttaaatataaagcttgtttgtgtcagactccatctaaggtaggtattcccacagagaggggcctgaaataagaggctaaatttaaatttttccctcaatggctttaattattgatttgcagttcaattcatttgctaccaaatagagtattcaatcactggctactttgatcaaagaacccaacagcttcatatacaaaatgagtacaatatcaacattttacttcattaaaagtcggtactcatgataagtgagttaagggtattagaatgtttggaggccaaatgaaagtattataactaatgacacataatgacattatttatctgattatttcctgcctttcaattttagaaagacttgactagaggctgaatttggacattaaacccaagaaaatgaacatttgaaggtaatttctcaaagtagaatttggccaggtcaccaggcttagcaaccgtttcaaagagaaagataactgagatttttaatgagctttgaaacttacctaaaggtgggataaaagtgtggtgttaagcagtgtgaatttttcttttttttttttttttttttttttttttgaggcagagtctcactctgttgcccaggctggagtgcaatggcacgatctcggctcactgcaacctccccctcccaggtttaagcgattctcctgcctcagcttcccgagtagctgggactacaggcgtacgccaccatgctcagctaatttttgtattcttaatagagatggggtttcaccacattggccaggatggtctcaatctcctgacctcgtgatctgcccacctcagcctctcaaagtgctgggattacaggtgtgagccaccgcacccggcctgtgaattaattttagacagcttgtttaggatacatcctagtggtaatatctttcttctgtactgtaattagccagaaaataatcttttatttaataacattttttctgatctcctttgaggaaatactctaaggtcagttgtcacctgatcgtattgtctgtgaaaattgagtggtattctagttttattacaataaatcacttcaatgcgagaaagagggtaccaattttttttttacctagctaccagctagattttataaaataggggctaagagttcagaattagattatgatgatcgtttctctttctttctttcttctttctttcctttctttctttctttctttctttctttctttctttctttctttctctttctctctctctctctccctccctctctctctctctctccttctttctttcttgacgaaacttttgctcttgttgcccaggctggagtgcaatggcacggcctcagctcaccgtaacctctgcctcccaggttcaagcgattctcctgcctcagcctcccaagtagctgggattacaggcatgcgccaccactcccagctaatatttttgtatttttagtagagacagggtttctccatgttgatcaggcaggtctcgaactcccgaccttaggtggtctgactgccttggcctcctaaagtgctgggattacaagtgtgagccaccgcgcccggatggtgatggttcttttctattttctttttattttttgggacagggttttgctctgtcacccaggctggagtgcagtggtgtgattatggctcactgcagcctcaacctcctggctcaagccatcctccaccctcagcttcctatgtagttgggtctacaggtgcatgccaccatgcctagctagaattttattttttagagagatagagtctcactatattgcccagcctggtctcgaactcctgggctcaagtgatcctcctgcctcagccttccaaagggccaagattacaagcatgagccactgcaccaggctcgacacttattttcaatccaatttctaaagcactataatttgattgttatctagatatggggaccacctgccatattctttaaatggtggccatagctgaattttgtgggaaaaaatgcattgcattttatagaatatggcctctatagactaatgttactccaaaaccattcaggctatgggaatcttctgccaaatctaaacactgtagagctaagaaaagaaagagactctggggaagacgaaatgaaattaactgaataaatcctaatttggaagggagaaaaatgacaaatggaagaaaaatgcaaaaggcagagaggcaaatagtttcctctaatgtctgtgtctcctgataatattttagagctgacattatatatgggcagctaaagctgaaagatgagaaataaaaatatcttgaatcctactggaatatcatgttctacgttatttttttttccattcttggggacacaaacaaaaattacactgtgaactaactgccacaaaagaaaacaaaatactgttaggtataagcagaaagtgtacaatcaagttcactccaaactaccttctcttcctcacccatctgtaaagtaacttaatttttcgagggagagccttttttttgggtgatgggggagaccgtgcctacaatccttagcattgatttcctaactgctgagtagcattagtcacgcatcctcctcatgcccataaatggaggacaagcctacactgatgctatcagatgaatttaaacaaggcatgttccaagtgaaccctcagagccagactgacaacactcctgcagcaaactcatcttcaacaggagcaaattttatttccttttctgagtacacactgctaacaaatgtataggccaatgtgatggctctgtactgtacacctagggcttggagcaggcctcctactgtgatattaagcaggggtggctgggcgcggtggcccatgcctgtaattccagcactttgggaggccgtagcgggtagatcacctgaggtgaggggttagagacctgcctggccaacatgttaaaacctgtctctactaaaaatatgaaaattagctgggtgtggtggcgggcgcctgtaatcccagctactggggaggctaaggcaggagaacccctcgaacctgggaggaggctgcagtgagcagggctctcaccactgcactccagcctgggcaacagagcaagagtcggtcgaaaaaaaaaaaaagcatgggtaaaagtttatctaagagaaagttgaggtctatatacttgatgttaacaacagagtatatttcttttgatgaatagtttttaattagagaagtcattcactcatttattcattcaccttttaaatacctaggtgcctacatgatgggccagccattgggccttgggccagcaacccttatgagagaagagttcaaatgatttccactattcagccaagccaacacaatctcagctaatttttagtttttaattttaattgtttagagacaggttctgtctctcaggctggagtgcagtggctggatcatagctcactgcagcctcgaatccctgggctcaaacaatcttcttgcctcagcctcctgagcagctgagaccacaggggcgtgctacaatacctggctcatattttttttctttgagacggagtctcgctctgtctcccaggctggagtacagtggcacaatctcagctcactgcaacctctgcctcccaggctggagtacagtggcacaatctcggctcactgcaacctctgcctcccgggttcaagtgaatctcctgcctcagcctctggagtagctgggattacaggcacctgccaccacacctggctaattttttgtatttttaatatagatggggtttcaccatgttggccaggctggtctcaaactcctgacctagtgatccgcctgcctcagcctcccaaagtgctgggattacaggtatgagccaccgtacctggctacctggctaattttttaaaaattttgtagaaatggggtcttgccatgttgcccaggctggtcttgaactcctgggctcaagtgatctgctgcctcagcctcccaaagtgctgggtttacaaacctgagccatcatgccaggcccagacctaatttttaagcagagtttatgagaagagaatcagctttaatttttattgccttagtgcactctcatcccataagaaggtagtttgatatagtcgaaggaacaatggaccaagatttggaaatcctgagtttaagttgtgggcaagttacttaacctctctgggtctcacatttcttttctgaaaaatgagtgggctggaccgaagattccttccatctctaaaattcttttattctatatggtaacacattccacagcatttcctttgtgaccagaattagtctgtgacttcctacctcaagtatcgctttgcactctttgaatgttaaaccaaatatgaacaagaagcaataacattttgtcacagccaacaaattgcccttccacagaatgacctttgggggtcaggccacccattgcaatatctaaatccaaaaggcaatgaatgctatgaccaacttgtgagctggcaggctgccatccaaaaggatggaaatggttgtaggcagccaaaattcttggctggtacatttttaataaacatagaaaataagaacagcattttccacttggattgcttaatttggtgcccataccattggaacatttgctgttagaataaagatgatgtgatatatcacttatttagcgcaggatggattaactttcacaaatgagaagtaggttatggagtcatctgtaaggaatttttatccttgtttcttgtgtctggcaggagatagcttgagtcattacagcactctctccaccccttttggccctttgtaagagttttccctgaaacataagctctgtcggatttactgtattgctatgaatggactaaggcaaattggtgtgacttctctgtggtcgaatatgttttattaatacttttccaagatggttcaatatgtcttaatttttccaagaaaaaactctccacagcacatgttcaaatacttgaggtatgtgtttcaaactacagggagaaacttacgtaagacaatgaccctcatagttggtagctatgatttttaatcatgcctgttgcactaattgatccagttacttgagctctatgtttccctgtctctacttgcaatatggcaactagaacatttgactggcaagtttgttttctctccagtggttggagatccttgaataaaatgccctctgtaatggtaagctgtaattagatatgtgggtggaaattagcgttcttcaagtacaccatgtttaaggcagaggcatcatgctttctactacctgaggccaccttgatcctctgccatagctccgggtcactgcttctatagggctgttggtctaaggctgccggttccaaaaagaaaataactcggtattgagctctgaaaccaggaattttatttatttatttatttatttatttatttatttattttttagatggagtctcgctctgtcacctaggctggagtgcagtggtgtgatctgagctcactacaacctcctcttcccgggttcaagcgattctcttgactcagctgggattacaggcgtgcaccaccacgcccggctgtttttttattttttatttttagtagagacagggtttcgccatgttggccaggctggtctggaactcctgacctcagatgattcgcctgcctcagcctcccgaagtgctgagatgacaggcgtgagccaccgcacccggctgaaaccaggaagctttttttatggttaaaaatgggctacacagttcaattatagacaaatcaggcattgaccacggatcactataacctgtcttttcatttggaagtgtacattatcccaaccttcctaactatcttttgaatggtacctgcatcttaaaacaaaacaccaaaacttttgaatggattcctggagtcatggtaggtcctccattttggatgagatccttcagcaataggatccctgtagcaacaacccttttctatcctcctcaccttttatacagaaagtacatccctgtcttccggactaaaagggggccgtaattcgtacagttaaaaattttattattggatttgtttttagatttaaaaaaaaccgaaaacaaaaccttcaacaacgatcaattctggcttcctggatgccctcctccccgacttgacttgaaatgaaattgcctcgccagtattttatatctactttttaagggaggtgacttcaagaccattgggaatgacgaaaaatttaaaattatcattagttcctctctctccccgccccctgcccgggattccctctttgctaatgacgctggaaagcggctccactggctgcgtttctcttcttccactcttgcggcaacacactgttccgcgcgcgtctcccggcgactgcgtttccccgagagtcggctgcgttcgtttggggatgaagtcatccctatacctagtgtgcacatcaactcgttccatcggcgcagcacgctgggattcctcgggaagaaaaggagcgaagggaacaatgatgaccatattttccatttatatgcccctcctcaactccgcaggaatcgctgggcgcagccgcggcgagggcgggcagttgggctgaccgggatgccccccgattccctcatccccgtcctgagaccgcaacagggcgggctgagcactcgccccgcgcgagggcacccggccgcgagccgacccggagtctcctggcccggccctgtgcccagtcacgcgtccaagctccccacgccggtgcctacgggtctggcgcccaggaggtctcggcgcctcggtctccgcaccgtggccgtgggggaggcctcggagctccccaagcctctggggagcgggaggcgacggggagggggccgacggtcaaggacaaccacgggcgaggaaccccggccgacaactggccggaggtgttgggcgggaggggggggtggtggcccgcccgaatcccagaggggtgcagggggcggggtagggaggcaacaaagagcctctctccgccgccgccgccgtcgcgctcgctctctcccagcctcgctctccgcagtccggcgggggcccggccgccggcgcgggggagtgcgcccggccccccgcctcccctttcctcccctccccccgcaccgccccctcgcccccgggggaaggaggggaggagggcggcgcctgcgtgttcctccgccgcgcgccccgcctcctcccgggttcctcgcggcgatcccgactctcctcccgcggctgcagcagctgccggttgcacacggcctcggcggcggcgcggcgagcgcgggcctgtggagcggcggccgggcgcgcggccccggcgggcacccctcagagggcggccgaggaagctccgggaggaggagcaggaccacgaggaggtgggaggcggcggccgcctggggaccagctccgcgcctcggcctctccgccccctccccagcctttctctcgccctcttctcccacactcccggccggcgcctcggctttgtgcgaggagatggtgtagccccctggccgccgaaggaggagccggacacttgtctcccgtctccgagctgctccccacccctggaggagagacccccccctcggctcggcgccttctgcgtctcccggctggtggggaagcctctgcgccgccggcaccatgaggtgaggggcgcgcggggcgggggccgggcgggccattgtgccgcgggagccgcgacccccgttctcctcggaccccgccttccctctcccggcccggcgcgtctcccctggtctccggtctgttcctcccccctccgccttttgtcccttccaatttctctttctttcttggaaacctccccaacccgtgtggtttgggggtctcgcttcatcgttctctcatttttcctcaaatgctcttctttcacccaggatttcccttcctaaatttaatttgcgcctggctccctcccccaagcctttgcaagcgaaacccgggagatggggaggggttcgagaatcgaagcgtgcgtgttgctgggaaacaggtattttttcgtatatatgtaaaaatttcatgcacttttgcctccgaactctcgtgtttaattaaaaaaggaagaaaagtttgaaaggtctgaaatctctgcgggtaataaagtgcctctggtaggggtaggtgaaggagctgtgaaaggtgaaatttcacgatggtgggggaagggaaagaattgattaggttcacgtggtgggggcagtaaaagactgggataagtaagttggtaggggtgtgtaagcgggggcggggaagggatctgtttggaaaagccttttctcccctttctctgtagcagcctgtgttgcattgcagcagctgctttttccctttgctctgtactcaataaaacaggagctaaattatttttgcggccccgaagaattgaatgtactgtcgtaaaatatttttttaattgatacgatgaaacatatggtatgatatttttctttattgtttctcaaattgtgtaggagaataaaccgtgatgtggtgtgtcattcattggagattttttttccagcctttcctaaacctgttctgtgtccataaccttctcttttcggattggtgcaagacttcgtgtgaaatgggacttggtagactgaaggctgatccattctgcgttatcatccttaaaggccttccttttgggttaaacaattgtggataaagtaaattactccatttctctctcctggaagagatagtcttacagttcatttggatttgaatctcctttgtgttaaagattaatggccaaccgttgctaagacctttataatgtaatacaatgagatttgaatgatataatctacaaattccttcgctttggcaagaaaatgtcatgtcattggaattctttctcaatttcggtagtttccattttaaactttgcttttcattttttttttctatcaaggttaaacgtgtttccattttgcttttatatatatattgtgatatatctttgttgaatttttacttaggcttactgtgaatttgaatttttttttctgattccaagttacctgtatttatgatggccttaaagagtgagtttaatgtggtgtctctaggcgactgaccccttttcccttgatgatttcacacaagttattttcaaatataagcgatgagtttaaatagtaattatagcatacgaaccaaaaaacacaatctttgtaaaatatggcttgaaaactttgagtcgtatgtttgagcatgacttctttttttttaaatcaagttactgatgtccttaaactcaggaactataatatacatactgttatatcttgtaatattatatgttgttggtttctgttttagagatctaatgccgtagggatcttgcagaccagaagttatcagttgtttcaaactttgggtaaacttatcttaacattgagaaatataaaacagggaaagttttttttttttttttttttttttttttttaaatgcagtcttgctctcttgcccaggctggagtgcagtggcgcggtctcggctcactgcaacctccgcctcctgggttcaagcgattctcctgcctcagcctcccaagtagctgggattacaggcgggtatcaccacgcccggctaattttttgtatttttagtagagacggggtttcaccatgttagccaggatggtctccaactccggacctcgtgatccaccagcttcggcctcccaaagtgctgggattacaggcgtgagccacggtgcctggccgaaagtgggttatttttaaataaaaacaggaatagttgtctaattcaaagattgtgaactaaaaaaaagttaccgttttgggtattcagtgaagtttaatcactgtcatgtatagatgtcagtctgtcacaggtaaattatgtcttcacttgaaaattccttttctaataaaaagtaacttctgtttttcaagctcttttcttgctctgttccttatgaagtgtagagagagaggaaccacgctgatgttttccagtaacgtaaatatagaacttggtacacaggtctgaaaagtttatttaagcagtctacagtaattcttcgtaggctaattttgaataagagcaggaaagagggtcagcttttcactttggaaggtactggattatttggcaggtggttaggtagtacttagatttgcttagatacctgtaaaagtgagattggtatgggataaaacgttcttgtgctgcttgcaaaagtctttggaatattctttgggatattttggtgcttaggaagtgcttttcaggttatattaatatatgcttagtcttcatgctttcaagtcctgtgggacgttaatgttagtcttttaagttgagtcctttttggttatattaagaggtagttctgatgtttcaaaggccatccagaaataggaatgcctgaacaggaatttccaattaagtcggtcagaatcctgaacagaggatatgatgaatatattacggtataactattagtggtatctgtcagatgactttaattttaggaatagcatgatcactgtgtataatcttatacagaagagaactgaataatagtttatgttcctgaaacggtcataggcatttgagtaaaatgcagtatatagatttacttgttaatattttgcttaaagatgaatatttaaaaaatgaaaaagcatattacttatacaggacagtggaaaggttgagaccaaaaagctggtacttttagtgtcctgtctgtttagttctattcttatttttcatttatgcaatgtttcaaaagtgtaagatgctttgtgattaaagtgtgcgtgtatgtatgtgaatgcgtttgtatgcatgtacatacagtgtgtgccttttaagtgcatttttaaaattagttggtttgttacttaagatttttttttttttttaactgaaagaggagcttgtctgatctaaaatagttgcatgtagcctggtggctaaggagagctcagaagattttgtatttacattcttggatccgtattaaaatagtccaggcttccactagctactctgactttctcatataaaaaggtatagtagggttatgaggatttgtccaagccatttactagctgggtgaccttgaagtaatcacattatttcactgatgcctttttaaaaaatatgtaaaaatagagataattcttaactgagtagtgaggatcaaatgataatagaaggtactttatacactggtaagccttaaatttatgttactcctcctgtttccaggcctatttctatgttagactatttgggtaaaacttctgggcagtgggctccaccttgcgaccttatttagctcaaggatgtcaaaaagaccacatttttattattttataggtgaggaagctgttcccttcttctgtgtttccttccttagggtctttgaagtatctttatttgtggtaatcataaattttatatacatttcagagtgtggtacaatcaagggtcagaagatccaggttttatatgctgacctgttaattgagtaaactggtaaaaaaaaaaaaaaaaaaggagataatcttatatttcacaggattgttttgtgaagtgtcaagtgagatatccatgaaaggatacaaatagtagtctctttgttcccatgggtcttcatttatactcgtagctgttggatgtgtgactttcccacagaggtttattttaggagcaagagccaaatcttcattttttgaatgtcagtattgtaggaatttactaagtgaataaatcttgaagaagagtgtggattaatagagaaaattcactaaagtttattcagtattcaaggtgttggataccttgttggcccagttggattaagcaaaataactatggaggcaccatttggctggtatagaagaaattacatactgaataggttttggtgatttatcttacagaaggcttaaaacaggtgattgtataacttgtaaaatatctagtctgtatcatgagtgtaagaaagatttgaaaaaatgtgatttcaatttttatatggttgtaggggagtaaaagggtatttaaaccctacttgtgccaacttaaagttgtcttttcctcttttttctcctccttgtttgaaattgatgaatggaattaagtggaagtaaaagttagagaatatgagctgaggctgtacttcagtggatgcttcttcagataagggtttacgaaattttcctgactagaaacaagaaggggactccttgtcagacctgggatatagtccttgacttgcccctaacatgctcccccaacccccttgtcccccactattcctgtgtgttccagtgcactttacatgtttttttgctattgaatttattctgtcttataattatgtggttctttttgtccctcttcattgtaagttccttgaagaggatttttatattcatggtactagcaaaatactagcatttttatattcatggtactagcaaaatacttggcaaatagtgggtggcctgtgtaagtgtttgactttgactgcgttgctcttttatagaatctgttcactagcaaccccatttttggaatacctgtagtgttctagaagctctactggatattgtagggtgtagtgtagtatttggtggatactaaatgttaataacataatttaattaagcaagcaaaaactcacatcctgactccaggaataggtgtagaatttggttttcttttgttcttttttaaattttaatttaatttttattttgtagagatgtggtcttgctatgtggaccaggcaggttttgaactcacctggccagaatttatttcttattctaacacagagcttggaagtggctacaagtgtcaggattgtctaaattctaagccctttggaggataccatgtttacttgactttatgattaaattctgaattactgaaagggccatcaatctgtttttaagtctctttgaccaaagaacttgtaaatattttcaagtaacaagcatatgcatctctattggtttaatttatttttaccccatttagtgcttgctttgttttgattctttttttgtttttgttttttgagatggagtctcactcttgcccaggctggagtgcagtggcatgatctccactcactgcagcttccgcctcctgggttcaagcaattctctagcctcagcctcccgagtagctgagactacaggcgcgtgccaccacgcccagctaattttttgtatttttagtagagatggggtttcaacatgttagccaggatggtcttgatctcctgacctcgtgatgcgcccacctcagcctcccaaagtgctgggattataggcgtgagtcaccgcccccagccctgctttgttttgattcttatcagtgcttcaaataccaatcactgggtagtgtatgatactcttgaagtattagtgtgggctgccataacaaaataccatagactgggtggcttaaacaacagaaaattattttttatttttatttattaatttttttgagacagtctcactgtgtcgcccaggctggattgcagcggctcgatctcaggttactgcaagctctgcctcccgggttcacaccattctcctgcctcagcctcctgagcaggtgggaccacaggcgcctgccaccacgcctggctaatttttttgtattttttagttgagatggggtttcactgtgttagccaggatggtcttgatctcctgacctcgtgggattacaggtgggagccacagcgcccggcctagacatttattttaaggttctggaggctggaagtcagagatcaggttgccagtatggatgggttttggtgagggttctcttcctggcttgcagaagatatccttctctctgtgtcctcacatggtagggtgggtatgggaatcctggggtcggggagatgaggggggatttctctctcctcctcatttcataaggccattaatcctattgaattagggccctgtgcttataacttaatttaacattagttacctcctaaaagccctttttccaaatagagtcacattgagggttagggtattaacatataaattttaggggaacacagttcagtctatagcagaagataactacattttttttttttgtcagtgcatacaactttggaagaaaataatttgtttaatatttaggtgaactttagataagttttgttttaagtaaccagaagttgtttactaaagaagataaattaggggggttgattgatttatacaagatatccgttaaattttctagaaatctctttacactgggaaccttctattttacaatgattaaagtaagttttattaacaggcaacttttccaaagactactttgggtatgaggcaatgtatgtatatctaagtgtagagattgaatggtgtagggtaaagaggacaggctttgaagttaactctgggtttgactctagtttgacatttactaaataatttatttttgagtgggttataaacattttttgggatcgaatatactttgtgaattatagagctgttgagaaaattaaataaaattctggcataacacttggcacacaaaatgagcttgataagagtaaatcccccacttttatgaaagtctgacatctcttaagtttatgttaagaatgtgaaaaaccatgtaagatggtgcagctgctttagaaaacagtttggcagttcctcaaaagttaaacatagagttatcgtatgacccagcaattcctttcctagaaatgaaaacatttgtccacagaaaaacttgtacacaaatgtctatagtatcgttattcataacagccaaaaagcagaaataacccaggtgtgtctgatttcatgaatagatcatcaaaatgtggtatgtccatacaacagaataatatttggccatcaaaaggaatggaattctgatacatgccacagcgtagatggaagcattatgctaagtgaaataagccagacacaaaaggcgatatatgccatgattccatttatatgaaatgcccagaatagacagatctatataataacaccagaagatctcatttgctttttacgtgagttgtttctgacatttttattactttggattaatattttgaattgacatcttcgtgctatttaaagaagagagattgaagatagaaccactggacatttctctgtagggaaacaagcacgtgggaatgctgaggtggaaaccttggtagtggtggctttgaaaggcctgaacaaattttggagctgtatcttcgtgctaaggagacagccagccatctctttggtaggcctgttgtaagtaaggatgactaaagtcaccagtaaaatgtgatgaagcaaatccatcagaatcttcagaaaacttaaatctgggtggtgattttctggggtttgtttacagtagtctcaaataccaaaagttttgtctttggggaatgaggtaatcatgatatttttaaataaactgagcccttttccagtggtaaaggccttatagaacatctggtcttggtaagaatacatctgatgatgtgaaatcaaaatgactacctttaactgtgccttagaggtcctcagtcttctgtcctttttggtatctgttacatttgcaacttggcagcgggggagctttatgaagaaccaagaacttaagtaaaataaaatgaatagctcttgaggtcaaatctcaagggagtccaaattgctccttttacagttcagtgaagggatctttttatgcagtcttaataattattatatactggttatttgaatatctgctttgttctgcagtctttctcctcctcccccaaattctcatgttagactgatattgcaagcaaaattgtgaccgttcagtttttaacaatttaagatttatgtatcttaagttttcatttaaaacttttacttacagtctacttaattgtggtctttgcacaatttttttagaattatttttagaaaaataaatcaattactgttgtccatatgtctggtcagtatttttttaaattacttttttccttccattgtaaagtagtacagattttgaacagattttagaaggtatggaaagtataaaacatttatttatgaaatgttaaatccaagccatctagtattttaatattttaatgtgtagatttctaaactttttgtagtgcatttgcagcattgcagatcattgtgcgtgtgcatatgattatatataaaagtaagattatactatttaaaaatggaattatactatatttgtattgtgtattttgtagcttgtccctttccatatatataatatctatactttttacattttattatttttattttttaaatagggtcttaaactgtcacccaggctggagtgcagtggtgcaatcatagcttactgcagcctcgaactcctgggctcaagcgatcctcccatctcagcctcctgagtagctgagactacagatgtgcgccaccacaccctctaattgttaagatttttgtgcagagacaaggtctcgctatgttgcccaggctggtcttgaactcctggcctcaagtcatcctcccacttcagcctcccaaagcactcggattacaggcatgagctgctgtgtccagccagtaattcttgttcctaactatatagctacataactttaagtgactgcataatattccattgctttggatggatgactttgtctacttaaatcttaaagatggacttttagatttgttccattatttttgttattataaaaaacactgctgtgaacatctttggttatatgtctttgtgtacatatctgatactgttttaggatacattcctagaagtaaaatcaagaagtagtgctgtgttttgtttttttttttattttttgtttctttacctttctgtatccagtctatcattgtcctaccaggtcaccttcacttgcttctgtccatctcactgcctcaagtccaggccactgttatctcttacctgaactattagtgtttcctcatttccattcatgtcccctgttcttcatgcatcactcagaatactcttaaagtggaaatcagatattgttatttcccatgtaaagccttcagcggcatcttagactaaaacccaaatttgtcataaaaccaaaattattaaggtcttgcgtgacctggctctgcattccaagttcccagcacaggcctctgtgagtatgcataagtatttgagtgaataataaacaaaatgactaaagggagttgtatcagtttttgatacacgttaccagataagcaagagtagatgagatttctagttaccccacattctggccagctcaggccattatcggtcttttaatctttgccaatgtgataggtaaaaggtgttacctcattggtttaatttgtatttctttgattacctgtagggtctctttgtttgtttattggacagctttatttttgtgtggatgtctgttcatgtgctttttctgttttcccaatgagatgtgtagtttttcttctaatgatttataataatgaggatattaactcttcatagtgcatatacatatatcgtatccgatattactgctgtttaacaaagcatctcaaagcctagtaaagctgttacccgggctggagtgcagtggtacaatcatagcttactgcaacctcgaactcctgggctcaagtgatcctcccacctcagcttcctgagtagctgagactgcagatgtgctacggattggctgggcagctcttcttacctggactcattcgtgtgttttccttcacttaggttcatctggtgtgtctatcccatccctctgcctcatcgctcacttaacaatagcagcctcctcatgacaacatgccctagtatgaaagctcttaccagacctcagcttgcatcctgtttgcttatgtttctttggccaaaacaagtcatatggtcaagcccaaagtcagtgggggaggtgattacacaaggacagatcaagaggtgcgattcattggtggtcataatgtaaactttactatatgtatcttctttttttttttttttttcctgagatggagtctcactctttctcacccaggctggagtgtgtgcagtcatgcgatttcggctcactgcaacctctgcctcctgggttcaaacagtcctcccatttcagtctcctgagtagctaggattacaggtgtgcgtcaccatgcctggctaatttttttgtatttgttcttatttttatttttgagatggagtcttgctgtgtcccccaggccggagtgcagtggtgcagtcttggctcactgcaacctctgcttcccgggttcaagtgattctcctgcctcagcctcccaagtagctggaattacagatgcacgagaccacgcccaggtaatttttgtatttttagtagagacagggtttcaccatgttggccgggctggtcttgaactcctgacctcaggtgatctgcctgcctcggcctcccaaagtgctgggattacaggtgtgagccacggcgtccagctttttttgtgtttttagtagagatggggtttcatcatgttggccaggctggtctcgaactccggacctcacgtgatctgcccgcctcagcctcctaaagtgctaggattacaaacatgagccaccatgttcagccttgtatcttcggtaatactgagttttccattctttttttcatctgtatattaagatttaaaattttatctttagtgaagtgtgcggcaactcattggttttttttaattaaaaacttttttttttttttttttttagagatggagtcttgctgtgttgctcaagttagtcttcaactcttggccttgagtgatctgtttgccttgacctcccaaagtgctgggattactgaaccacagtgcttggcttagtttctagtttaatgggttcgacatggtacctttaaaaaaacatgtttagaaggaaaatgcataattttttactatatagacatcatataaaagcatatataatatgcttttagctttcttttttatcgttaagtacatttgttctcatttttctttgtcttaattttatttaaaatgtgtgtacttgtatttggccgggcgcggtggctcatgcctgtaatcccagcactttgggaggctgaggcgggtggatcacgaggtcaggatattgagaccatcctggctaacacggtgaaaccctgtctctactaaaaatacaaaaaattagtcaggcgtggtggcgggcgcctgtagtcccagctactcgggaggcggagcttgcagtgagccgagatcgcgccattgcactccagcctgggcaacagaacgagactctgtctcaaaaaaaaaaaaaaaaaaaagtatgtacttgtatttaaaccataaagcttgtgtttttaaaaatgtttttcctttgctaattaacttaatttcagtgttggcatttatattcttcagttttcttagagtttaaaaaaaatgtaatcgctgttattgagtacttactgtatgaaacctttattaactcatttaacactgatagaactgttatctccattttatagatgaggaaattaagccacagagagttaagtgacttgcccagggtcacccagttagtagagagtggaactgggattccatctcaggcagtcaggttccagagcccatggtttttaaccagtaagctctcatacataactgtttgtaatggttaacttttgaactgaagcttatatttgaattttccaaatgttaatgtgtgagtgagtaatttatttttccttgtgatttcattgtttagggggtctttactttctgaaaataattggcgtaagaacaagatcttgtaggatgaattgacctagaacatttcagagataatagtacatagttggggtggggagaaaaggctttatttgggtttaatcttgaaaaatgaaacaaaactatgaaaacattcatgttatggttgcaactatgtgttaaattattagaatgaaagaagaatgaatcaagtgttggttgcttaaaaaattttacataatttttctgagaaaattgtaagatcacatgaaactatccatgttatgatggacttttgcagtatgatcataaagacagtcctttttgccaaaatattcaagggcttcattagttttcctaactttgattttcagattttcttttgacctcctggtaatctcatctttgttagttctccagttattaatttacaatctgttaaaatgctttcagctccaagtaactgtttaagacttaaagtgcttaaatattgagaaaatttatcccatataattagaggtccagaggtaaggtagactccacacatactacagtcagtgggtcactgatgtctttgaggacacgggtacattttgccatctttggtgttcagtcatctttatattggtaacaagtggaccatagggcttccaggattcacattgagacccagtaattcttggaggaagtaggaccatccttcttgtgtgtgtgtgtgtgtgtgtgtgtgtgtgtgtgtgtgtttaatcccgccatagtccattttgtgctgctataacagataccacagactgggtaatttataaaggaaagagatttatgtggttcacagttcggaggctgagaagtccaagatcaaggggttgcatctggtgagggccttcttgctgtctcataacatggtggaaggcatctcagagcaagatggtgtatgctcaaaacagaaaaaaggggttgaattcctgtggtaactaacccactcccatcataatgttattaatcgattgatgggggtggaatgcccatggccgaatcacttcttagtactgttacagttaaatttcaacatgagtttcaagattcaaaccatagcagctctcttaaggtatcatttacatacagctaaatgcataaatcatgtatacatatagcttggtacatttttactatgtatacatacctgtgtagccaccaaccaggtctggatatagaacacacttaggccattaagttccctcatgccccttcccagtcagtatctttccaaatactcatttttttcagttgctttgtaaagagttttcatcattttcagtgacttcataaaggcctacatcttttggaatgtttgcactttcactttgtagatgatatgcattgtgttgctttgtaattgaaataacctgtcaatcattgagagactgacagggcaaaggtgaaatggcctgacatagaggctaatgctgctttgggagggatgtttaatggggactgatattataaatgtttagttcattagcggatatttttgtgttaagaatacttttgcttccctggcaacttctgtgtctgataatgaactttgattttaagacccttgtacctattttgttctgtattacatttttacatatatgtcgttatagattctctaatttattgcattggtctattattcctatgcaatctgttagctgtgagccgttagatctttatgaaatttagatttgatcagctcagccttgagtctgaactacttcagtgccttcccattgctcttggaattaagaccaagctccactaagctcctcctcattatggcctaagtcctgcacaattttactttctcagtgattccaaagtaagtaaaatgacccaataagaaaaatcctcaacaataacttacaaaaaagtaaaaatgtgcataggtatgacccattgccttagacttacagtttagtgggggaggagacattaattttcaagagctggcagagcatagtggctcatgcctataatcccagcagtttgggaggccgaggtgggtggatcagttgagcccaagagttcaagaccagcttaggcaacatggtctatctctacaaaaaatacaaaaaataatattagctgggtgtggtggtgcacacctgtagtcctagctatactcaggagattgaggtaggaggatcacttgagcctggaatgttgaggctgcttttttttcaaggtgtttgcattttggggttagtcaagtttaatagaatcagcattgacttcagagccattctgctatttactggctgtgagaccttgactttcccaaaccttaatttctttttttgcaaaatgggattaataattcattgccttgttttgaaatttgctataatgtagttagagtttttatggattgggcatattctgtttattgttttctttgtattgtaccatgagattaaaacaaaaaataaagttcaagcttctgaatgttgttttgccctttttgcttgcttgctttttcttgttttgagacaaggcctgactgttacacaggctgaaatgcagtggcgcgatcatagctcactgcaacctggaactcctgggctcaagccatccttgcacctcggcttcctaagtagctgggactataggcacctgccatcacacccactgttgccttttttaacttaatatgaaagtttctgttttttaggcactctgaaagcaaatagccagttaaattcttagagtacctgtattttaaaatgatgtttataatttaagatgaatatttaaattaaaaaccagcacccagacatagaatggttatttgcattacttagaactaagttctccccctagatctgtcaccctaccttcccttcataatgtgtggttcccgtgtggtcagccatcctgtctaaactttctcctgaaaaaaaggccatgcacggtggctcacgcctgtaatcccagcactttgggaggctgaggcgggtggatcatttgaggccaggagttctagaccagcctggctaactggtgaaaccccgtctctactaaaaatacaaaaattagctgggcgtgatggcgcatgcctataatcccagctactcgggaggctgaggcatgagaatagttagaacccgggagacagaggttgcagtgagcagagattgcaccacttcactccagcctgggcgacagagtgagaccctgtctcacaaccaagcaacaacaacagaaaacaaaaaaaaaatctactgaagaaaccttcccctgcaccctggagcacacagaagagatgtcttaacttggcattcagggccctcgagaaacagttcagcagtgcctttcaatactccccatgtgaattcacttcagaatggtcgtttattgttttccaaaggtaccagtgaagttgcggtttcattacttttattctgtctgtcttctggaaagctgccttctctgtgctcacctcaatcccattcttgctttagtttcctcttctggtttgtctttagtgattgttccaggctgagtctctctcttttcatagtttttgtcgactagctcttttggtgtgtcatacatacatttttcccttaaaaaaacggagtataaactcatgacacatttctctgaacactttatatcatgctgggttcaatgagacactattaataacttttttgaataaattaaaaaactaaactcatgactattgattgtttttggccttctcattttattctttatttgttgtagagatgagtgtcttgctgtgttgcccaggttggtctcaaattcctggcttctaacgatcctcccacctcagtcttccaaagtgctggaattacggctgtgagccactgcaccctcattttattctttagctaaatcatctgatttttaataaaggtattgggacagtactttaaacaattttatattgtacataggatgttttggtaagtgacaaagtgaaggtgtcatggtataacattttaaccaaaattttcaatatgcacttgaaaatataaagacaagacatcaaatatatttggttttatttttcctgcctggaaatgttatacaaaataagaatcttgtcacccagtcagcagttctgtttccctgtaacatattgactgttagttttttctgagtctgtaaaaagttaactaaaattagaaactaatacagtaagggctttacaaaaactttacataaatttatgcagatcttgggtacacttctgaggtaggcagttaattttttgtgacctccacatctactcttcccctgttttcataaatgctcctatcattattagccagggttctctagagaaacagaaccagtatttgtttatttaaaggaattggcttacatgattatgggagctggtaagtctgaaaattgtaaggccaacaggcaggctggaaactcaggcaagaattgatgttgcatcttgagtctgaaatttgcagagcaagtcagtaagctggaaactcaaaacaggaggatttctgtattacagttttgaggcagaattgctttctctggcttgggtttgctggcagtctttggcattcctgggcttctaggtccatcacttcagtctcatgcttctgcagtcacatggctgtcttttcctgtctgtcttcagttgatgttttcttcctcttataaagacaccagccatattggattaaggggtccactctactctggtgtgacctcatcttaactaattacatctgcaaagaccctgcttgtaaaagaggtcacattgtgatatactgagggttaggacttcaacatcaacttcttgcctgagtttcctctttgagtatggaccacagtggtctcattcatctctctcattagtcagatgaactaattgtctcaggtgacagatacagagggagacatgcatgtacacaataaaaataaatatatgcaaagattccacagtaaagcagctggagctaatgaacgacttcagcaaagttgcagggtacaagatcgtcacacaaaaatcagttatttctatacacctacgataaacaactgaaaaaaattaaaccagtttcaggctaggtgtggtggcttgtgcctataattcccagcaatttgggaggctatgatgggaggatcacttgaggccaggaatttgagaccagcctgggcaacatagactgtttctttaaaaataaattttatataaaaacaatttcacttacagtagcatctaaagaaataaacacctaggaataaatttaaccaaggaagtaaaagacttgtacactgaaactataaaatattgttgaaagaaaagacttcaataaataaaaagactttgtcttcataaatttgatattgacttgataattgttaagatgtgatagttgataagacttgatattgttaaggtgacagtactacttaaattgatatgcagacacaacgtaatccttatcaaaatcccaatggcgttttttgcaaaaataattcatatggaatttcaagggaccccaaatagccaaaataatcttgagaaagaacagagttggaggagacacttcccgatttcaaaacttaactttgcagttacagtaatcaaaacaggtaaaggcatagtaaggcatagtaaggacatacctatagaccagacctacagaccagtgaatagaatagagagcccagtaaaccctcacattcaatagatttttgatgacagtgacaagaactttctcctgagagaagggataatcttttcaaatgacactagggaaatgatattcgcaggtcttttcaaagagagtttagtgtttttttcttaaaacatcagtgcctactttcagagtttctcaacctcaacattattgatgtttggggccagataattccctgttacagggttgtactgtgaattgtgggatgttcagcagtatccctagtttgtacccaccaaataccagtagtacacaccttaacctttctctcccagaagagacaaccagaatgtctctacatactgccagatgtttatgagggctaaaatcactcttggagaacctctttaaattctgtaaaatgtcagcaactactatataagttacacattttaaaaaatatgttcaacatattttaaactcttaaatgctttaagtgagatgaggtggcattcatgccgtttcctacttttattacaaaatgcacatatctgtttggttgcttagactttaatagactagcctagtaccccaaccacaatttataagcagtttcaagaaagaaaatcagtttgtatcctaaaaatcataagctcatttataaattggaactgactaaagaaaaaaaatcagcttttgaattttaacgtaagtgaaatggaaaaaataaaacacttttaaagaagttgaggtacttcattgttaatttattgcaaatacttaaaataaacttatttttaaagattagcttttgagttccaaagacctgatattaaatgtccttactgatccagaggcctcatagctgaatatccaaaacatgcatgccacagggtataagtccttcgccacagaccagagcatctctgaggctaacctttgggtaatgtttgttcacacctggtgcaaattaagtggtctaaccaattatatatgataactttgataaataatattaatagatattatttgttgaatatttaaagataggccaggcaacttcacatggatcatttcatttaatggattcgaataagccatgagattcatgtcgtcattgctgttttacagtgtaggaaaccaaggcttaggatacttaagtgacttggctggagtcatacagtagataaatgacagctgaaattcagatctaagtcctgcgtaactccaaagtccttgctcttaatactttctatagcctcttattttacctttcaatgctgtttctcaaatttcatttttcatccttaagatcacatccaatgctgtctcaagtctcatgttggagtttgtgttggaagcagtaggaaataatggcagttgggctggggtgttaaagactttgagtgacagttggctgggtgcggtggctcacacctgtaatcccagcacttcgggaggcagaggcaggtggatcacgaggtcaggagatcaagaccatcctcgctaacatggtgaaaccccgtctctaataaaaatacaaaaaaaaaaaaaattagccaggtgtggtggcaggtgcctgtagttccagctattcaggaggctgaggcaggagaatggtgtgaacctgggaggtggagcttacagtgagccgagattgcgccactgcacttcagcctgggcactgggcgacagagcaagactccatctcaaaaaaaaaaaaaagactttgagtgacagtttaaggaacagaactaacatgccacatacttcctgtacattatgtcttccagtccgtaagccaccatacagggaacatgtcttcattaatgtcaagcctgcatggttagtaagtagtggcacctagacctgaacccagctttgtctcatttccaagcctatatgcaccttaccctaagtgttttattcaaaataatttgaacttttccactggattaatgacttccagtttgtgagccctggggggcgtctgcgccattcctttaaagaatagttgaacccctaggtatagcaagatttgtctgtaatccaaagatgccagcctttacatgcattatatttcaactatatgtagatgcttttctgataatgtatagattcatttaaaagcttgcaaatataatgtgcttttaaatcacattttttcagtcaacatatacagtattaaaagtagagcaattattcatgaagttaaaaggtcttttcatctttggaaatgttgagaaccactttttttttttttttttgagacggagtctcgctgtgtcacccaggttggagtgccatggcgtgatcttggctctctgcagcctccgcctcctaggttcaagagattctcctgcctcagtctcctgagtagctgagattacaggcgcctgccactatgcccaactaatttttgtattttcagtagagatgggatttctccacttggccaggctggtcttgaattcctgacctcaggtgatctgcccgctttggcctcccaaagtgctgggattacaggtgtgagcccctgcacccagctgagaaccactgttctacatagatgttttctctatttaatctgtttcttaggcggagattggcagccatttaacattctcaaaataaaggaggaaacctctaaacaatgaaagtatttaaagctaccgcaagaataactgcaatcttgttttttgttctctaggtgaagtagaattttgtgaaaaaacaaaaatgttttgtgaattgttactagttacctacaaaggcaatccataaaaatagtacaaacaaattgtgagtaggagaaaaacttaaactgttaagacattatagtcttttcttataaattataatttttagaaaataaactgaagggatcaaatgatgtctttaaaattaggaaacaaaatctgtgggtatgctattacctaggattaaaaaaacaaaacaaaacaaaacaactaactcttgctagatgatgctttcaaaagaaatgtagtccaaaaatgagcactggcactttttgctggtacatggagaaactttgagagtgaaggcatattaatactttcaagttgtaaataggctggaatttgggcttgtgattttatagttttagaatttatatcattagacttttaatattggatattagtttatgccttttttttttttttttttgagagatggtgtcttgctctgtcactcaggctggagtgtagtggtgcgatctcagctcaccgcaacctccgccttccaagttcaagtgattctcttgcctcagcttcccaagtagctgggactacaggcgtgtgccaccacgtccagccaatttttttttttttttatagtagagacagtttcactatatgttggtcaggctggtctcaaactcctgacctcaggtgatccatgcgcctcccaaagtgctgggattacaggcatgagccaaagtccctggcctttgtacagatttgttttgcatacttctcagccttggtggggttaattgtggcttggcaaatcaagaaaaggagttctgtgctgttttcagactgcagaatcttgttgctatgcaacaaaaattgtcagtcagtatagggtatagtaaattggtattctctgtcccttttcaccacatgctcattttgtaatctgagagaagtggtttggggctagtttgcaaggttttattttaaaacaagcatttaaaaaattttgttgctatttgtaattggttatatttaaggtcggtgaagtctttctgtacttactagaagatacaataaaatgctagtgttcaaagggtttatagatctgtttccaagttgtttcaggttagagcagtgtatttttgttttgttgctgtaacaggggtaatattgccaacttccaaagagtaaattttagcttgagaattcaagttgtataatttgaacatcagaagtttattgtaagcacatcatattatttttaaatttatttatgaaaaacatgaacccaaaaaacccttttattgataaagttttttaaataggaaccctaaacttgtatgaagtctcatgtatgataatttattttctgccaggagaaattaaaatgcctttatagcaaatgggtgatggctaatagccttctaaaaattgtgataaaatatatataacacaaaatttacaattttaaccatttcgagtgtttcacatagttgtgcaaatatcaactgttcatctcctggataacaaccttttgcatcccatttagtaacttagtccagactgtcttctaaatcctttaattcgtttaatcttcgtaagaaccctatatgtacgagaagtacttttgttccaaatgagaagagtgaggcacaaaaaggaacacaaaagtagtaattagtggagccggaattcaaacaccaacagtccaactcttctgtgctctcaactattatgctatgttaccctcttttggaattactttcttttttgtttagtggttaagagcattgatttaaaaaaaaaattactttctgtagcttttccaagtaaagttaatacagtttaacagcattttggactgttaacaaatttagtttggctataaatccctgcaatcttctagacattttttttctaaatatttcaaaaggatgcagtttatgttattttatattgtgttatttgtatatgaaattatacatattatggttaattatatagaaaggacttactttcctttttcagtttgtttctggaccatttttcatgccattccttccaatagagaatgcaaatcattttctggtcatttaatgtaaataggaaggtacacttgctgttagagaattttaatatgatgccatccaaagactaaagccagttggcattggatcatccacttagtattctctaaatttatgatcttctttttcacgaataatctggagttaattgtagtattggcagtttagaataaagagcaatagggaggagtaaaaagggagaaaaacattgcaaggagtcattaacttccaattgatgaatagggatgagtttttgcagactctgctttttttctgccatgtaatatctctactaccattcttaagcatccttaaggagcttactttcctttgattttttttccccaccttctacttttttttttttttctgggacagtgtctcactctgttgcccaggctggagtgcagtggcatgatctcggctcactgcaacctccgcttcccagattcaagcaattctcctacctcagcctcccgagtagctgggattacaggtgcactccactaccacctggctgatttttgcatttttagtagaggtggggtttcaccatgttggccaggctggtcacgaattcctgacctcaaatgatccacctgccttggcctcccaaagtgctgggattataggcgtgagccacagcgcccagcctttccctgccttcttttctttcttccgagatggagtcttgctctgtcacccaggctgaagtgcagtggcgtgatctcggctcactgcaacctctgcctcccggattcaagcgattctcctgacccagcttcccaagtagctggtgttacaggcactgtccaccacgcccatctaatttttgtattcttagtagagatggggttttaccatgttggccaggctggtcccgaactcttgacctcgttatctgcccgcctcggcctcccaaagtcctgggattacagttgtaagccactgcgcttggcccatatttctgtcttgctcaaccagacttactctctagtcagtttgcttttcatatctgttcacagttgcaccatcttttttttttttttttgagacggagtttcgctcttgttgcccaggttggagtgcaatgacgcgatctccactcaccacaacctccgcctcccaggttcaagcagttctctgcttcagcctcccgagtagctgggattacaggcatgcaccaccacgcccggctatttttgtatttttagtagagatggggtttttccatgttgaggctggtctcgaactcctgacctcaggtgatctgcccaccttggcctcccaaagtgctgggattccaggcgtgagccactgtgcccggcctagttgcaccatcttttaaaaaaatgttcttcttttatttttgtgcatttatatatgtgtgattatacttgatacattttttgccttgttcatttgatatgttttgcattttctatgttttttaaaaacttagaattttattagttgcatatttcactgtaatttacttacttcctttaaaatggctatttatgtggtttacagggattttgtgtaatgaataatgctttcatgaacccaaaggtttttttcccctcctaattgcagactaattccttaagatggatttccagaaatagtattagatccctgaaggaatagaaacgattttaaaagctcttgaatcttattgccaaaatgctttccaaaagtgttgtaccagttttcatgccagccagcaaatatatggagtgtccatttcacctcagccagcaataggagggaatgttttgatgctgacctttaaatctaagaagaattgatttacagctctgctgagcttctatcctgaattacacccagaattataatcgtggttgagattggattagaaagaaggaaagcctggtttaccagtttctgccccttcagctgcttatattctgttttgcccagttaaggtgaattcttttggaaacatgaagtaactgcccttttctgcttttcagcccccttaattattttgataagttggtgggggacaaaacagtgtatgtttataagttggtaggggacaaaacagtgtatgtttcacatgacatttcccttgagagctggggtaggtttggctctcttctccactccaccactgggcttggtgtgtctggaggcgtctgaaagttacattcagtagccaccttgtccaggggtgctaattagatgtagcctgagtcactgctacttctttagctaggaaatcattaacaactctggaggtaaagtagcttttccctaagaacttgttagataatttagtattaagtatggaaaattttctccctgaatagaaggagggtcaggggacaccattcctactgaaagttgataacagggaggtcttatctggtctcctctggcctcataacagcactcagcacagttgaccattctggcctcgagccactttgcagtgattttaagctcccttggttctctccttatctcattggctgtatcttgttcctttcctcccttttcattttcttctccccatcagtcttcccctcctccacaatgttactccctgggctttacaacctgtgtgctgcttattcctagatttattttttacctggctcttgctcctgagccctagataaataagctggcatcttaattctctttgtataactaataggcactttaaataccacgtgtccaaatcagggtgttgtgatattttcatacaagtttatacttaggtgtttcagtaacatttttcccaaagtttcagacataaaaataacgcagggggctaaattataaataatatcaatttaagacacattgtattaaaactgtctttctcattttgtaaactgtagagcccataatttttcttttgataggccagaagaaagtttacctatttccttcccaatgactgagaacaaaaattctcactagaggattttatttgtgtgtttttctcatatgatatgtacttgtgtcgtgaaataccattcctctttctcagtttagtgtctcatatgtcagctgacaatgatttgaactgtattgcatggtgatacaacttgtccactcagctcattttcactagtatcagtgcctttgtagtgtatttatttgaacgctattgtggttttgcctttataaaaataactagagaatagaagaaaggaaatgttaatgctaacacagttgagataaagatggaagtcacttggttttccaaaagtggtaattctttggtgttgtagtctgttcttgctgctataacacaacatcttagactgggtaatttataaacacaaatttatttctcacagttttggagcctgggaagcccaatattaagttgccaagagattcagtgtttggttgaatgctgctctctgcttcatagatggcgccttgttgctgcattctcacatggtagaaggcacaaaggcaggagggcctagctcttttttaagggcataaatgccattcacgaggttggaggccttgtgacctattcacctcccaaaggccccaccttgcaatatcatcaccttggtgattagtttcaacatagggattttggagagacacatacattcaaactgtagcatttaacctcagtagaacgatacccagtttgtacttaagctgactgtttatcagacaagatttttttgttggcactgatagaaactcaagttagttctcctggtagaggcaaagtgagagttgctggagctagggcagcttgaggacctcaaagatgagaacagagctgaccattttggttaaataggactctttcatatttgcttagctttattttttttccctgcagtctttcttcatggtttttctagattcccattattccagctttcataaatggagagtcaaaggatgtttcctgtaatcttcagggaggaaaatcctgaaaaagactggtaaagtccaacttgcatctttgtcccttcttctttaatgggggatgaggtactgtggtgggcaccaatgggtagaaggaacagagttctaaaatggaagaaggaatgctggcaatggatatctactatgataattcaactaaagaggacaatagcaaaattaagttatatttaaaaaatacaggaggccaggtgtggtggctcatgcctgtaatcccagcactttgggaggccgaggtgggtggatcacctggggtcaggagtttgagaccagtctgaccaacatggtgaaaccctgtctctctaaaaatacaaacaattagccgggcacgttggcacatgcctgtaatcctagctagttgggaggctgagaatcgcttgaacccaggaggtggaggttggggtgagctgagatcatgtcattacactgcagcctgggcaacaagagcgaaattccatctcaaaaaataaacaaaaatacaggaaacgtgttgactgttttagtaatctgttatattgacaggaccatagagtttgtggaggaatgtagcttgcacgacttctttttttaaaaagaagaaaaggcaggagttcaactatgtcttaagatatttcttaaagaaaattggtaagacaacatctcatttcttgcaaagtctctgagcagttttttaaaaattatttttgtctgctaaatattgctttaggtgtgccaagaagactagaatttgagctaagaatttaagaaaattaactttatctgcatttcatatttactttatcttgttttaaatgattgcttataccctagcttttaaaactaaacattcatagcctaaggatttttcatatcttttgactcttggaatgaaaacccattttgaaattaagtctatcgctcagctcttctgctttcacatgcttttcaggaacaggttatgtgtgagaatagggacactggaattccgaacatctgacatccccattgttgaccacagttctccaccatgagctctatctgtcacattaaggggtcagctgtttcacatcccaccaggttaggtgagcacatagtccttagctttcccacttatttggtgatgcagtgatgtagaaaccatgtaagattgtgacctgggaagaatcaaccctgtgacagataacaaaagcagaatcctggggcattttccttttaggggaccttaatctgggcttcttcatccccggtggatagagtccagtgttgagatcacagcatcctttcattgtctaggacaggttgtagctaagattacagacctgcaccaccacacctggggaatttttatttatttttaaaatatttatttatttatttatttatttgttgattgatttagtggcagggtcttactctgtcgcccaggttggaatgcagtggtgcaatctcagctcactgcaacttctgcctcccaggttcaagcgattctccttcctcagcctcccaagtagctggtattacaggcgcctaccaccccacccagctaattcttatagttttagtatagacgcggtttcaccatgttggccaggctggtctcaaacttctgacctcaagtgatctgtctgcctcagcctcccaaaatgctgggattacaggtgtgaggcaccatgcctggccatatttatttttaaaatatttctttgtccttttcttcctctaccagctaatcttaaattttttttttctaaagacagggtcttgctgtgttgcccaggctggtcttgaactcctggccttaagcaattctcctgccttggcctcccaaagtgctggaattatagacatcagccactgtacccaacctatgaagcttttagtatttaaagtttttatgtttttcaagagatttgttgcagccataaaaaagaacaaaatcatgttctttgcagctggaggccgttagcctaagcaaattaatatagaaacaaaaaaccaaataaccgcatgttctcacttataagtaggagctaaacattggttacacacagacacaaagatgggaacaataaacactggggattccaaaagcaggggaggaagtcaagagtgaaaaactacttatcgggtactgactgggcccggtggctcacgcctgtaatcccagcactttgggaggccgatgtaggtggatcacaaggtcaggagagcgagaccatcctggctaacacagtgaaaccacatctctactaaaaatacaagaaaaaaattagccgggcgtggtggcaggcgcctgtaatcccagctactcaggaggctgaggcaggagaatggtgtgaacccaggaggcggagcttgcagtgagccgagattgcaccactgcactccagcctgggcgacagagcaagactccgtctcaaaaaaaaaaaaaaaacccaacaaaaaaacactacttgtcgggtactatgttcacaacttggggggcaggaagcccaaacctcagcatcatgcagtgtacctgtgtaacaaacctgcatacccctgaatctaaaaaaaagaaaaatttgttaatggaagtattatcatatttttgaatatacaagtgaaattatgagtctttgctgataaagacttaatttctttttttcttttctcagtcaccaggttagtactggtgagctcaacaacataaatgagatagcctgtaatctaacagccttagaggaagcatttttaccaatattaagccaaacagaaaaattgggaaatataatttagaaaaacaagggaatgaatttactttgctaattatagacaaaattaaaaccacctttgttttatttttctctaagcctgttttttcagagatctcttaaatccgtagtaagaactctagtgtcttgaaaaattctatctgcctttcttttgcattttagcataatccagaaccttttctgtaataaaaagttcccctacttttaaagccttaacttgcaagtttttctgtttcaagttgagaaggttctgtaaactgggccatggtgggggtgctggagtggaggatttctctttatgtcttatccctgtgcccctcactgcttctagttttttccttttgaaatccatccttcgagttacttcctggtgcaaattactctctgtgatcccctatcccctagctcttataagctgcccttacatgcttaaggcttgtggttatgtcattctgccatagtgctatggtctgaatatgtgtatgctcccaagattcttaggttgaaacctacccccaaggtgatggtattaagagggtaggggctttgagaggtggttaggtcaggggagcttgctccttttgcccttctgccatatgaggacaaatagaaggtgccatccatgaacagcatgccctcaccaaacaccatatctgttggcaatttgatcttggacttccccagcctccagagctgtgagcagtacactcatgtttataaattactcagtctaaggtattttgttgtagcagcaggaacaactaagacacatagcttatcaaatatttaatacaatatataacattttaacagctttaaaaaaatagagatggggtcttgccatattgcccagtctggtctctaactcctgcgctcaaaggatcctcctgcctcagcctcccaaagtgctggattataagcttgagtcacagtgcctggccaacacctttattgaggacatacaataaatgtcacatatttaaggtgtacaatcaagatagcaaacatatccatcactcctaatatataaacatatgaacacaaatttgaagggacatcaccccataagcctaacactcaatatgtataataaccttcagtgttctttttcaatgaacataaccatggacacttttccatgttgttacatggtcttaataatagtatgactttttaaagagttgagcaatggcatgttaaaaacatgttctttacacatctaagatgatagtacatagattgtttcatgttagaagtagaaacattttcagcttcttttgaagtgagagatacgaagagggaggctatgagagaatcaaagagagcacagggagttctcagtggtctcccctcttccaaggcaaatacttctgtctccaaggactgagtagagctttgagaaggaggataggtatgtcacagagagtaactaatttctgattaggtgaaactgaagctgtgtgctgaggtaaatggtaaatttaggagtgactgcttgggatttattcagttagaggtccatgtagcaggtgggaaatgtttgtatttgatgtgtgcggttaacaaaagccaatgaagaatttgggagattgagtgactgggccattatggtgtatatgtaaaataatcttagtggttgattaagagatagatttaggccgggcgcggtggctcacgcctgtaatcccagcactttgggaggccgaggcgggcggatcacgaggtcaggagatcgagaccatcccggctaaaacggtgaaaccccgtctctactaaaaatacaaaaaattagccgggcgtagtggcgggcgcctgtagtcccagctacttgggaggctgaggcaggagaatggcgtgaacccgggaggcggagcttgcagtgagccgagatcccgccactgcactccagcctgggcgacagagcgagactgcgtctcaaaaaaaaaaaaaagagagatagatttaaagaagtaattcccatggccatactgagtcagaagggtgataagtataatgagaatggttggtgtgaaaggtcacaccaaggttctggaatttggtaataggatgatagcattgtcactcttaaaaagatgattaggcaagtggacatgggtgaagattttcccaaggagatttgttttaattcgggacacattttatcaaatgatagtatatcaccataaggaaggaggctttcaaagactacaaaggactatctccacacttttttttctttttttttgatggagtctagctctgttacccaggctggagtgcagtggtgagatggcggctgactgcagtctctgcctcccaggttcaaacgattctcttgcctcagcctcctgagtagctgggaatacaggcgcccgccaccatgcccagctaatttttgtatttttagtagatacggggtttcaccatgttggctaggctggtcttgaactcctgaccttgggtgatccgcccaccttggcctcccaaagtgctgggattacaggtgtgagccactgcacccggccctatctccacatttaaggagcttatgatctgattgaagtgaacataccttcagaaaataagatagatctgatagaaagtagcaggctgagattgaggctccagatttggtaattgtgtgaaaacaagaatgaatcaagtatcccaagttgcatggaaaagtagtgggtttgtattagaggcctgggacatttttgagacagttttgctcttattacccaggctggagtgcagtggccgatcttggctcactgcaacctccgccccctgggtacaagcgatttttcttttctgcctcagcttcccaagtagctgggactacaggcatgtggcaccacgcccagctaatttttgtatttttggtagatacggggtttcaccatgttggccaggctggtctcaatctcctgaccttgtgatctacctgccgcggcctcccaaagtgctgggattacaggtgtgaaccaccgcgcgaggcctggtacttttctagtgacgaagtgttgaaaccgctggtggtcacattgaaaagcattcagagatactagatcacattacatcttaattgcagatagttccagctttcaaatcagatttttggtaggagcttagcacatatctttctgtgggaactgtgttataatgagggctagtacgttctcaagtagtacacacaaggccatttaatgcatcgtatccttgaagtatgtgttacactattaggctaaactgtaagaaattactgtttttggaagtcacagatcaccagatgttggcagtttcacatggttcaatccggtacatttaattatcaccagacatttttttttagcttagtgaatttttaaaatttattatcatttatgtactttttatttcaatacttttagggtacaagtagtttttggtatcaccagacatttgatgtctataatttatttgggaagacactgagactgcagaattgacctgatagctgtgttttaaaagcatttctctgagaccattcagggttttaaattgggatgtctgagactgaaggcccttctgccccagggattctccttaatcccaagtttctgatgggttttctctctatagtcatcctccttcccctgatccccaaaataagactagggaggtgggagtattttagggtggtgtttctcttttctgtttttgagatggggtcttactctgttgcccaggcaggagtgcagtggcaggatctcagctcactgcaacctctgcctctcaggttcaagtgattctcctgcctcagcctcccgagtagctgggactacaggtgcttgccaccatgcccagctaattttagtattttttagtagaaacagggttttaccatgttggccaggctggtctcaaactcctgacctcaagtgatctgcccgccttggcctcccaaagtgctgggattacaggcgtgacccaccgtgattggcaagggtggtgttttgctaactgtaggttagtttttctaactgtaggtttttaacaggatttatcacaaatgaaagacaatagaaaatattcaggaaacattgcacatggtaatggcaagtgtttcatgaaacatttagtgtctgtgcatttgtgtgtgtgtgtgtgtgtactgggttgtatatgcagtgtatttatttatcacaggccttaaacatttgagtaatgctgatttgggagatgaattgatgtaggcttggcatcttggggatagaaggtaagccattgtaggggtcctcggacttctttaaccttttgccctcctattgtgggccagaaagtaggccttctctctctccactggtgccatcaaactcctctgaactctggctcatgtctttcctttacctgcatgtaacgcaatgtaatttagtatagagtagaatcctttggaatttttttaaaggtgattcctggtagttgctggtataaaggtggttaaaaacagaaaacctaaagcacagagatagtgttctcatttaagtgttttaagtagaacatgaaactttctaagttgagtttttgtagagtgatcactgagaattcatctatatttcagaggaaaacaagaaagactggtaggtaggcacttgatagatttgtggaatgggtggagacagttctgagcacctgtctaggatcagtgaactacgtattagtgaatatgaagcagaagttgatagtaggaacagagaggtgattatcttcccctttttttctgtgctgtactatcttggagaggtgaggagaaaaaggttccaaattggccactagatgattgaaagaagtccctgtggccaattttgtatctggatgaccattcttttttaagtgagatgcgtgaacctttcatataaagagctgctggcaggatattgttttattaggttttagggatattggcccatggttcactttttctttctccccagtttttggaaaagttgattgctagtaaggctgattgctttcagggaattgtcattttcctccgggggatgtttggatgagaatggagaccagtttggcaagggcaacagctgttgaacaatctgtttgggattaggtgcaagttggtatgtagtggaaatctgcctcctggttcctgaaattatgttcctttgcctcaaggataaatgttttcctgctcattccagttacattcacttagttctggctggtaatgcttctgactgataactttcctcttttaagagagcttccttgaaagaataattgatagctacgatgaacaattaaaaatgttatgccttcccttaagattttgctcaggatttaatcataggttggtggtaacagaacctttcagttcaaaattagctgtatattatctaaccattttggtaaggggagagacttaaggtgctttctgatggtttagatggcagtatcacatgagatttattcatattgtgtgttggaatgtaaattctaatgacctttggaagcattagtagtaaaatttacttagctggctattcctaagcttactagtgagttggagttgcatgcgtgaatcatacctctgaccagttgtgatgatacaaattaagttgagtttaaggaagagactaaattaattgccatcctgtcaccacactgtccacttagcactgtacagctaagatcctttcagttttttaaaaaatacttttttaataccacagatataagaacctgcaatgggtgcttttaatttgggtttatgctgacctttatgtatcagataatgtgtctaaatcctgagccaggatcctagtaaccccaatttctatctaagcatagtctaaaagctgtcactcagtactagaacgtcttttgtggtatgaaaggataatgtatagggcctggaagtacacttacatatttgcttatttggttaggttgttattttgtgaatagaatttaaattcacttttagaagtaatgtcatagttgtcagtggacatgtatatttcaactaactataaggaagacagatggaaatgtccttttctttttcgtgtctgataatgcatttgcatttgttgatctgaggtcagcacttaagttggacatcttcaaatctttttttttttttaattgagatggagccttgctgtgttgccccggctggagtgcagtggcatgatcttggctcactgcaacctctgcctcccaggttcaagcgattctcctgcctcaacctcccgagtagctgggattacaggtgcctgccaccacctctggctagtttttgtatttttagtagagacaggatttctccacttggccaggctggtcttgaactcctgacctcaggtgatctgcccgcctcagcctcgcaaagtgttgggattacaggcctgagccaccatgcctggtttcaaatcttaatttaatgggtggagttagttttccaatcactagtagaaactcagtaaccataaattttgaatgcttgtattttattggagtctggaattaccacctccagagatatttagattgactttgtagttctgattggtggtatcacttttgatttttgagcatctcaattagcttatcttttcctagaagaatattttatcttcaatttttatatatagatgcaatatataattataaatactatatataacatgtacttgtgaatccgcatttcaaccatacatcaacatagagtagttgtagttaggttcctttttaaatgtattttaatttgaaatttacttgtatgaataaactcattcattaaatttttttctcaacattatttaatattgacatattgtcaccagtgagtctgaaataattctcatgccttaaatgtgactatttcaaagtattactctttttttttttttttaagtatttattgatcattcttgggtgtttctcggaggggggatttggcagggtcataggacaatagtggagggaaggtcagcagataaacatgtgaacagggtctctggttttcctaggcagaggaccctgcggccttccgcagtgtttgtgtccctgggtacttgagattagggagtggtgatgactcttaaccagcatgctgccttcaagcatctgtttaacaaagcacatcttgctccgcccttaatccatttaaccctgagtggacacagcacatgttttagagagctcggggttgggggtaaggttatagattaacagcatcccaaggcagaagaatttttcttagtacagaacaaaatggagtctcctatgtctgcttctttctacacagacacagtaacaatctgatttctctttcttttccgcacatttccccctttttctattcgacaaaaccgccatcgtcatcatggcccgttctcaatgagctgttgggtacacctcccagacggggtggcggccgggcagaggggctcctcacttctcagacggggcggccgggcagagacgctcctcacctcccagacggggtggcggtcgggcagagacactcctcagttcccagacggggtcgcggctgggcagaggcgctcctcacatcccagacggggtggcggggcagaggcgctccccacatctcagacgccgggcggccgggcagagacgctcctcacttcccagacgggctggcagccgggaagaggcgctcctcacttcccagactgggcggccgggaagaggggctcctcacatcccagacaatgggcggccaggcagagacgctcctcacttcccagatggggtggcggccaggcagaggctgcaatctcggcactttgggaggccaaggcaggcggctgggaggtggaggttgtagcgagccgagatcacgccactgcactccagcctgggcaccattgagcactgagtgagggagactccgtctgcaatcccggcacctcgggaggccgaggcaggcagatcactcgcggtcaggagctggagaccagtcgggccaacacggcgaaaccccgtctccaccgaaaaaatacaaaaaccagtcaggcgtggcggcgcgcgcctgcaatcccaggcactccgcaggctgaggcaggagaatcaggcagggaggttgcagtgagccgagatggcggcagcacagtccagcctccgctcggcatcagagggagaccgtggagagagagggagagggagagggagagggagaccggggagagggcatcagagggagaccgtggagggagagggagaccggggagagggagagggagaaaagtattactcttaaggatttgtgtatggagaagggtattgaggttgtggaatagaggtaggattggtgttggaggaagggttacttaccttatggaatcggaaatttgagacaggtttctgagtgaaaataggtaaatgtggtattgtaatataataagaaatacatatttggtctctgttcctggttcctggcacacagctcttaaaacccttggactgaccaaagtactgtaataaatgtctttttgtatgctaatgagatgactggtggctggggctcctggatagcttcagggtgggggagctggttgctaggagaagcaaccaacctatctcctgggaggggaaggggaagagcctgaaggatgagttgataaccagtggccagtgatttaatcagtcatgtctacataatgaagcctctatacaaacccaaaggatagagtctggagagcttccagatggatgagcaagaacacatccaagtgcagcgattgggggtacatcccaggtacaggagatcagaaactcttgctcttaggacccttccagaccttccccatgtgtctcttcgtctggctattcatttgtatcctttaaaatattagtattggctgggcacagtggctcacacctgtaatcccagcactttgggaggccgaggtgggtggatcacctgaggtcaggagttcgagaccatccttgccaacatggggaaaccccgtctctactaaaaatacaaaaattagctgtgcatggtggtgggcgcctgtaatcccagctacttaggaggctgaggcaggagaatcacttgaacccagtaggtggaggttgcagtgagccgagattgtgccattgcactccagcctgggcgacagaatgagactccatctcaaaaaaaaaaaaaaatctttctaataaatgggtaaacataagtaaagtgttttcctgagttctgtgagctgctctagcaaattaaactctggggagagcttatgggaaccctgatttagagctattgggccagaagcacaggtcacaacctggggcatgagattggcattagaagttggggtggtcttctgggactgatcccttaacctatgggatgtgatgttatttccacatagtgtcagaattgagttaaatcataactcacttagtgtctgccagagaatctggtgtcaggagtgtgttgtgtgagagtagaaaaaacactgtttttttccccatctttaataataaaatatgctataaggtgtagtagagcattatcccttattaggaagagtttataattagttatttttgttgttatggctgaaccagacctttgctttgttctcagaaaatatctagcaaagttacacattttctttggttcaataagtgttgtttgttgatctagttgtatatttaaaaatagtgttaaaaataaaatatgtgcttattacacataaaattgacaaactgaaaaagtagaaggaacaagttaatcaacaaatatttattatcttcacaaatatttattattaccaccaggcactgttctctgccctggggaaatggtgttaaacaagtcatgtacccagggggcttacattctggtagctgaatggaggagaaggatgtaccaataagtctgttattctcagtaagtgtgaaaaagataaaatgtgtagtgagaaaagatgggtggtgaaggcaaggcctaacttggttggggtggtcacggaaggcttcttagggagggacgtttgagttgctctgaaagatgaggaggcagtcattggagagcagggaaaagagtactctaagcagaagaggtccaaaggccttgcaatgaaaatgagcttgctttgttcaagggacagaaagtaggaagaaaatagtgtccgtagcaaaaccataggacacatactgagtctttgtagatgtatactttggcttgtatttttagaatttgtattctgctgttttaatatttgcttcataatataaacattcttcatttcataccttagtaaacatttttagtgttgacacaattaattttgtaaatgtatcgtggttgacttacccattccccaatagtttggcatttagatccctcctcccccccttttttttgcattattgtaagtattacagtgagcactttggatataaaacttttttgcttcttacggttggtcctcagaaggcaaaatataaactggggcaaagatatgaattatttagtatttattgccagaatatttggcaaaagctttagtttatgttccaattaccaaagtgtagagagtgtttactgtatcctggccagcattaagtattatttttgttttgaaaattttttttgctgtgggaaaatgcagataacataaaatttaccatggtaaccatttaaaagtgtacaattctgtggcattaaataaatccacagtgttgtgcaaccattgccactatctacttccagaactttttcatcaccctaagtggaaaaccttgtacccaccaagcaatcatttcccaatccctgttccccatcaacccctggcagccatgaatctgctttctgtctccatggatttgcctattctggacattccatgtaaatggaattatatagtacatggctttttgtgtctggcttctgtgactaagcataaagttttcagggttcatccgtgtcatagcagtgtcagtacgtcttccctttttatggctaatattccatcgtttggatataccacattttgattatttattcatctcttgatggacattgggtcatttccaccatttagctcttgtgaatagagctgctatgaagatttatgtataagtatttgaatacctgttttcagttttttcggacatatatctaggagtggaattggccgggttacatgataggtaattttccatttagctcattgaggactggccaaactggtttccccgttggctgtgtgatttcacattctcaccagcagtggatgagggttttaatttctccatatcctcacgaatacattatttttaaattttttgtgttttgttttttatgatagccatcctagtgagtgtgatttttgatttcattgtggttttttattttcatttccctaatgactaaaaatgttcagcatctcttcatgtgcttgttggccgttgagtattatctttttctcactctgtcacctgtgctggagtgcagtggtgtgaacacagctcactgcagccttgacctcctgggctcagctgatcctcccacctcagcctcctgagtagccaggaccaaagatgtgggccaccacacctggctaattaaaaaattttttttttgtctgggcaaggtagctcatgcctgtaatcccagcactttgggaggctcgaggcaggtggatcacccgaggtcagtagttcaagaccagcctggccaacatagtgaaacctcatctctacaaaatatataaaaattagctgggcgtggtgatgcacgcttgtagtcccagctactcaggaggctgagggaggagaatcacttgaatctgggaggcagaggttgcagtgaccagagatcgcgccactgcaccccagcctgggcaacagagcaagactctgtctcaataaataaataaatacgtaaataaataaataaatttttttttttggtagagacaaggttgcccaggctggtctagaactcccaggctcatacagtccttccacctttggctcccaaagtgctgggattacagggactattatcttttttcaacttgaaatttttattgaaatataagatgtacagaaaagggcacatagcaccaactcagtacacatgtgtaaccatcactttatgccctcttctagtcacagtctttcaccaaagagtaaccccacctgacccagaacagcgtcaattagttttgcctgcttttgtactcatgtgaatagaatcacatagaacatattctgtatctgcctttttcggcctaacgttagatctgtgccgttcatctgtatcattcattttattctattgtgtgaaatactagtttattcattctaaggttgatggacatttggattggttgcagtttttggatcttataatgtcgtgaatattctgctatttgttttttcttgagcgtgtatgtgggccaaatacagcttttggagtggttgatcgtactagcgttaaaatgtcgccattggtgtaaataattcctctactttgttggctgtttcttttttttcttttaattttagttctgtttaggcatggagaagttgtaagtggttttcttttgttcatttatttggttagttttaagtttggattgtgaccccttcatccagagttttaaaattggaagtcagctctcttgagtcacataatcttggtatgaagtttaagatgaatgaaatgcaagcatacttgggaaaaaaaagaattttttttactggggacctatcgttcttttcttaccaaatgttaagagtatcccccaatatttttatagtaattataaaatcacaaatttattataaccccacagtaggtcctagagactaactggaacagaaagcaatattgttttaattgtttgatctttgagctctagtaaacttctctatcttttcttattttcttttaaaattacaaaataatgcgtacatattataaaacatttgaaagttacataagaaaatcaaaataatgtcactacttgagagaaaatcacgttagtacatacacttcctgtttgtttttaggcaatgctagttttttttttttattgaacataatgttctataatgtgatttcccctaaatatactgtgaatactttcctctgtaattaaatattattctaaagcatggttttaaaaaattagagcatgatttaaaaatttaatttttatcatgtggtatacatgtacatattaataatttatatagtcatgtagttttacaaggctaataaaaaaagtaggccgggcgcggtggctcatgcctgtaatcccagcactttgggaggctgaggcaggcggatcacttgaggccaggagttcagaccagcctggccaacatagcaaaacgctgtctctactaaaaatataaaaaattagctggggatggtggcgcatgcctgtgctcccagatactcaggaggctgggcatgagaaccacttgaacctgagaggtggatgttgcagtgagccaagatcgtgccactgcattccagcctgggcgacagagagactccatctcaaaaaaaaaaaaaaaaaaaaaaaaaaaatccatttttccctttcctgctagaatccagctctcaagaggaaccactatcaactgacatatttctttggtagtttttaatttccagataacgtgtttaaactaaccttttttgactgtttcaattttagatttatcttttgacttgccatgatggaagatagtggtttagctgttttacattctcctccccacgatgcatactttccatcttctctatatggttatataaccaattttggttaatcaaagtttatataactattcacattggagccatgctgtgtactattttaatatggttactttttttttttgaaacagctttttgttttagctggatttaatgaatctttgtgtttatttgttttccatgcattcatcacttactcagctcagactatactactaaagtttaactctccttttaatataataaacacatcaggtaatctttcagtttcttttttttttattttggatacctctaactttgtgttccagttgaactgattgccttcttggcttgcttcctggagtgggatttttaccattttcatgggaattctttcagccttattctgttgcttttcattgtagctcccttagaaataaagcatgggaagcaaattctttgagacttagaatatttaagaatatctattagagcctactcttgatagataacttggctgtatttacaagtcaaggttggaaattatttttcttcaaaattttgaaggcattactcaagtgacttgtttctagagttgctctgaaaagtctgatgtcattttgattccaagacccccctccttttttttttttttttttttttttttgagacagagtctcgctctgtcgcccaggatggagtgcaatggtgtgatctctgctcactgcaacctccgcctcccgggttcaagcgattttcctgcctcagcctcctgagtggttgggattacaggtgcctgccatcacacctggccaatttttgtattgttagtagagacggggtttcgccatgttgatgaggctggtctcgagctcctgacctcaggtaatctgcccgcctctgccttccaaagtgctcagattacaggcgtgagccacggtgcctggcctccaagacccttataagaaagctgtttttttctttctggaaacctttaggatcttctcttattcctggtgttctgaaattttataatgatatttcttaatgtgagtctttgtttaaaaaaaaaaaaaagtctgttgtgctgtgcccttgatggatctttttattttagaaacatgcccttcaatgcttagaaagttgtttctttggtaatggactctgaaaagggagaactccttgttagggggtttttgggtcttctgaattcttttatctactctttgctgtctgattttgtcttttttttttttttttttctgttttttatattccaactcctttattggatttaaagtttctgctgtctttaatttgaaaagcttttcttttgttttatgaatgtttcttttaatcattcttatttcacggatgcgtatctttttttcgaccctttgaggatattatgattctgttccttgcgttgtttctttttttcccttgctctgttttgattcctatctttcaaattaaaggttttcttaaatgtttgatgttccttgcctatctgttcagacttaagcctgaggcttttaaaaaagtttttatttttaaagcaagttgggaagtctttccatggtatgggcctgtgacatggtcttcctctctgagggatgaactggtgaatctggctttccgtggggaccctcagctgtcagtgtctccaggtctctcttttttaggctgttttgttttcctgtctaagcttgactgccagaattctgtggtgaattggggaaaaggagggtggtgggtgggtggtaagttatcattcagtatttaggcttgcatttaatccccatcatacctccctcagaatgcctttgtttacagtctctcctgtgtaaacttcccagagtaatgggctgagtgtctgatggcattgtttgggttatgatatctgggatttcgatgaatggctccgtatctagaatttcaaccaggtgttttttttttttttttttgccccccaccctgctctggattcctgaacttttctaggctttattcttggtacattccctcagtaattctgctagacagtttctgttttcttcagcctactaagtcagttacctctaatccatctgcttttcggctttcaaaattgtgcttatatctagagcaagcttgtccaacccatggcctgtgggccacatgtggcccaggatggctttgaatgtggctcaacacaaattcgtaaactttcttaaaacatgagatttttgttttgcgatttgttttttttaagctcatcagctgtcgttgttgttagtgtattttacgtgtggcccaagtcacttcttccagtgtggcccagggaagccaaaagattgcacactcctgatctagagtctgctgtagtgtcctcttctgtttgtttgtagtctctgcatttataaattatttattatttagtgttggacttgtaagaaacactctgctccactctgccgaggaaaaggtgagctattgtggtgaggccttcacaggtctgtgtgcctggcactctcagctgcattattcaggaccttgggctgtacgtagttattttattggatttgtgtgagaagggctagttttgtgattggttaagtttattgaaaaaaaattttttttttttttttttttttttttgagacagagtcttgcactgtcgtccaggatggagtgtagtggtgttatgttggctcactgcaatccctgcctcctgggttcaagggattctcctacctcagcctctcaagtagctgggactacaggtgcactccaccacgtccagctagtttctgcatttttagtagagatgaggttttgccatgttgactaaggctggtctcctggcctcaactgatctgcctgccttggcctcccaaagtgttagaattataggcgtgaaccgctgcatctggccaaaagttgacttattttgaatggactacattatagcttaactagattgtacgagtgcttatcaactaatatgttaaaatatggtaattcctttttttttttttttgagatggagtcttgctctgtgttgcccaggctggagtgcagtggtgcgttctcagctcactgcaacctctgcctcctgggttcaagcaattctgcctcagcctcccgagtagctgggattacaggtgcctgccaccacgcatggctaatttttatatttttagtagaaatggggttttgctgtgttggccaggctggtctcgaactcctgaactcagatgatccacctgcctcggccttccaaagtgctgggattacaggcatgagccactgcacctggccaaaatatggtaattctaataggtcacattcaggtgtattttttttaatggtctaatataacattaaaagtatttgtgaaaaattccattttggtattttaagcataatctatccaaaaggaacattaaaaaataataataaaaggggaatgtgaggtttaggtttttaagatgttcagtatttttaggtaagagtgttgtagtagtttgctagggctgccatgacaaaataccacagacccagtggcttaaacagtactttcctcacaattctgaaggctagaaggtcaaggtgttggcagggttggttccttctgaagcctctttcttggcttgcagatggctctccttctctgtccacagtgatcttccctctgtgtgtgtctgtcctaatcttcttataagggcaccattcatattggattagggcccacctgtatactcagtttacctcagttacctctttaaggccctgtcttcaaatacagtcacattctgaggtaatgggggtaaggattttcacatgtgaatttggtgggtgttggaggggcacagctcagcacataacaaatatttttattatctcatgcatttaaaggagtatcatttctgatacacttcagaaaggaatgtattagtgtgatgaagtggaaataactcggacattgtagtcagataggtaggcctggtttgaactctagccttgcctcttaatagttccctaaatttttgtaacttctctgagacttgcttccaaatctatgaactgggagtaactgtacatcacagaatgatggtaagaaattaaggacgatgtatgttaaaagtgcctgacatcgagttgacttctaaatattatgttcttactggtcttttctctcccccactccccaaagtagtgttttgtatccttcccccttatttaatatcagaaggtgtcaatttcgagtgtagatatgtatcattttaaaattgcttagtctttctattcacaagtggttgaatatcagcagtttcttaagattcaatctacaattgtatttacccagtcgcttgtcagaatttccaatcatcatgtagttcagtttaacattttacatgctttaagtgaaacctacagaagtgtaatctgctgagtcagtggatattcacgtttcaaaggttcttgatgcataaggacaagagcctttgcttttttatcagcaaggtatgaggatgcccttttcccactctaacattactgttttctcctaagtatcaaagtctaaaaggatatcttgttttatttaacttgcatttctttactagctagctttaatgtttttcatatctttatcagccctctctaaatcttttatcaattgtcctttttttgtttgtttttgtttgagacagggtcttgctgtgttgcccaggctggagtgcaatggcgcaatctcggcttactgcaacccctgcctcatgggcttaagcgattctcctgcctcagcctcccaagtagctgggactacaggcacccaccaccatgcctggctaattttttttttttttttttttttggtagagacggggttttaccatgttggccaggctggtctcgaactcctgacctcaagtgatctgcccgcctcggcctcctaaagtgctgagattacaggcgtgagccactgcgcctggccacatttgtacaattttaaaatattgtttttttctagtggataaggcacacaatagtagtctccctttgtttaatagctgtctggggcatattttcccacctatttatttacccccatttatattaagccctcattttcctcctttagctctgcctgcctgttctccctcagcaagtcattgacattttccaaagttaagagaaacagtaataacttcactgaataaaaatagtgagagagcctggactttgattatgtccagaatacctcctaagagtgttattttcaaagtcaaagtgataaggaattttggtttttatgtctgccactgaaagtagcttgtttaaatttgagtttaattagtagaatgacagtgttattactcatagtgtgtagtgttattaaagattctttggcatacatgcaagtttttgcttattagaagtttctagttgaaattatagcactcacaaaaagttttgaataaataagatttagaatgagtgacccctgaaaacctggtatgcaaaaggctactgggtaataatttcattaattttataccacatgtgtgatttcaccatactttttttgttccttgtggttgattctaagtgatcagcaatttttattttgaccatttaaacccatagccattagctacttaaatttgtgaaattctttgtagtgatttcagttttacaagtttgtatcttggctgatggtctaattttgaaaactttacatttggtagataccaatgtttttcttaatgtactttttcacagtccttctgattgatttcaaagtgttgtctttgaaaataaacatgactcatagcacttgggtagccagagcatgcctgtaatgaatgcctctgtacattttgaggctgtggtagaataaacatagcagttcctttcctttttgaaatggaagtttgatactagtactgaatttaaagatgaacagagcttagttttggagaaagagaaaagcacggttatatttgcaggtacacttttttctaactttcattgactatttttgagtgttaatgtgtaattattaaattaataaaagtaattttatagaagctgcaaattaccatatttcaatttatttcaggggttattcttttaataatttaggagctttaaagtatgtatctcaagcgctatataataaagagccatcggtgtagttaaacttttgagcttttaagaagttatacatataattctaaatatttgcttaattatttatttttacttagggagaatgactgcttaaaggttgagtcttcacattttggatagccaagaaccattaacaaatttctattgtttttgccattgatttgtgggtaccttttaatcctttattatcatttagttctttgtgtcccagagtaagttctcatttagttctatttgggtatttgtttttgtgctcatatctcttactgttggctatacttcatagtatgttttaatatctggtcaagcaagtttatttttttttttgaggttgatttagctgttggttagcctttattttagcatgaacattgtaggctgtttattgaattctttaaagaatcaaactggcaatttgagattgcattacatttatagattaattttggtggagaaatgttattctatttgtggattgttttggttcttctagatagatgatgatgtcatcagcagcagtgacagttttctctctttcttttcaaatgttacactcttattttttacagtgttggccagtctggcactgtgctagacagcatggtcatatttgttgacatagggaaaggcttttgaagtctctattttatatttgttatacgtttttgatatatatatataacctttgctaaattaaggaaactcccttctattccaggtttgcatagattaaaaaaattattaagtaggttcttcttttgtccagttgttttcctgcttctatcaagataaccacctgagttttttcttttagcctttaataattaacaacaaaaaaacactgttggatttgattagtcagtattttatttaggctgtaactttatagcattgttatctggttttagattcaatactagcctgataaaaatgaccgtagcttttgttctttttaactttctgaaacaacttgtataagataagaatagaatgtttcttaaaagcttagtagaatccacctattaaaaaaaggtctcatcacggagttcgttttgttttactttgttgggagaagagcattgccatttcagttgctttaatcttttgatctgtttttcaacctgttttctttcaatctattcaaatcctctttatttcttctgataattttgtcatttctcttcttttggatcttctttgtctttttcttgatgaatcttactagaattttatctaggctattaatatttaccaagaaacagcttttggttttgttatcttcttaattgttcatttggactagattttcattgatttctgtcctttattatttctttcctttttatttatttggcttttctttgttaggcttttcttttttttcaccttcttatttctggtaaatgtttaaagccatatattttcctcaagttcttccttggctctaacatatattttctaaatgtttcctgatttttattgatttcctttttaacgtaagggttattaagttatattttttttagtttccaaatttgaatatttataaaaattattgattcctgagttcattgtattatatcagaacataatctgtatgcccttgtgcctaccacatggtttagtaatataaatgtttagggtatgtgagaaaaaaaatgtatccccgtccattgggatgtatttctttgacctaaggaagtgtaggtcattgcttttaggactttcttttttaatataagtattttgtaattggaaccttctcttttttttttttttggcggggagatggagtctcactctgtcacccaggctggcgtgcagtggcgccatcttggctcactgcaagccccgcctcccaggttcacgccattctcttgcctcagcctcccaagtagctgggactacatgcgtccgccaccacacccggctaattttttgtatttttagtagacacggggtttcactgttagccaggatggtctcaatctcctgacatcgtgatccgcccacctcggcctcccaaactgctgggattacaggcgtgagccaccgtgcctggccgtaattggaaccttctgtttgtactgttgagaacttgaatttttttgcttatattttgtctgcttgatctatcagtagtctgaacagagttgattaagagtaattgttgatttttctctgacagttctgttaattgttgaatatattttaagacctgtttgaagtgggtagatatattttgctgtcattttcatcactatatagcctcttcttcatgtatttttaaatcccttttaatttgctttttttggggaaaaatttcagacctttaagaatgttgtaagaatgttacaaagaaaattattttgctcatcatatagctttaccaattaatattctttctttttcttttttttagtcttttttatttcctggtaaatgtttaaagctatatattttcctcttaaatctcccaggctgcagtgcagtgttgtgatcacagcttactgcagttttgagcccaaatgatcctcccacctcatttcccccagtagctgggactccgggcgcacaccacatgcctggctaattttttaatttttttgtagaaatagagtctcaccttgttgcccaggctggtcttgaacccttgggctcaagcaatcctcccacctcagcttctcaaagtgctcagatcacaggcatgagctactattctcagccttctctaacttaagaaggaagctcacttaggtcgttgcttttaggcctttgtattaggttggtggaaaagtaattgcgttttttgccattaaatgtggcaaaaccacaattacttctgcaccaacctaacataaggatttaaaactataaatttcccattaaacattactttagctgcatctattttttttcttatttattattattttttagacagagtctgactgttgcccaggctggagtgcaatggcaccaacatggctcactgcaaccttgacctcctgggctcaagtgatcctcccggcctccgtctcccgaatagcggtcttactcattttctacgtgtgtgttgagtgcaccatttgagagtaagtcacagtgttagtccattttgtgttgctctaaagaaatagctgagactaggtaatttataaagagaagaggtttaattggctcatggttctgcaggctttataggaagtgtggtgccagtatctggttggtttcttgtgaggcctcagggagcttttactcatggcagaaagtgaagtgggagtaggcatgtcacatggggagagagaagaggaggacccaggctccgttaaataaccagcattcctagctctcaagtgagctgacagaccaagaacttactttattactacagggagggcgccaagccattcctagggatcctcctcccccatgatccagacaccttccttcaggccccacctccaataaagggggtcactttttttttttttttttttttttttaagacggagtctcggccctgtcgcccaggctggagtgcagtggtgcaatcttggctcacggcaacctctgcctccggggttcaagtgattctcctgcctcagtcttccgagtagctgggattacaggcgcctggctaatttttttgaatttttagtagagacggggtttcaccatgttggtcaggctggtcttgaactcctgacctcaggtgatctccccaccgcagcctcccaaagtgcaaggattacaggtgtgagccaccgcacccagccagcaatcacattttaacttgagatttggaggggacaaacatccaaaccatttaagtcacagcactttactccgcagtgtgaataacacaggcattctcctacataatcacagtacagttatcatactctggaaattgaatatcatctaatatactttccatacccagattttcttagatttcccaatgatatttcttactgtcctccctttagccttcctctttctccattcaggattctaccattacatttcattttcatgtctcttcagtctctctttagctttgtttttctttcttgatgttgccacttttaggaggccaggccagttgttttgtgaaagatctgttctctttgatatgtttcattttggatttgtttcattgtttttgcatgaatggattcaggctaaacatttttgggcaggactgtttattgtattacctagtgatgtgttcttttcagtccatcatctggaggcacctgatggcagttttcccaatattgcgaaattaagtttgattattttgttaaggtagtgtccaccagatctctccattttaaagacatccttttctctaattactcagtggactgtagagtgatgctttgaaactgaataactaacactccctaactcagtgatttagcacccgttgattttttttttttgcctgaatcaaatattattatagtagttttaaatggtgattttccatttctattcttttgttagctgccattcttctataattttgtctttatattttactgggtgttaagattgctattccagctttcctttgtcttttacaccttttcccattcttttatttttttccatccctttttgtcctgttttccaatagatggatagaattttctttctctggtttaaaggttatacatttgtgtgtgtgtgtgtattcttagccatttgcccttaaaacatagagatggttattcctgttgattaaaaaaactcagtaatgttactatcttctctttaataagataggtactttatttcattctgtgttcttgggtgaggtctcccctcacccagtcaagttgatgttaatctagaatttttagttttttaaattatcgatatactttctgtcttttcctttttttttcactctctctgtatttgtgctttccccctttactctctttcccttcattccttctttctcactttcttcttctatttttcactcttgggtagattatcttttagaaaacagcaagatattatataatttactttatattctctttccaaatgattaaagtaataattaaaaatttttgatatgtgtgtatgcaaggataggaatcctcttgtaagtggaagaactctaccacatgcatgagtcattagtgtgttaaacactgggaagtggctttaggtccagctgggtgctctgaagaaggtaggtttcttcagttctttatgttaactgtctccttaccttaaaaaaggagtgaagaatactgactgcagaggttttgtgaggattccggtaacacagaagcatagaactggaaaagaatattaatatttgccaaaaaaaaaaaaagttaagtggagagaaactcttaaaatgtcattgattagaaagtaaggatttaaataaaaagttaaacaggttgatttcagatctagctctcagtagaatatgatgttagaatggaccttcggtaggccttatgcatcatctattaatattttgttccgtttcagtgtagcaaaagaagaaaaatactcttttttgtttttctggcccaggattcaattcacatggcacattgggtttcattgtcacatctctttagcgtctttttttttttttttttttttgagatgctcttgcactgtcgcccaggctggagggcagtggcgcagtcatggctcactgcagcctgtacctccgaggggtcaagtgatcctcctgtctcgggctcctgggtagctgggactacaggtgtgtaccaccatgcccagctaatttttaaatttgtagaaacagagtctttctatgttactcaagctggtcttgaactcctgggcccaagagatcctcctgcctcggcctctcaaggtgttgagattataggtgtgagccaccatgcctggccttctttgtgtcttttaatatagaacaattcctcagtcttaacatagacatttttgatgaataacgactattttgtctaacatctcccactttaggttatattttatttcagtattgaccttgttccaaggcactaccattatgaaacatggagactcatgatttaatatggtattaatgtttaaattcttatattttcctatgggtagaatacttggttcacggcggaatggaaacataaataataggctattttgggtatacgtcctacatgtaggattgatgttcagtatttgacttgaagacttttattgtctttttaaaaagtatgggcaaaagaaggggagaggtgggaaggggatttagaagtcttctatcctagatctcatcagaatgacagaaacagtacacctaacagctgtgaccacttgttcaatttagttgccatttttatcccactggtcagatgttttaattttcatttgaacatttaaagaaaggttgaagtcttaagatgtcagctgtgtgtaagtagtagactgtccaactgcagataaacagtagtttttaacccttcactgcccaagttgtacctgtgttgcctgattatgatgtttttattttgtggctatctgtaaaatcaagttttcaaagtgtatttctagaataaataaaacttcatagaaacattacaatggatttagagcaatgtatatatgctaaatcactcttttcaggcttaataattggagaagaatatttctagtcttttattattgtttcataatttaaatgctatttgaggagtatagttaaacttgaacagagtactttggaagccagtttttttcccttcctccttcttaatcagaagctgtttagttttactatggctatatgtggtcctcctagttttgtaataaggctggtgtaatttcaggaacctttttgtttaagagatcaggacattgaaaaccagagagggctaaactcaacttgagtcctgactctttgctgattaagtgctagttctgactcgtagaaggatcagtcatgtgggtttgcctggcaggcttaccctaagtaaaatataaattcctggttatcactaaggggggaaaatatctgaaaattcggtttttcaatgaagagtactttgtgttagacatagctgtctgtctcactagcaatgggatttccagggtagagtattaaagatatcatgagtcttttgcagctaagcagcttatgaggtcagtcaaggaataaaaaaataagccagcttcagaagagtctttctttgttattagaaaaattgtgagaggctatagaattatgtcaagatgctgagaaaactatagtttctaaatttttaaccaaaagggtatcctctttagtagtaaggaaataataatgagaaaaaatgcttaagttcagttgcagacattgcatatcttgaggaaaaaagaggacacttctaaaattaaaatatagcccataacatttttattttttatgaattggattactcattttgaatgttgccttctgctaagttactcctttagcatgaattaactgtattctttttcagtcatattcctaaatgttagatgaaattcatttaatgttttgaactttatatttttagctatactataaagattacacagctgttgcttggagatgtatgtgaattacttggagcagtaggatcatgatttgggtcctatgccagctgatagtcagctgctacaaatgaagagatcctaacacatgggaataaaaattcttaaagggtatgaatatcatattttaaaatgttctgggtagtgcctgcccttgttttaggcacctaactatttgtcatgacataccacatttcatgattaggagactggctttaggttttctgttggagagctgagagtattctcccctcattttgatagcaattagagtaactgggaccagctactcctgtcaagataaattgcattaccaacttcagcttttgtatttcatttgataattttttttttttttgagacagagtctcgctctgttgcccaggctagagtgcaatggcgtaatctcagctcactgcaacctccgcctcccgtgttcaagcgattctcctgcctcagcctcctgagtagctgggatcacaggtgcgtgccaccatgcctggctaatttttgtatttttagtagagccggggtttcaccatgttggtcaggctggtctcgaactcctgaccttgtgatccacctgccttggcctcccaaagtgctgggattgcaggcttgagccaccgcgcctgggctgattaaaatttacctaaatacttagattcttcatgccatggttgatttagtagtgttaagattgagttgctcccaagctacaattaaatagctctgatactgtctgtgttttctgtatacctattttttcttgattgtattaattctgtgtttattgagagcatatgtagtttctaaccttcattgattatgctcttagcaaagctgtctataaagtattttgtacttatagcaaagatgtcataaagagaaacttcaaatgcagaattgcgtattattttcattgaaagtgatctctactaaagaaagtttaaaaagattaaaatagtggttatccatggttcctgctgggcattatgttccatttactaatttgacattcagcagatgcttgaatatgcttcagatattaatattgtagatagaggtgatgcagttctctacactggtaagtgtatagtctaatcaacaaatcatcgtaatagagtgaggatcatgccgtggtaggagtatccctgcagttctgtggcgcttggagacctccctcctagagggatgtttttggaagaaggcagtctgagtagactacttggatgtgaactgggagatacaattgagcagtaacaattaagaaggtgatggaggaaaggaaggattttcttatttgacaatcaggaatagcatgattaaatgagtgaagagaagagagactgttgccccagtgggaatgataggatttaatagattgttgtaatgatgtaatttcattgaaatttccccaaaactgagactttgcgcagtgtttgaagatgtccttactcaaattagaagtaaaatatattgcatgtgcctgtcactttcacatccatttaagaacagtttgtccttaaactttgaatctagcagtgttccagagaagcaatgtgaatggttctcaagataacaagatcatctctgaatttctagcctcatgccaacatttatggcaggcacactcgtttcaccttcttcctaaggcagattgaaaagggaatttttatagctgaaaatcatgtaagaataccaagtgtaatctcaaggcccatcaatttggttacttcttcagtaggttccagtagtctttgcaagcaactgttgattgttaataactacactttattgatattatcagaaaagcacaacattaaggccttctagtcaagcagctttaaaaaattgtaataattactattctaccttgttttaaccttttgtagaagcacaggacaataagttccagaatcttttgaatgtcatgcggttcgtaattagctgaagacgaatgataaaagtgggctgctgtttttcagattacggccagtaattctctttggttatggctgtgctaaaattactttctgaacacattgccaaagtgtgtgaacaaaacatcatatgctagtgattcccaaatcactcttagctttcatcatatttgttctgttggtagtgtcaactgcgtgacactgcattctatacttacttttccacccctctcaaagcataaagttttggtatttaccttaacattcagtcttcctcttgtcacaaagactctttggtacttctgggttctcatactagggcaccccccacccccccccccccccacacacacacacacaggggcaggctgcagtgtgcaagcatatggagcacactgtagatgacaaaagtggcatatctacctggaagataattctactgaaagatttatggagagaacattatattaagataggcagtgtagtggggtgaattataaaatactcattcaattttaatgtgaactatgaaactcctgagaaatctgtttgctcttcagggtggctagacgtctttagtctgtgtgtggggggaaggtctactatgtgccatctcttatcaatcttttctggcatttttgttatatgatagttatagctatatggtagttatagctagtctagtccttggaactaaactattttgaacttcgtttgatatagcaaatttgtgccaggggtcatctggcatgtcatgtttaggggccgtattcctcatctgtgtggaggaactagatgtggagagagaaagagaaataaatatgtttccccagctgtagtggacaggctgtttttcaggacagaattttacaacttttataaagtagttgtgagcagaagttggcagctggcaaatgttgtatgtatttgccaaactataaatatctggtctgcagccacaaatgtccaagaaaggctcttggaaaattaagggtttccttaggataatagtaaaaccaggctttcctcaagttgttatatttaagcataagaagcagcagttcataattggtttagttatattcatttatgttttatttcaagttgacttttaatccaaatactaaaatataacaaaagacaatttctgaggacttgaaaagtacataaaccttaagtcacatatagtagcagttaacttaaattgaaacaagaagttagaattgtatttcagttcatagagatgtactaaacatcgcggattctcagattgacagataaccactgtagcctagaatacccaccacataaaatgagtatccagggaagagtaaaaatgaagagagcctcattgggatgcacttcataggaagttcaccaggctcacttgctggatagggaattggtcacgttcactccccacatatcagactggcagaatgggaagtttagattcttgtattggtcagaggatggctcgaggcatgtgggtctttgggattgtttgttaacacatcaaatgttaaaggtgtactgtttggtagtgttgagctcacttgtggttctagcagatagctagatttatttatttgcaatctccatttaccaaaatactgttgctgctcacagtaatagtaatgagtaacatcgctgagtacctaacatgtgccagatacttgaatgcttcatgtacatggttttattctcacaacagatccatgaggtattactgttattattatactctagaaatcagggaacagaggcttaatgaggctaaataaaaacttgtttaaggtgacgcaactaggaaatgacagagccagaattgtaattcacttaggtttaacttcagattgcctcctcttaatccccatgctctggtgcttctaaagagaccaacactctgccctgaataatttagtactgatgttaaacatttcagaaagacttttgaagcccttttttttttttttttttttttttttgagacggagtctgtctctgtcgcccaggctggagtgcagtgacgcgatctcggctcactgcagcctccgcctcccgggttcaggcagttctcctgcctcagcctcccaagtagctgggactacaggcgcctgccatcatgcctggctaatttttgtatttttggtagagacagggtttcaccatgttggccaggatggtcttgatctcctgacctcgtgatccgcccaccttggactcccaaagttctgggattccgggcatgagccaccacacccgactgttttttttttttttttaaacgtagtttcgctcttgtcgcccaggctggagtgcaatggcgcagtctcggctcactgcaacctccacctccggggttcaagcgattctcctgcctcagcctcctgagtagctgggattacaggcatcaccaccacgcccttctaatttttgtatttttagtaaagacagggtttcaccatgttagccagactggtctcgaactcctgacctcagatgatccccctgccttggcctcccaaagggctgggattacaggcatgagccaccgcgcctggcctgaagctttgttgaggtatagaatgtgtgagaaaaaaatgtatagtccatgtgccaatgattctgataacacaaaatatgcttagcaacaattctataataaaatcatcattgtcatctggtcttaacttaaaaagtgttatagcattaataagctgtctttaatagttcacctgaaaataagaccaatgaagccaatggaaaagtaaatgtattttataaaagattctaattgaactattcctaactagattctcctttgcagaaattgtaggatattatattttctaggtaatatttagatgcttattcttgctcaggaagtagattatggggcttctaggtggagaggctggcggtagaaaggctgttttggaggctgttgtaatctaggaaagaaagaatgcattaatgtagtggcacagtggaacagagtggaggaggtgttagtagagatgtttgggtggtagaattgacagggctggagactgacatagggatgttggcagaggagtcatctagggcactccagtttctagctcgggccagacagtatggttttggtatccttcatctgggaaagggaatgggggggagaaaaataggttgtattttgaggtatgtatgatatctaagtagaaacacataataggcagctgtttatgtgagtttgttgctcaggagagaagtatggactgtaaatacctatttgccttttttcttttttcttttttctttttttttgagacaggctagagtgcagtggtgcgatctcagctcactggaacctccacctcccgggctcaagtgatttttgagcctcagcctcctgagtaggtgtgcgccatcatgcccgggtaatttttgtattttttagttgagacagcgtctcaccatgttggctgagcaggtgtcgaactcctggcctcaagtgattcggtctcccaaagtgctgggattataggcgtgagccaccacgcctggcccctgtttggcactttttaacaggtattagttgaaatggtgaatttggaatctgtgtttaaaccttggtgctgtgtgtgtgtgtgtgtgtgtgtgtgtgtgtgtgtgtgtgtgtgtgtgttgagtgatgaggggaggcaattagtcaccacagcatctaccaaattttattatcatttatatgttgtttctcaacccatttgatttaaaattcttagaatacttacttgaatgaatatggagaaataaaacatgacattcttttcccctctaatgaagtctgtgcataattagttcttttattagaaaaagctgcacggggagtgcacacatgcttaattttcccttcaacattttattatgaaaaatttcaagaatacagaatggttgaatttttctgttaacatatgtatacccacaatctagagcctactattaatattaacattttactatatttgctttatcacacatctgtctctccatccttctctgtatacagttggccccctatgggtttcatatccacagataaaaaatattaaaaaacaatgcaacaataatacgcataaaaatacaatgcagtataacaactatttacattgtattaggtattataagtaatccagagatttaaagtataccagaggatgtgtataggttatatgtaaatactataccattttatgtaagggacttgagtattagcagattttaatatctgtgggagtcctgcagccagttcctccgaggatactgagggctgactataatttatttatttatttagatgcatttctaaataaaaagtaagttgtagtcagcacactattgcctaagtatgtcagtatttatatcgttacctagggttcaataatgcttatatatattttttccttttgtgatatatatatagcggaatgcacagattattgggaaagttttaacagatgcaaacgtgtaactcaaactcctttcaagattacagaatgttctgggggtgatggcaaaattccctgaagctccttcccatgtcactcctcgctttgcctcccctgctgcccatactgttttgtttctactatagattagcttttttttcctgttccagaattcatctaggaaccgtaaaatatatactcttgtgtaaggctttcttcacagcataatgtttttgcaatttatcatgtcatgtatatcagttgtttgcttttcttgttttctgatgaatctttgggtgaatacaccacaatttattcatcgtcttgtcgatggatacctgggctgtttccagttttgagcaatacctaacattgaaattgacttgtcagagggtaggtgtttgtttaattctgtaagaaactgccaagttttttcctttttttttttttttttttttttgacacagacttgctctattgccaggctggagtgcagtggcacgacctcggctcactgcaacctccgcctcccatgttcaggcgattctgcctcagcctcctgagtagctgggactacaggcatgcgccaccaagcccagctaatttttgtatttttagtcgagacggcgtttcaccgtgttggccaggctggtctcaatctcctgacttcgtgatccgtccaccttggcctcccaaagtgttgggattacaggcgtgagccactatgcccggccccaacttttctttcaaagtttgttgaaccattttatactctcaccattgctgtgtgggagttagggttaaaccatgttttagccatcctgctggttatgtagtggcatcttattgtgattttaactggcgtttccctgatgattaatgatttaacacaaatttactgagcatttatatatcatgttttgtgacatctgttcaacttatttgcccaatgttttattggttgttggagtttcagaaatgttggattcatgtcagatttatgtttcgtagatttttttcttcatctgtgccttgcctatgtatgcattctctcccttttcccctcctccctctctttcttcctgtaacagctttattgagagaaaatttatatactctatgcattttcttaaaagtgtctttttatgggagaaaattttaatttgccttttttccctgtaattattgagaagagcttttgccttcctgtgatgatttttctcctaggtttccttctccaagtttatgggtctagcttttaggtttaaatcgatatatcttgaataatttttttgtatggtgtgaggtatgcattgagattttttttctgcatgcatatccagttgttccagcaccacttattgaaaagattatcttttctccactgacgtctttttaaaaaattagttgtctttatatgtgttgatttctggactctgtcctgtttcattgatatatttgtctatttttgaggccactaccataccctcttaattgctgtagctttgtaatcttgaaatcagatactattagtcttctatcattattctttttttgttgttgttttggatattctgtgctctttgaatttccatatgaatattataattagtttgtcaatttctacaaaaatggcttgatgggattttcattgtgattgcatttaacttgtagattaatttaggagagacttgacatcttaacaatattgaggcttccaatccatgaacattgtatatgtttaagttttttaaaatttctcttaccagtgttttttagttttcagcataaagattttacgcatgatattatgaagattttcttttttgggtgctattgcaaatgcagtttttaaaactttatttttctggtttgttgttgctactatataaaaaatgcaactgattttttaaattaaacttgaatcctgtgaccttgctaaattcacttactaatttgctgctttgtagattccttaggattttccataagcagcaattcgtcatctgcaagtagaggctattttccctttctgtcctttcttttttttccttttctttctttgccttagtgcaaaggctaggaccaccaatacaatgttgaatagaagtggttaatccttgccttctacctgaccttagggggaaggagttcagtatttcaaaattaagtatgatgttctagatattttaatatatgatctatatcacattaggggaaatcacttctcttcctacttttctgagagtttttgtcaagacagatgttgcattttatccctgctttttctgtcccccagccaaccccacccccacctcttttttttttgagatggtcagcctcctgagtagctgggtctacaggcacgtgccaccacgcctggctactttttgtatttttagtagagacagggtttcaccatgttggccaggctggtctcgaactcctgccctcaagtggttcgcctgccttggcttctcacagtgctgggataacgggtgagccaccatgctcggcctttttctgcctcttttgcattacgttgttcttctcctttattctgttacggtgaattaccttgattttcagatgttaaaccaatcttgcattcctggaataaaccctactttgtcatgatgtgttagtattttaatattgccaactttgatactattttgttaagaaattttgtgtattatttaaggataatatgattttctttatttgtaatatctttgtgtggctttcatgttgggatcacgctggtctcatgaatcaagctggaaatgttttcttctttatttttttgagagtttatataatatcagggctgttttttcctgagctatttgacacaattcactagtgaaaccatgtgcctggagttttgtttgtgaggagcttcatatatcaatttctttcttccttttccctctacttttcccttttccttccccctcctctcccctcttttcttccccctccttctcctctttttcttccttttttttttttttttttgagcttgtctcccaggctggagtgcagtggtgcaacctcggctcactgcagcctccgccttccgggttcaaacgattcttatgcctcagccttgagttccttggctcagctgatcctccagcctcatcttcccaagtagctgggactacgggtgcacgcagccatgcctggccaatttttaaaattttttatagagttaagagtctgaccttgttgcccaggctggtctcaagctcctgggctcaaacagttcttccaccttggcctcccaaaatgctgagattacaggcgtgagccgccatgcccattcttttctaacttaagaacgaagctcaagtctttgcttttaggcctttcttttctcatatatgcattcacaactataaatttcccattcgtcactgctttagctgcatctcatgatttttttcttatttatttattattattttttacacagggtctcactctgtctcctaggctggagtgcagtggtacagacatgcttcactgcagcctcagcctcctgggctcaagcaattctcccacctcagctttctgggtagctgggactacaggtgcacaccaccacgcccggctaattttgtatttttttagtagagacaggatttctccatgttggtcaggttggtctcgaactcccgacctcaggtgatccacctgcctcggcctcccaaagtgctgggattataggcatgagccactgcacctgggcaatttattgaatttttttttatggcccagcatatcatctatcttggtgattatagatgtacttgaaaagaatgtgtattctgcagttattatgtatagtgtctttaaaatatcaaatgagtcaaagtggttaataaccttcatttattctatgtgcttgcaaatttttttgtgtacttctgttgtctagttttatcagtttaagggggtgttaaaatttacaactaatactgtgaaaatgtctttttctctttctctggttttttttttttttttttttttttttgagacagggtatcactccgtcgcccagatgggagtgcagtggcatgagctcagcttgctgcaacctctgcctctcaggctcaagcgattctcctgcttcagcctcctgagtagctgggattataggcacacgccactactgcctggctaatttttgtatttttagtagagatatggtttcaccatgttggccaggatggtcttgaactcctgacctcaaatgatccacctgcctcagcctctcaaagtgctgagatttttccctttaattctgtcagtttttgctttatgtatttagagatggtgattaggtggctgtacattcaggattgttacttgtttctgatgaattgaccattttataattttgaaaaattcctctgcttaaaagtctactttatctgatactaatgtgtcaattctgatattactatatgggtactgttttcatgacatataatattttatttactttgttcctttttttatgttactttgaagatcttgttgcttaccaatgtttatttactttgaacctacctgctttctgtatatttaaagtgcatctctgtgggcagcatgtaattgattctttattatctaatgtctgccttttaatgagagtgtttagtcattaacatttcatgtaattatggagaggttggacttcagtctaccattttaatatttgtattctgtttgtcccttctgttttcagtcctttgttattccttttctgcctttttgggggataaattgaatacctttagaattctattttaatttttctactgacttttttgctatacctctttgcattttctctctcctgttagttattgctttcacttttaccatttacttagagttaatgttgtagcactttgcataaaatgtagaaaccttgcaactctctaggtttgttccccccagtttgttttgctgtatttgtctgatatatcctatctgcataatttgaaacttcttaagataacgttacaagttttaccttaaaagaacacagtccaatttatatttatcctgtatttaccttttttgtttttgaaacagagtcttgctctgtcgcccaggcttgtgtgcagtggcacaatcttggctcactgcaacctccatctcccgggttcaagcagtgcttgtgtcttagcctcccaaatagctgggattacaggtgtgcaccaccacacctggctaatttttgtatttttagtggagatggcgtttcaccatgtttgccaggctggtcttgaacccctggcctcaagtgatctgcctgccttggcctcccaaagtgctgggattacaggtgcgagccactgtgcccggcctacatttaccatttttgatgctcttcatttcttttctttctttcttttcttttttttttttgagatggaggtttgctcttgttgcccaggctggagtgcagtggtgcaatctgggctcactgcaacctccacctcccaggtacaagtgattctcctgacttagcctcccaggtagctcagattacaggcatgcgccaccatgcctggctaactttttttgtatttagtagagacagggtttcaccatgttaggctggtcatgaactcctgacctcaggtgatccacccgcctctgcttcccaaaatgctgggattacaggcatgtgccactgcgcccagcctaatgctcttcatttcttacagactatttgagtgtctggtaccattttctttcaacttgaataattctctctctctttttttttttttttttttgatacagggtcttcctctgtcgcccagtctggagtgcaatggcgcgatcttggctcactgcaactccacctcctggttcaagcaattctcccacctcagcctcctgagtagctgggattacaggcacccgccatcatgcctggctagtttttgtatttttgtagagatgaggtttcaccatgttggccaggctagtcttgaacttctgacctcaggtgatctgctcgcctcagcctcccaaagtgctgagattacaggtgtgagccacctcgcctggcctcttttttcttaaaatatctttatttgccttcatttttaaagaatattttccctggatgtggaattctagattggcagctttgtatttgagctctttaaagatgttgttttattgtctctgttctcttttgtttctgcagtacaatatgaagatgtctgtggtcatccaatttattgttcttctttatgtaaagtttcatttttctctagccatttcaagtatcttcgtcttcaactgtgatatacctacttgtggttgtttttagattgaatatgctttgctcttttttgcggagagtggggagttgtcccagactcttacacatattaatatgttagccccaatgatactgtcccacagatctgtataacttggttggactcaaaacagcaaattctgtcttttaggcagtgggtcatattttggttcagctcttttagttacttggaaactgccctacacatgagtagatcagggatcatccagagatttaggcagagtttatatacagaatttggggttccttcctgcccactggctcattttcctcccaggaatttcctctcattttgcagcagctatggattgccctgaactctatccttttatctttaagctagaaagtctgtgggggtttctgttggagttttagctctcccatgtagcacagaccaggaccagttgtcaggctaaaagctgtaaacatcagagaactctccccgtattattcctttcttaaaagagttgactcccttcttctcattctccagtgccttcctgcattagtccgttcttttcactgctataaataaatacctgagcttgggtaatgtataaagaacagaagtttaattggcttacggttccataggctttacaagaatcatgatgctggcttccggggaggcctcaggaaacttacagtcatggcggaaggcaaagggggagctggcacttcctgtggctggagcaggagcaagagagagagagggggggaagacaaccagatctcatgagaacttactatcaaaggaatagcaccaaggggatgttgctaaaccattcagaaaggacgaccctcattatcctgtcaccttgcaccaggccccacccccaacattggggattacagtgacatgacatttgggcagggacacagatccaaaccatacatttcatatagttgttctataaattttatccagagatgaggattgcttgagctcaggagttagagaccagccttggcaagatagggagatcccatctctaccaaaaattaaaaaaaaaaaaaaaattagctgggtgtggtggtgcgtgcctgtggtttgtcccagctacttgggaggctgaggtaggaggattgcttgggcctgggaggtagaggatgcagtgagcaccactgcactccagcctgggtgacggagtgaaaccctgtctcagaaaaaaattctttttaattttaatccagagtttatagttttatctatgggagggtcatttggaaagttggccattacttggccagaagcagaaccctccctgcttacattttgagaaaaatagattgagattctatagtattctgctttagtttttctttcttgatctcatatggtacttgtcttttgctgacactattcattcattgaaattaataaccttgcaaaataaaaatataagaagtcagtgtggctcaccctccaccctccactcccactccatctttcatcccgtttttatttccacgtctgtctaacttggctctgcctggtgcctttatagctaaaattagccacacttgatatttttaactctacggtgcttggaaagtattttgagaggctttgccatataacttcatgaaaataatgtgaggaaaagaagaactacaggaaacaggtgaaataatctattcagttactgagaaaagtttcttattaatgggagaatttattaagatagggaagtatgtgttgccaagtgaagtgttttcccacatttttcttttttttctgtgaccatttctagatgtctgtactttttgtgaactctcatgctgtgaatgacggtttaggtttgctggtgcactgggaattgatctttgaaaattacaagtccagttaaaaaaagatgggtggccagacgaagaatctgagccctgtgtgcctatatgtgtgctaaaagtcacggagcttatgaaatctgaggtaatcttggctttttttttttttttttttggtttttttcttgagacagagtctcgccctgttgcccaggctggagtacagtgatgcgatctcggctcactgcaacttccaccctcccaggcttcagcctcccaagtagctgggattacggcacgagacaccatggctggctaatttttgtatttttaatagagacagggtttcaccatgttggccaggctgttctcgaagtcctgatctcaaatgatccacccaccttggcctcccaaagtgctgggattacaggcgtgaattgcacccggcccaatcttaagtagtttaaggtcttggggtcaggcacgagggagtgaaggggtagtgtgttacttatagccacacaataaattacacaaagttttagtggcttaaaacgtcacatatttattacacagtttctgagggtcaggattctgggtttggcttaggtggttcctctagctcagggtctttcataaatgcagtcaaaatgttggccagggctgcagtctcaactgaagtcatcacggggggaggaggatctgcttctaagctcattcacattaatggattggatttagttgcatgccagctgttagactgagggcctcattttattcctgataattgtctcgtgtgggcctctccataaggtggtggcaagctagatggaagccagagtcacttcgtaaattaaccttggaagtgacattccatatatatatatatgtattttttttcccatattctgttcagtagaggtaagtctctgggcatgaatactaggaggtgtggagattattaatagctatttttttgttgttgatgagttgagggtgtggggaagaagaagaaggtataataaatttttatttcttacagtgtatacttagagtaggaaccagaatcacacagtagggtgagaaattttaaaagcaaagtttaccactaggaagctatgtgatgtcttacataggaagaacagcaaagcatctcaaataaaggaacataacaaaactttaaacattgaaaggttctttttctgtagttttaggttgaagttttatcttaattttctagtcaatatttttctacactgacttggatgaaaatatttataactgaaaatatattatttctttttacctattctttttgaaagatgtaaagacatattcttctaattggctaatagatttcaaagttcatgtgcgtcctgtaatgtgctaaactcatacattgtgtagtaacaaagttggagtagtttaaataaaataatggaacgatagctgctattctattcttcatgtttctgtgtgcatgtctgtgtgaatctctatctgtatctatagtttgatgtctaaaatgtttcccacagattttgtctttcatgtaattctttgaagaaagttgagattctatttgaaggaaactttccctggagtattaattttatgaataagtttcttcctactgccttaaaaaaatctgatattctagacatgtttttgttataggttaacattgtatcttcagtaatgaaacctttaaaataaaccttggttatttctaaaaagaacataaatttcagcaaataaattctttcctcttagcttcaaattaaatataacatgaagtataatgtggaaataatagaaaatatgtgaagaggtaattttgtggaactaatatagtttatagtcagaatctttctttttttagtagagtggttgcaagtccagacctggaagcagactggctgctttaagtcccatttctgcctctccctacagtatgtctttagtcaagttaattcacttcttgtgtctccatttcctatctgtaaaatggggatattaacggtacctaccacataaggttgttgaagaaataagcgaattaataaaggcaaagcacatagaaccatatatggcacttagtaagtactatatacatatccttattttttactattattagtagtattattagtatcaacactggctcagtaactgcttatgtcacttaattgtctctgggatttaggtctttcataacataaaccaagagatttggattctttataactgactaactggggagctgttagtctctattagatagtaattcactgataagatttttcctcattgataggattttttgtgcctacagttaaacaatactctgaaatatttatagacagttgtagagtgcattcttctgaaactgttggttttaatttttccaagtaacgtttgctttatctttgttaattagtctttcatattacaagaaagagcattgcttgaattttttctgtgctgcttagcagcaggctgtctttgtcattatgtggccagctagagttgcacacacagagcaggttcccaccctagataatctcagtcttactagtttgttaatatttctttcttttcttccttttttaagagagagtgtctcgctctgtcgcccaagctggaatgcagtggctcagtaatagctcactgtaaccttgcactcctgggctgaagtggtccttctacctcagcctcccaagtaggtgggactacaggtgcacaccattgtgcctggctaatttattttatttttcatatcttgtggagacagagtctcactttgttttgtccaggctgatctctaactcctgggctcaagtgatcttcctgccttggcttctcagagtgctgggattgcaggttagagccactgtatccagcctgttaatgtttctttttatttttttcggtctccagagcttttgtaagttttacaagtttctctgtctctcttatggttctaagaatatggaaattgtgcattctaattgtctttattattctctgtctccaggtatgttgcagatagggacaggttctttttaccgcctgagtcacatttattgaattttgcagattctatacttaagtaagaggaattcatgattgaagtcaaatagtaccataagaattattgagaaaagattactccctaaaaagattactccctattgaaaaaaagattactcctaagcacacatgactacatgtggtaggtacattctctaaagtactttttctacatactattgtatttaacctttaacgttttcccctattttaagagattttttcatcctgcagaatgacccaatagatttgctgaaatgttttcttttaaatcatgccatcttgcttttgatggtcatttagactgaccattttctttggtgaatctggatcagttatactagactgcatttgtactttgcacatgaatataggtgttgtaggacaaagagtttaatagtgccatattgatgtttttaccttttatttattattctatttctcagaaagatgaatgaaacataagtgtggtctttagaggaagttttgcctttctgcatatttggtgctgctgcattccagatggttttcttgccttgcagaaaataactttgtaggctgccgttatttgcatctgctgtttgtcagtggcattcacagtgtttttgttgtattcctcaatctctcagccattgtggcagaaccgaattgtaactagcaagcaaattttttctcctgattcttagcaagattttttctttctttttttaatggaatggcaaaggagataagtttctaatttggtctactggtgatagtggttagttagttgaaatcaagtttggtatccttaaaaatgacatataactttaaatatttatttttcatttatttttggaagcttaaacagatttttaagttttttaaaaagttttttgagatggggtcttaactctgtcacccaggttggagtgcagtggcacaatcttggcccaaggctccagtaatcctcccacctcagcctcctgaatagctgggaccacacgtgcctgccaccctgcccagctaagttttgcactttttgtagaggtggggttttgttatgttgcccaggctggtcttgaactcctgggctccagcaatccacctgcctcagcctcccaaagtgctgggattacaggtgtgagccactgtgcctggcccagaaatttactttctcacagctctgaaaagtctgagcttgatgtgctggcagggctggtgctggtttcctctgaggcctgtctccttggcttgcagatggccgccctcttgctgcctcttcatatggatgttcctctgtgtgcttgctcctgtggtgcctctcactctttaaatactctagtctctgttatatgtgttaattctctagtcttttgctgtaaagctttttctttagtgttagtctggtgatgagaactctatattgtttttcttcctaaagcatgccccagcagataatgacgtttcagctttggtttctttgaagtggagagagaacttagacatatgcaaagcattctgaatacagaattctgttagacttgtatgatctttttagtgacctaccttgataaagacttttcaaaacatttaacttaatttttatagtatttctgtatactcacatatcaatttatataatatttagattgcagacttacaagtacaattataatgaatacatttggtcacagacagctgattctttttgttttttgggtttttttttttttttttgagacagagtctcactctgtcatgcaggctggagtgcagtgacatgatcatgactcactgtggcctcgaactcctggctcaagtgatcctcccacctcagcctcccaagtacttaagactacaggcatgtgccattgtgcccagctgatttttaagttttttcatttctgtagaggtgggggtcttgctatgttgcccaggctgcacagctgattctcagcctctgggagcagaacagtgcagagtgatgagttgaggagctctgagcatttagagtgctagtggtatggtttgtggatgggaaggggaggagtggagagattgtccatttgggcattggaggtcagaaaaggaagctttcactgtcgtatttcagggctcttactccaagtttacagatgtttactttttatacttagtatctctcaccacttttcaggccacttctctcacaaatctttaattgggagagagacagtgccagtccttcctgggtttaacatctgatattggtagagatgatatgcacaatatattgtgagagcacaggaaataagttcttgttttgggggagtgtaaagctttcaagaagaggtgagtttctgaattctcaaggacagatcagaattagaaggtatctgggaagatgaaaatggggcagataggtcaggaagaggggaaggcgtgttattgctgtagttttagactattttgaacaccagtgtgctcccagcactaggatggtagaataatgtctggcacacattacatgcttaataagtattttaaagaaaaaataaatgttgaggaagacagaggcccaattatagtggaccctgtacgtgatgctgtgaagccagagtttatcctgaaatgagtctttgaggtatcttaaccagaagagtggcatgatcagattttatttataaaaatatccctctggaagcattgagagggaagaataagattgcagtgagagatacaggtaaggagatttttgaaataagccagttgaggaactagggagggcccaaattaaagcttttgagcattgagcattgtgaacaaagggtactgatgcattgtaggagtcttttggaaatagaattgacagggcttggtgactgtgtgtgtggagcagtgagggtcacggaggattctggagtgaaccctacatttgtaggatgttgtgatttcagagtggtggtgttggtgctatggactaggaaaaagctcgtctagtgcttaacacagtatatagcacatgctatttattgttcactttcctatttgagaaaatatgtttattattcgtatctgaatgcacaatctttttttttttttttatatattttggagacagagtctcactttgtcacccaggctggagtgcagtggcgtactgttggctcacggcaacctctgcctcccaggttcaagcgaatctcatgtctcagcctcccaagtagctgggactacaggcacgaggcaccatgcctggctaatttttggtatttttagtagagatgggattttgccatgttggccaggctggtctcgaactcctgacctcaggtgatccactcacctcagcctctcaatgtgctgggattacaggtgtgagccaccgcgcctggcccacaatcttatataactgagctggtctcgcccacttttactatatgccaggacctgtgttataaatgtgaacaatatttgtggaatcgagttgaaacctaacacaattgtgtttactctgagcctctttaatctttgaaatgtcataatattgtagacatagcccaataaattgatatcagagaataagatggaaatcctgaatttaaaattccaaagtttttagtgttatttcttagtattttatcttctgaataaatgacatcttagttcatagaatgactcagtatcataacagacgtgatgctaattctctttctttaggatatattctcttaagaggctgatagtatagtagaggttattgtgcacatgttgataactcactacagactaggctctgtgctgcacataggggattcaagaagggatgacatattttccattttcaaagatgatgaagacatgtttctgaataagtgagttgggccatgactttcagtggtggtacattttaatactttacagcatatcacatactaactgggagtatcattaaaatgctaggtgcatccataatttttttcctccttttgattgcctcctcttttgcatcctatctatctacagatcctttcttctgtacttgcaacatacatccccagtgctttcctctccctcctttttttctcgtctggtatttgtgcttctgttcttgattttgctgccactttcttgaattttttctctacatagtagctacagttatctttaaaatgtaggccgtgttctgcttaaagcccttcagtggcttcccagtatacacttggagtaaaactcaagtctttcccatggcttaaatattgcctcctcagagagtcttgtttgttgagagattaatgaatactctgagaactcggaggaaggagcaattagttctggctttgggaaccacagagagaattaataagaggaatagtatttgatccaggtcttgatgagtaggattttgttagattacagtaagtgctgaaaaagcatttaaagagtgcctactgtgtgctacatattgtcatattcatgctttctttgacaagtaatgattaataagtgatatctttgaaaagaaattgatatttgttaacaacttggttttactgcaatctcaataaatagtatatacaagactagcctagcaatccttagtctgcttaaataccaggaagcgcttcattcactggtacctgtgagaatagaacttggcaagcgttctcatcacatatacctgctcagtcaatttgacaatattcagaaatgaactacctgacaaaactacaaaattgtaatttggtgtcttggtttttagaccttttttcccttcttttaaaccagctatctctagccttttaatgccatattttattttaaaataccaaaattaacatcagaagatgaagtataattaactatatataccaattgcactgggtcataaaaatgaagtttttgtttataactaatttagtgcctgatcttcacaaaagtacagcttggtaatttactaatttaatcttttgcgtagtcgcttcactgactcagaatcttgaagactttgactgggcattcattttgaggcttgtcatgatgcagataggatggtagtaaaatgatgcattgctctagtatttgttcaccagtgtccatgcagcaatactgtctcttgtggctgaggccagccatattttaaagcaggcccttggctaagcatttcactggaccagggagaaacggggagaaaacaaaatctgcagataatagagggaattgtctagaaagctcaagttattgcatttaatgatttgtctttgttttgaaatattcctatttttagattccagaaatatcattttaaataagttatgtttgtccccaccaccgccccatcgcatacctgtcaagtagggcaaaatattggcagccagttctgtattgatttatctagtctgcttttgatgttcatggctccatgaagtctaaaactgcttaccaccaatttattttgtgcatcacacctgtaatcggagttagtatgtgagtagcttttttccttacttcaacagtctcttctcgagatttcaccagctgggtgtccaataattcagttcactctgacactgtgcagagttaatgtagaccccataggttaagcgctcagttccataaggctgctcctacttcagataccagctgcaaatggagtgcccaggctacccacatctgcttagccaactgcaaatactgaggttcctgaaaccacccaacccacatttgataatttgctagaatgattcccaaaactcaggaaagcgcttcactattacccatttattataaaggatataatttaggaatagccaaatggaagagaggcatagggtaaggtgtgagggtgcgggggttgagtcttttcctgccctttccaagtgcgactctcccagcaccttcatatgttgatcaacctggaagccctctgaccctgtcattcagggtttttatggaagtttcattacataagcatgatcgatgaaatcattggccattgtgattgaactcgatctctagtccgtctcccttccccagttgttggcggggggcagtaatgaggtgggaagtgtgggcctgagttccagccttccagtcatgccatgatatttccggccacttggccccatctgaagccatctagaagccccttcagccaagaatcatctcattagtataccaaagacactttgaggagccctgtacccaggaccccaggccaaatacagttgacccttgaacagtagagttataaaaggtgagtagaggggtggaggaggttagggactctggcccccaagtgcaacttttcttttgtttttctttcttttttttctttttttttgagacagagtctcactctgtcgcccaggctggagtgtagtggcatgatctcggctcactgcaacctccatctcctgggttcaagcgattcttgtgcttcagccactcgagtagctgggaccacaggtgcacgtcaccatgcctggctaatttttgtatctttagtagagatgcagtttcactatgttggccaggctggtctcctgacctcaaatgatctgcctgccttggcctcccaaagtgctgagtttacaggcacgagccactgtgcctggcccaagtgcaacttttgaatcccccataacttaactaataatagtttactgttgagtagaagctttatagatatccataaacagttgatcaacacgttttgttatgttatgtgtattttataccatattctttttgagacggagtttcgctcttcttgcctaggctggagtgtcatggcgcgatctcagctcaccataacctctgcctcccaggttcaagcgattctcctacctcagcctcccgagtagctgggattacaggtgctcgccaccagacctggctaatttttttttgcatttttagtagagacagggtttctccatgttggtcaggctggtctcccaactcctcaccttaggtgatctgcccgcctcggcctcccaaagtgctaggattacaggtgtgagccaccacgcctggcccatattcttaatctagagaaaagaaaatgttatttaaaaaaacattaaaaaatcacaagaaggagaaaatatatttactattcatgaaatggacatggatcattatagagatcttcatccttgtcttcatgttgagcaggctgaggaggggcaggaaagaggagggcttggccttgctgtcttaggaagggtaaggtgggagaggagaaggaggtggaaggggaggcaggcacagtttttccagtgtaacactggaaaaaatactgaaaaacactggaaaaaaaaaatccatgtataagtggacctgcgcagttcccatgttgttcaatggtcagcgtacatggcaggatgtctctagtgagaagaggtcctcagatgctgtggaaaggaataagaggactgagttgcatttgtcgctaaaccctagcaggcagtgccatcctttcctggctgggccttgatgggggcttctctgagtgcctaatgtatttttttttttttttttgagatggagcattgctctgtcacccaggctggagtccatggtgtgagtatgattctcctgcttcagcttcccaagtagctggggttacaggtgcctgccaccacacccagctaatttttgtatttttagtagagatagggtttccccatgttggccaggctggtctcgaattcctaaactcaggtgatccacctgccttggcctcccaaagtgctgggattacaggtgtgagccactgcgccccaccagtgcctgatatcttctagggctacacagttatttgggtttagctaatcccttcacagtgtgccacatacccacatggcaattactacctctccaataacacctcagctcttacccatagcttattttttcttctctttattctcagctttgtttagaattggaaatgtttaacatttcattttgaagatttcttttcatcttcagaaaaccagttaattttttgcatttttgacttttcttggctacttggatatgttcatttggagaaaaaaagtagaggaaaactttggggccattaaagctaactttccttgttttagatttcttatacttaaaagaaaaaaatttttttgaggcatgaagtgacctgtttacaaaatgaggtgttgctttagcttatatgatcttactgacacttcttaaagggacatgattttattttatttatttattatttaagttctagggtacatgtgcacaacgtgcaggtttgttacataggtatacgtgtgccatgttggtttgctgcacccatcaactcgtcatttacattaggttatttctcctaacgctgtccctcccccagctccccacaccccaagacattatctcttgaatcttgggaatcttagaaacaatgtagctgcaaaaatattatttgaaaactggaaactactatcctgtattattctagatttgtttattgaattatttacatttagcagtaaatttgttgcttgaattgtaagctgtaagaggcactttgccttggcttgtttcatgtaatctttccatagggttatgtaaatgtcatcacatgcaaaatatttctgttgtgaatgatggagagatttttcaactgctactgacacgtgccctttaatctatcttttaaaactaattcaagttttagtcattggcttgttttcattcccagaagtattttaccaaaaatgtcagtgcagcataaaaatgtagacattaccattgggtttgctgcacaaatattgttacaagttagtttttgtaaacatttttctaatggaaaattacaaataattataaccctgttgttctgaagcaattttattactcagtgctgtgacctttttaggccttcagtgatcctctgtcatcaaggacaagaataaaacacatgccatctcctgcaaagttgcatttcattatccctcttggatgggttaagaggtggggcagatgcacgagcaagaggggagagtgtgagggtgactttctgtttgagaatttttaggaaagaaccgacatgatttattgtttaaaatttttgagataaaattgatagaataagaagtgcttttgtgaaggatgtggttgcacgagctacttcagaggatttccattaatgactgttaagtctcaggagtatcagaaggcttgtctattgaggttgagttattttaattgggttaatagcatagagttgatgtgcctattctaatatcctagaatatttgaaagatgaacccattgcttaagatgaaattgagattatctttatattttattttaaatatagagacggggtcttgatatattgcccaggctggtcttgaactcctggcctcaggttattctcccaccttggcttcccaaagtgctggggttacaggcattgagccatcgtgcctggcgtctctattttatttatttgtgtatctcagtctcacttggtaacaaataattgagttagatgaagctaatgtttaaagattctatgacagaattggccttttcccctttaatatttatctttggaggctagaatttaaaatctagtggggtctttagaaattacctcattttacattttcatttttaaatgaagaaatttgaagcacaagatgttatcttgcccaaggcgaatgaggaatttagttacactgccatccattggttgttagcggccactccatgtctcaaggggcagatggttgattatcagacttagttacagactttagggcaagcctgaggataaaagtaattttctcagtaaagaaggtgttatcacagacaggtcatcagtatactaaacatgtatgcaattaagcaaataatgattaatttacacttgtattaggttggtgcaaaagtaattgcagtttttgccattaaaatagcaaaaagtgcaattacttttgaaccaacataatagttgtattcagtttagtgaatgaattagatactcaaatttagaagaaaccatttcttgtgttgcttatctaagtgttcttcgtggatcctgctctccttttggtcttttaattatactttattttttttggtttgtcttcaccattagactgtacacataaagacaggaagcctctgtcttgtccattattgtttccagcacccaataacagcactgatcgttgactgactcctaggtttgtgtggctatgtggaacacttagcatattttaaatattgcaagtttgaatattttattttattttttacagtgaacagagtatctgtcaggcaagagctgctgtgatggtttatgatgatgccaataagaagtgggtgccagctggtggctcaactggattcagcagagttcatatctatcaccatacaggcaacaacacattcagagtggtgggcaggaagattcaggaccatcaggtaaggctttactacaattgttgttaaaaatgatttagtattacaaaaggacttggcatattccgtaaaataaagtagttttaaaactgtaatcaaaatagtctctctctgggaaaaactgaatataaaattgtctctccaccctttctaccttttatgaagcctgaacttaaacgaagatttagaacaagttgtacaaaaatagaaatacaagttcttttatgatgaattttcattagattttctggccttcaattagtttttgaaatctaaagcaaattaaggacaaacaaacaaaactctacttaagtggcagattgtatgtttatggaattaatttcctgccaatgtttgggatatggggttagaggagggagttgaaagtatagatagtttcagaaaatactgttaaattcacatgtgatagaaaaatagtaggtattgaggttgctggaatagtttggcttttgcagttcatgtctggggcgacagctaagcttttactaattcctcgctctggatttcttagaaagtagctggattatctgattacttgatttcttgggccttaacagatcaacagcagtagatagaggaaaaggcagataagctcttactagcattaactatatactaatagtaagaacttttataaagagtagatttacaaaatactttgggaaaaaatatttaccaaagatgttggaatcaactgactttaaaaatcatcctgctacacatgcggaaagaatgtaacaaattttcttcttcattgcccagctgagctcttatgaagaaaggtaagttcctaggtttcccctacattgtgtggtagtgtggtgtaaacagatgctgcattagccctgggttttaggatggtgattatggattggtaagatttgtcatgtatgcatataggggctgtgggcctacgagaggttgggctgtgaaactggtattttggcaaaacaaacaaacaaacaaaaaaacacacaaaaaaactagcaatcttagaggggctacaccccgtagaaagaagacaagagaaatccttctatcagcacagggaagcaaaggagtgtgttgctttcttagctggcttagaagctcccccgagaaatgagaaactccttcacttaagcaacttaagccaagaaattaggaaacactggttgtagagcactgaaactgttggggcacgtggtaaaaacaaatgtggtgcctgcgtggagatgaactttcacagctctgagtcaatctgtggaaagagcaattctctgaatttaccagatttatccatttatacagacggtttcggcctgcctctctttctgccctctctggctcccttctgtctgtctctcccctgtgccccgccctcttcttttccctccttagtcttcctgcgttttcctctaggctccagtttccttgttgtgttgcacagcctttttctggtctcccaggctttttaccaagagccccctttgtcccatttgtagtccaggttctggggagcactgtctcatctttgtctttgttccagcagcgacttagtccagagataaatcaaatacaccccaagatgttattatggggaaaaaaaaagaaaactggacaattaaaattttgtagaaattgttgaaccttcttaatacaacattccaaactaatagctgtaaagaaactacgtttttggtaaatttagtgaattggttatttgaaagtactgatgaacaatcctacatttagagaaacaaaaaagaatatttgaagataatcagaaagaaattctttttttttttattatttgagacagagttttgctcttgtcgcccagggtggagtgcaatggcgtgattgtggctcactgcaacctctccttcccgggttcaagcgattctcctgcctcagcctccagagtagctgggattacaggcatgtgccaccatgcctggctaattttgtatttttagtagagatggggtttctctatgttggtcaggctggttttgaactcctggcctcaggtgatccacctgcctcagcctcccaaagtgcaaggattataggcgtgagccaccgcgccaggctcggaaagaaatttaagctaggaaatttgcatatgaaataccaaaatttttatttctaggagaagtaaactatcctatgacttagattttggaaaatagaatgtttcttaaaacatttaaaaatttaaaactgtgcttctaaattgtgacattaagaggaaattattatgtatattaaaaaatatttagaaaataagaaaacactgagacctgagtgatattacatatagaaacctgtaggacatctaagctgtccttagatggacaagtcttaattgtatgtagtaggaaaaaaagggaaactaaaaaataatgagcttaacccaaagaaaacagaagaaaatattaaaaagatattaattaaatgaaaataaatagtatttgttaatacaaaagctgcttcattgaaaagataaactagctggcgtggtggctcacacctgtaatcccagctttttgggacgccaaggcaggaagattgcttgcccaagagttcaagaccagcctggtcaacataatgagactctgtctctacaaaactattttttaaaacccaaacaggccaggcgtggtggtgcttgtctgtaatcccagcactttgggaggccaaggtgggtggatcacctgaggtctggagttcgcaaccagcctgactaacatggtgaaaccccgtctctactaaaaaaaaaaaaaaaaaaaaatagtcgggcatggtggtgcatgcctgtaattcgagctacttgggaggctgaggcaggagaatcgcttgtacctgggagcggaggttgcggtgagccgagattgcgccattgcactccagcctgggcaacaagagcgaaacaccatctcaaaaaaaaacaaaaaaccccaaacaactagccaggtgtgatgtgtgtgcctgtagtcccagctactcgagaggctgaggtggaagaatcacttaaacctggaaggtggagactgtagtaagtgtgattgtgccactgcactccaacctgggagacagaacaagaccatgtctcaaaaaaacaaacaaaaaaaacttgcagaatcaaacaaaaaaaaggaacagtacaaataaccaattttaggaatgaaaaaaagaataccactatagttactgaaggaaataaaatattataaaaaactttatgccagtaagtgggccattttgtagaaaaacgtaactttctaaaactgaagagtaggaaaacgtgatagacctacaatcatgaaataaataaatagtaaataatctgccccccaaattttaaaaagctgcaggagagtacagagcatttacaaatgaaatctaaaatgtcatgatattttctgttttatgcaaccattgtagagaatgatattttataaggcttgtataattttgatatccaaaacacagaacacgtttgggagaggagccagtcttcagttatgaatatatacctagatataatagtcctcaataagatattagcagaccaaatgtagtaatgagtaaaaaacaaaacaaaagcacttcttgatcaaatagggcttatcattgtttgccttagtaatataaggatggttaacattagataacttactaatgttatttcccaggagaaaacctacaaaagcaagaggttctggaaaaagcatttgataaaatttgaatcaatacataacagttctcatcacattaggcataaaattaatcttgttaagctgatatgggtagataatagaagcatacagcaggtatcttacaggattgtacagtgtcaagagcattcccgttaaacttgtgaataaattgagcatttcagctctaatcactttcatttagtgatacagaggaggtactagataacctagccatacaaagtttaagaaatagaagcagtaagaattgataagaaagaaacagctggttactcaccaatgatgtaattgtctgcataaaaatctcccaggagtatctgcagataaactattagaactaacaagattttcagtgaggttgctggttacgtgatcagtatataaaagccactcgcatttttgtataagcaataaacgattagaaaatataattttattaatataatgatacttaaggaaacaccatccctaagaataaatctaataaataattggttttctgtctttcattcttgcatttcgggttttttttttttgacacagagttttgctctgttgcccaggctggaatgcagtggtgtgaccatagctcactgcagccttgacctcctgggctcaagtgatccttctgcctcagtctcctgagtagctgagattataggcatgagccactgtggctggccatcattcttacatatcttaatggttatcagtctgttctaagtgggcacatgttgttataatttactaaatatctaaactttctatagtaagagctgttaaaaccacccaccatttacttacaaaattgaatatgtacaattatataaatatgttatataaaaaaatacttcattttccagcctaacatttattaagtgcttatgggtactatgcttgggtgtgttttttttttttttttttttttttttttgagacgcagtctcgctctgtcgcccaggctggagtgcagtggctcgatctcagctcactgcaagctctgccttccgggttcatgccattctcctgcctcagcctcccgagcagctgggactacaggcgcctgtcaccacgcccggttaatttnnnnnnnnnnnnnnnnnnnnnnnnnnnnnnnnnnnnnnnnnnnnnnnnnnnnnnnnnnnnnnnnnnnnnnnnnnnnnnnnnnnnnnnnnnnnnnnnnnnnnnnnnnnnnnnnnnnnnnnnnnnnnnnnnnnnnnnnnnnnnnnnnnnnnnnnnnnnnnnnnnnnnnnnnnnnnnnnnnnnnnnnnnnnnnnnnnnnnnnnnnnnnnnnnnnnnnnnnnnnnnnnnnnnnnnnnnnnnnnnnnnnnnnnnnnnnnnnnnnnnnnnnnnnnnnnnnnnnnnnnnnnnnnnnnnnnnnnnnnnnnnnnnnnnnnnnnnnnnnnnnnnnnnnnnnnnnnnnnnnnnnnnnnnnnnnnnnnnnnnnnnnnnnnnnnnnnnnnnnnnnnnnnnnnnnnnnnnnnnnnnnnnnnnnnnnnnnnnnnnnnnnnnnnnnnnnnnnnnnnnnnnnnnnnnnnnnnnnnnnnnnnnnnnnnnnnnnnnnnnnnnnnnnnnnnnnnnnnnnnnnnnnnnnnnnnnnnnnnnnnnnnnnnnnnnnnnnnnnnnnnnnnnnnnnnnnnnnnnnnnnnnnnnnnnnnnnnnnnnnnnnntttattttattttattttattttattttattttattttaagacggaatctcactctgtcgccaggctggagtgcagtggcgccatctcaactcactgcaaccttcaactccctggttcaagtgattctcctgcctcagcctcccaagcagctgggattacaggcatgtgccaccacacctggctaatttttatatttttagtagagacagggtttcaccatgttggccaggttggtttcgatctcctgacctcatgatctgcttgcctccgcctcccaaagtgctgggattacaggcgtaagccactgcacccagcctgaaaatatttaattttaatacttttaaagattatttgcagtactgtctatcctcaatggttagatgagtgaaagaattaattcagattaaaaaaaatttgtttttgtttttgagacggagtctcactgtcgccaggctggcgtgcagtggtgcgatctctgttcgctgcagcctgacttccctggttcaagcttttctcctgcctcagcctcccgagtagcagggattacaggcacgcaccaccaagcccagctaatttttgtattttcagtagagacagggtttcaccatgttggccaggatggtctcaatctcctgacatcgtgatctgcccgccttggcctcccaaagtgctgggattacaggcatgagccactgtgcccaaccccagatttcaaatttttatattggaaaaaggaaacagtagtttatgtaattttgatcctagtaatattttccacaactttttctagcattctgttatgaacaattgaaaaagtaaatgtaacacatcttttctcttgtttgccattttaagctgtttgccaagcagggatattgatttgccttaaaatgggtcttctaattttctgataatgttaaaatttagtagctttgggtttctagtgtcttctaaggaattgtgacacccccaccccaatatttataaaaaccacatcaggagggtgggcacagtggcttgtgcctatagtcccagctatttgggaggctgaggcaggataactgcctagggccaggagttcaagactgtcgtgtcccatgattgtgcctgtgaatagccactgcactccagccttatggtaaaatgtgcataacatttaatctttttttttttttgtctcactctgtcacccaggctgcagtgcactggcatgatctcggctcactgcaaccttagcctcccgggttcaagtgattctcctgcctcagtctcccaagtagctggattacaggcatgtgccaccatgcctggctaatttttgtatttttagtagagacagggttttgccatgttggccaggctggtctcgaactcctgacctcaagtgatctacctgcctcagcctcccaaagtgctggaattaccatgagctacctccagccttggggggcacaggaagcccttgtctcaggaaaaaaaaaaaaaagttcagatttgcctaggttctagtaaacagagtgctacccatcccaaattgaggaagtcccaatggggatgtcctggtagtgtgggaaggctggctatggtgctgctgaacagccactttgactcggtgtctcctttggccaagttacagagcagactttctgggctagtcctgcttccccactttggctgttctcagggatatttctcccttctggcactcccaatgcttcccatggtttgagatgacagatgagtcttttgccgtgaacccaggatggtggagaagtttgttgtttaccttgatctcactttttccagtgtagaaggcgtgagttgggggagattttctgcgtgcttggtgccaacaggctgtggggagggccattgtggatatggaggtctgattctcttactgtctgctgagagcttttttatttctctgtgtctccaggaactgtctcctactcctatttgagttgtgggatattgctggtgctgtatacttgattttgttttgttggggtgcagggagagtagggaactattaggttggtgcaaaagtaatggtggtttttgccatagcttgcttctgcgctgccattttggaaccagatatttcacagttcctcttgttctggttacaaatttatgagtcacagcaggagactttaacttacttctgttagtaactgatggaacaggcagtcagaaaaaaaggtctgtaagaatgtatagaaggtttgaacaatacaattacctccctagcctaattgacatatataccacatacctttgaaatgtacgtcacaatttcaaaattgtatatatgcttggccctaaagaaagtgtcaacaaatttcaaaggattaaaatcatacaaagtgtatggtcacagcagaattaatctagaaataagataatagagaatcccataggtgtaggtgttaagaaatacctttctgaatagtccatgagtccgagaagaaatcacgatgaaataagaaaaattggttgagctgaataatgatgaacatgccacatattaacactaatagaatgcaactaaacttgtgattaaaatgaaatttagaggctaaaatgtttatcttgaaaaagaagtattgttgacttttcagccagaactcaggatgcatctcaagaaattaaataataggccattaaagccatatagaatattaatagaaagagggtaacaataaagataagagcagaaacaggccaggcgcagtggcttacgcctgtaatcccagcactttgggaggccgaggtgggcagatcacgaggtcaggagatcaagaccatcctggctaacatggtgaaactctgtctctactaaaaatacaaaaaattagccgggtgtgttggcgggcgcctgtagtcccagctactcgggaggctgaggcaggagaatggcgtgaacctgggaggcggagtttgcagtgagccgagatcgcgccactgcactccagcctgggcgacagagcgagactccatctcaaaaaaaaaaaaaaaaaaaaaaaaaggcagaaattaatgcagtagaaagcaaacacactaaggaggagaggtttgtctctaaagtccttgtgagggacagctcttgaaaaaaaaaatggtttaaccattatgaagaaagaagggacatcactgtgaatcttacagacatttaagtgattaaggagatattttgagctactttattttagtaattttgaaaatgtagatgtagaaattcctacgaaaacactttaaagaaattaagactatcattaaaagaagtaaaaggaagaaaactttgtttagctggctctactggtggtgttcttttcaaccaatcctttaaagaacaccagtattacgtacttttttccagagaatacaaaaagaggatgcctatctttttgtcaactctacagtgccaattcattttaagtccagcattactttggtatcaaaacctggtatgaatacaatagagaggaaattacaggttaatctcactcataaaagtacatgtaaaaatttcaaacagagcaatatcaaacaaaaatctagagatttataaaaattgatatatgaggaccaagattgtttatcctaggaatgtaaggttggtttaatactagaaaatcatcagtgtaacttactgcataaaaacagaaaaaccagtcacctcaagagatgttggggaggacttgataaaatgcagtattcaatcatgatggaaacccttagctgtcaagtagtagggtttttccccagataaaagatatcaataaaattattacatgaaaggtcatttatttatttatatatttatttattttttgagacagagtgtcactctgttgcccaggctggagtgcagtggcagagtctcagctcactgcaacctctgcttcctgggttcaagtgattcttctgcctcagcctcccaagtagctgggattacaggcacatgccaccacgcctggctaagttttgtatttttagtagagacggggtttcaccatgttggccaggctggtcttgaactcctgacgtcaagtgatccacctgccttggcctcccaaagtgctggaattacaggcatgatccacctgcctggtgtgaaagatcatacttttaacggtttaattgagaaagctttccttctaaaatcagaaaataaagatacttgttatgaacactttttttcagcattgtattgttatttctagccagtgtatggagataaatacattgtgaatggattggaaaggaagaaataaagctgtccattgccgatcacatgattgtgtatttagaggaaaaaaccttaatgtaaattattaggaatattagaagattctaatacttagaactcgattaataatagaaaataataaatctaatgaaagatcctcaagacccctataaagatacttaagagcctcctcagattgatatgttagctttcatgcaacctcaaagtccccaaaatttctttggtagaaactgataatcagaatgtaaaactagctgcacacaaaggactgagaagagccaaagcaattttgaagaatgaaacaggaagacacactctaatggtcatctagatttcgtataaagctacaacagttaagacattgtagagttggcaaaaaggcatattgatctgtaggtgaaaatagagccttatagacacttgatttatgtgctgcaggcaaacctgcagcacagtgatagtgctggatcatttggacagccatattgaaacaaatagcaaacttgatccctacctcacaccataggcacagatcaattccagttggattggggatagaaatatgaaaggtaaaataataaagcttctacaagataatatgggacaatattttcatgaccttgtgattgagaaacatttgttaaacagggcactaaagcagtaactataaaggaaaagattgctaatttgaacagaatcaaagtgaagaacttacatccatcaagacaccgttaagagtgaaaaggcaattcatagaatggcataagatatatgcatcacagataaccaacaatgatatcatatctagaatatataaagggcttagaaatcaaagaagaaaaaagttgacaactcaggagaaaaatggacaagagacttaattcaagcagatattcacaaaaagagacatctagatacctaataaaaatcagggaaatgcaaactaaaactgcagtgataaagcattcatacccaccagaattgctaaaataaagactgacagtaccagttgtaatgttgcatagtatgtagaagtagcacaagctcttgtatactcttgtggaaatgtaaattactagaaccaatttggaaagctacttggaattttctactagagctgaacatacacatgtcctgtgatatttccactcctgggtatatgcccaacaaaaatgaatgcttgtttgtaccaaaagacatgcagtagaaagttcataacatcgcaatttttaatagcccaaactgcaaataatccaattgttcattaatgggagaatggttaaataaatatgatttatacaaacgactaccatagagcagtgaaaatgaacaaaccacagctgcatgcaacaagtggatggctcttacaattttgaggataagagagcagatacgtttaatacatgttgtataactccatttatataaaatccaaaaacctacaaaactcgattaataataggaaataaatctaatgaaagatacttaagacccctatatagatactcaagaccctcctcagaatgatatgttagtttttggatttcatataaatgtagtaatttatgatgttagaagtgtggctagtaccttttgggaggtgggaggagttaagaagaggggcttctggtgttgctgtttgatttcttaatcagggtactgacttcatgtgaacattcagagagatacactcttaggttgtgtatacttttttgtatttgtaaaacttcagcaaacaagttaaaatatatttaatgaggaaaatttttttttgttttgctgatatactttttttttttttgagacagagtctcgctctatcgcccaggctggagtgcagtggtgtgatcttggctccctgctaactctgcctcctggattcacgccattttcttgcctcagcctcccgagtagctgggactacaggcacccgccactgcgcctggctaattttttgtatttttagtagagatggggtttcaccgtgttagccaggatggtctcaatctcctgacctcatgatctgcctgcctcgagccctcccaaagtgctgggattacaggcgtgagccaccgtgcccggctgatttactgttttatggcagacctttgtaatcagcgaaaagcttaacttctatcagactgatatttgtgtagattttacccagataattgtttaagcaatttttgccaaggtctgttaggaacacatttgaatgaatatatacaatcagcatttgttgacatccttgattttgccaattattggtttgactttataaagaattattattttttaggtcgtgataaactgtgccattcctaaagggttgaagtacaatcaagctacacagaccttccaccagtggcgagatgctagacaggtgtatggtctcaactttggcagcaaagaggatgccaatgtcttcgcaagtgccatgatgcatgccttagaagtgttaaattcacaggaaacaggtaaggtgcccatggtttatttgtattttctttctttttccagagacaaagcaaaactgaagatttacttgtattcttgaactgaagtgccatgtgtatgttaaaacaaatgtttgttaacttttagatcttgtatatatttgaagtagtttttgaatttttattttctatagaaatgtgaactttttattgatgataaatgtataatctagaaagataatcctgtgagtttagttctttttaattctgtaacccttttatttgaagtatttagatgggtttcatcctgctttagaaacacttccgttgcaagtacatgaagcccagagaatatgcagtggataggaattatgcttatttatcatctttgtgtaaagaaacacatgttttctgaaagacatttttcaaagcatggacttgaagtaggactgggtctccttcccagtaggtaaaaatgtgattctcggtttttttaaagattttaggagtgccctcaggtggtatcagtcatgaattgcatctcctctgatagtgcatattggttagaaatatatatagaaatcactttttaaaaaaatctcaatttttaaaaactgtacatatgtcaaggataagctcagttttgtcttggtttaaaaaatagaaaaatgtaccagtgtgtggttatttctttgaagagagagattttataatcaggaaataattgttatacatgaaaacacaaatatgattactcttgcctatattgtatatttagtaatgattttaatgatataaatgtactgtaaacaatatatattttaagaggaaagagttgcagtcagatgaaaatttgatactttgttgaaagtgtagaatatcaaaatctgttcaaaatctgttataaatacattaaacaatgtatatgttgccttatactaaaaagggttgaagcatctagctggtgtgttagtctgtcaaatactaatttcagagcaagaagacattttgggatcttgcagaaacttaaagttgttatgcctttagatgttttgtatcagatcttcttttgaggaaattaatatcaatacataacttatacataggttgcatattttgtctagtttgagaaaataaaccactagaacttggcctggtgtgtctctaagtccagaaaatagcataggaaagtctgtatagtcttgtatgtaggtcatttctctaagtctctgtacttctctcctaggtgtcagtattttattggcatgctatcataggtatagaattgcttttcatttactgtagttttaccatagggaagaagctagaattgtgattctttttttttttttcttaatatcttgttggataggtcagttatgtgataaataattaaggtaccaaagtttggagagtagacatttgactatcccgtgttttagaacaaactagcattatttttatttctaaactttcaaaagtgtatccgttgatattagaaactaaatgttactgatattaggaacttatattggaaactaaatgttccttttttaaaagtagttaaaattttattattcctcttgtcattgacttttgatttttagtttttagccaaatggaaaggattgtttctctcaatgagtagtcatatggtttgatttcaaaatgcaaatttatttatttattttttgagacggagcctagctctgttgcccaggctggagtgcagtgacgcgatcttggctcactgcaacctctgcctcccgggttcgagtgattctccctccttagcctcccaggtagctgggattaccggtgctcaccaccacacccagctaatttttgtatttttaatagagatggcgtttcaccatattggccaggctggtctcaaacttctgacctcaagtgatctgcccacctcggcctcccaaagtgctgggattacaggcatgagccaccgtgcacagcctttttttaaatcttgatcttttcaaattaatgaatcttaatgtggagagactcaattacattctctattgtaaggtaataagcattaagaaacaatgttccacattatagaaagtttggcaaataggaaaatcggccatcattttacaagctacacaagcattttagtgtgggaaaaaggcttcttgttagatgattttgatactttattctcagtcacaatctcaaccactcatactaggggctgaggaaagagagataatggtggaagaaatgagtccatcacagctgcctcctggtattgtggatcagtcactggcaaggaagcttttagttctgtagtttttcatcatggaaaaaaaaccatatagaatggctaagttctaaatagtctgatttacttagaaaatgactgttttcataaattactgtagttaaatactatttcttatttttgatggccttaattagtgtggaagtagaagcatgggagagagtaagatgttaagaatcagggccgggcacggtggctcacgcctgtaatcccagcactttgggaggctgaggcgggtggatcacgaggtcaggagattgagaccatcctggctaacatggtgaaaccctgtctctactaaaaaatacaaaaaaattagccgggcgtggtggcgggcgcctgtagtcccagctactcgggaggctgaggcaggagaatggtgtgaacccgggaggcggagcttgcagtgagctgagatcgtgccactgctctccagcctgggcgactgagcaagactctgtctcaaaaaaaaaaaaaaaaaaaaagaatcaggagtgttcttgggaatagatataatttcttacgcagattctccagtgtagaaaaggtatgtaccctaccccaacattatatgggccacctcccctttatctaaacaaacatacccaataatgtcacctctcagtttgatcataccctgccaaaaatctttgctttggattcacagccaattggctgctgaaatcatctactgtctttcttccaaaaccaagttgaaaaagcttaacttacatctcccttccctttacaaactgtagcctgataaaactgatgagaagcagaacaaacttattgataaagcaactacaaatattagtcttgcctgtttcttaatgttttaccacttgttaaaacatttttccatattaaacatttctgtttgtatttttatttattaggtgctaatatcaatattatccactgttgtcatcggctaatccttctcagtgattttcagactttaaaaagttatggacatttttgtgcaaatgagatctttggtagttcagtgtataaatggacagaaaatatggagcttctctgattgatatagggttccggatccgcaaccactgagatgcctccatggttctctagaactgaatttgaaaattactagctcacgttttgtgctaaaaccaataatcacataattttcctttcctcttcttccgtgtcccctacgtcctcaaattttttaaatttataaaaaacagctttctggggggctagtcataccaacctttacaaggtgctctgtgtgtttgtgtgatatttcctttttttaatgaaaatggtgggtggcagaaatgttttcctttattttgtttttaacttggtatgcaattatctaatatactggaaagtacagaaggtgctaaatacagtgagttatatttggaagttaaaaaaacacaaatcacatgttctaacatttttgaaaaagagctgaattagtgctcttccttttataccaaatgctacagtgtattttttcctttctccatggaaatggattcaattttaaatgggtgtattacctaaagtgatatttttgatttctctattatttatccagtacatttatagatttttataggtaatagttatggattatataaactacaaagttaatttttgtgataattggtggaggcaaatttgcccaacttttattttcttaaaaggtttaaatcatttgaaaataggaaataatttttaaatccaaaaaaaagaaaattatatgcataaccagtaagattatcccactgcttttgttctcagccaagatgaagcatgccttttcaaaaagaacaccccaaaataagtattttaccattatctaaaagactacttttgctgggttttattttttaatctattgaacatgagaacatggtcaaaagtcataccttccttatggttgaaattttctagaggttttataatattgagatttcattttttaatgataatttggcctgacataccttccagtatgtacatttgtatgagttttatcacagcatttaaaaatctctttatgtttggaattaataggattaaaaaaatctcagtagtttctagaaatactttatagtgacagttttgttttttagtcttccagattgttgatattaatgcaaacaatattaagcttatatcacaaaaatattttcagtaaagcgtattttttataaactgtgttaggcactgggaataatacaaaaatgataaataaagcctgtcccttgcctgatgtcacagtcgggctacagctgccagaaacaaggccagcaaaattaggatacagcttgcgaatgtagtgtgaagaaaggccttcggaataccaaagaaaattctagggtcagggaaagctttgaagagaaggtgatgtttcagctatgtttgaagaatggggagggctcatcagtgatagaacattctagataggtttggaagcatgagagcatggagcaattgggaaataacaaatatgccatgatgtggcttggacatgagaatttatgtggtgggggtcaggagcagggcatcccaagagataaggttgggaagggcctagtgctgacgagtgtgcatgttatcatggaggtggtgaagagtcattgaaggatgctaaataaaggattgatatgatcaagtttgtgctttaggacaagtgtggtgaacatgcaagtttacaagcatgaagatcaattcaggacactgttgtaataataccggtgagaaagatgaggcctgaactgacaaagtagagagaggagaggagcagaatgaagaggaggtgaccagctttcatttagtgctggctatacctgccacggcagtgttctagctttctacctttgtcctcacatagaaattaaagccattctgaggcaggaataatgatctatttattggtcaccttctgtgtgcttggtcttaatctggcgtatacataaccaatcatctttataacaatcctacaaggttggtggtattatccttgttttagaaatgagattggcacttacagaaggtcactactgtagtgatgcgaggacccacagctagacagtggcattagtggcttttgtaccgaggtcttagaactcaacctcttttctctttgtcagtaagatgtaatgggcaggccgggaaggagagaacagtgttttaaaatgatgaccaggtgtgtcagtttgggcccccggtaaagatggtcctgttaaccagagacagagtgaaagaggatggaagaggaaatactgtgctgcagataacacatttggttctggatatactccatttgcggttctttattaatgctttcatgaaatcttaaaaatttggacctgaaaagaatcccaaagataaccctggacaaagttttttagtttagctttccgaaacaactaatcttattggagaattaacattttgaaccctataaaacctatctgtttggccaggtgcggtggcatacacctgtaatcccagcacttagggaggccgaggcgggtgcatcacttgagaccaggagttcgagaccagcctggctgatatggtgaaacctcatctctactaaaaacgcaaaaattagctgggcgtggtggcgggcacctgtagtcccaattactcgggaggccgatgcaggagaattgcttgaacccgggaggcggaggttgcagtgagctgagatcgtgccactgcactccagcctgggtgacaagagtaaaaactctgcctcaaaaaaaaaaaaaaaaaaatctgttcactaagtattaagtgagtaacaggtttggggattgggtaggtggggacagtcttttcgtaggtctgcctgctctactttcttctcatacttacctctcacagtcctcccttttgtgaatcacagtaatgtgaggttaatatgtctgttgtcactcccaatttccaattagaaaggttgacatggagagctgggatttccccaggctgtccatacctagaaagggaggcacaaaggggattgggttttcgagccttcaggccatttatttttactgcgtttgtctggccttcagttcaagatcttcaaagcatttttaaaaacgcctttgagggaagtcagtttagagtgagaaattaggaaagcaaaaatttgaatttacttttagttttgtgtttttaagtaaactgttaaggtctttattgtgatttagtagaaagaacttgagtttagagtcaaaagactctagttctgtctctccctctggtgctttctctaaagctatttcctaatttataaaatgtgagtcatgagaatatttatgtcaggatatcatgggaattaaacaaggcaaaggcatagtattaaactagaaaatgttattttgaatgctaatgtccaaaaaaaaaaaaagaaaatgaaaattctatatggattaacttagaggaaaaaaaaaaagtaggctttcaaattttctccaacatctgctttgtcttaactgcccggtaaagacatatcttttgggtgttttctttttttctatagacaaattaattcatccatcatttgagtgcatctgtatgccagcgcaaattagacacaagtcttgtcctcacagatcttctttctcctcttacaggggaggtaaggcacaaccataacacacaagagaaaccctgtctgaggacagataacatactgtattgggtgtgtgaaggggacgagccgccttctcactggagcagccgggaacatattagtgacaagctgactttcaggtctggattttgaaagttggacatactgtaggcatgggaagatgagggggaaagacatatcaggcctgaggaatagcatacctgtacaaaaagtgggaagaatgagctgtgtttgtagagcagggaattgtttggcctggtgggaataaattcagaaaggtaggtgatcaagaagggcgtttgagacctttgggtgatagagattcagtgtaagttttcaagcaagagtgataatgtgagtaaagctgtactccagaaagctagctgtggtttgaaaagggagctactggaggctgtaagtcaagcattcagttcctgagtggaggcagaaatagagaagaaaattcaaacagtggtagaatgaggtgaatttaaacaggaaaccaatgtggttctgattgtacttcacttaggtaactttttcattaagaaagaattctggctacctattctcatatgttaataatagaggtcttggccgggtgcagtggctaacatctgtaatcccagcactttgggaggctgaggtgggtggatcacgaggtcaggagttcgagaccagcctgaccaacatggtgaaaccccatctctactaaaaatacgaaaataagctgggcatggtggtgcgcacctgtaatcccagctactcaagaggctgaggcaggagaatcacttgaatccaggaggcggaggttgcaatgagccgagattgcaccactgcactccagcctgggcgacagagtgagactccgtctcaaaaaaaaaaacaaaacaaaaacaacaacaacaacaaataatagatgtctccgggaaagtatcatatatgtttgaatataatgtgtgtgacacctaaaattatttctactgtatgaagaaaatcagtactttgggagaaacaggtaaaaatgaaaatgtaattcagcatcagtttgagtttcactgtgagcctcagtccaggttttagaaagaaaggtacgtagacacaattctggctttaaatagttcacaatgtggcaaaagaaacttcattaatttcttaagattaatgataaatacagtttctttgggcagattgactctaaatattgagttcaagggggttaattacagtataaaagggtttctagctgttgaaaaggttgggagctactgaattaggcctccagatcctgtggcctacctgttatacctcaaagcctcaattttcagccgcttccttagcctttctcaaccagggctgtgagacagttaagctctaaggaaaattgtttgagtaactaatatcagttctcccaaggactgtatttaggtattctttacctaccatggatgtgttagggccagactctcttggaaggatgcttctcttctgttctcttcccttgccctctccctctctttatgcttctgttttgtgatcccccatttacacacaggaacaacctcaaagttctgggttggaattgggaccagaaaatgactatagctttatcttctaatatttgtgttgattaatgcttgaaattatatctaataattcatagtcactaaaaagaaaatttgagtgaatatttgatagtagcttatcctcttaaagtttacagacctcaggccaggctgattctcattagggccaggcatgctggctcaggcctgtaatctcagtgctttgggaagatctcttgaggtcaggagtttcagaccagcctgggcaacatagtgagagcctgtctttaaaaatacatatattaaaaattaggtgggcatgatggcgtacatctatagccctagcttcttgggaggctgaggcaggaggatcacttgagcctgggagtttgagtttacagtgagctatgatcacgccactgcaccactccagcctgggctacagtgaggccctgtgtctttaaaaaaaaaaaaaaaaaaaaaaagtttacagatgtcctaatcattagagctaataaggcctaaattactatgtacttgctggttctccatgttttaattttcctttgggctaaatcaggtgtaaaattgggaatcttgaatttaaacctctaactcagggattcaaaaagtgtggtccatggcaactcttgagggtccccttctggaccgtttcaaggatcttcttcattatacttcagccagaacagcatgccacagcacactgaatacaaaagcaattgaaataatctagctgtctggattattatttaatatttagtgttaaatgctaaagagatttgtaaaaccatggcattctaatcacttaatatttttgttctgagaaatagttatttttcattaaaatgttattttaaatataactgctttttagttgttttaaaagtgaattcctaaaagttaaaacatgtaatttagttatttagtacagtaaataatgatagatgtaacccacataagcaaaagctctttagggtctttaataattgttaggaatataagtggatcctaggaacaagatctttgaaaactactgccataacttaggagggacagctgttcactaagaatgggatttctatagtctttttatcttttccaaacagcctagcaaagcaaaaaaatcttaaaggccgtgtgtcagatgggcttgattattccatattttctgtctcttcaatgtagatggacatgcctagctttgcctgtaacagagaactctttcttcctgtctttttcctttctgtatttcatcttctctcctcccccatgaggacattatggagggctggccagaagtgggactttgcaagtcacagaagtggcaaaaattattcctaattgctgttatcatctgtcaatgaaagggaaaatgtaggtctgatggcctttttgatgcttaatatataaaaattgcccagcaattagctttgtaaccaccatctatttaatagcagtaactgttgttactagctgtttctagctctgtctcagtcagtacatttgtgatttttctttttgtgattttttttgtgattttttcataattatatctgaattacatattcatatatgtggatttataaattgttcatactaaattacaataaatacattttaatatattaacttctatgacttttaagttcttgttcactaactgtctgggaaagctgctttagcttatgaagcctcatttttcatgagcgcagcttttagtcttacgttgtgggacttaagacatcttgtcctgccccaaggtgggaatgattaaatggctaaaaagaggcagatactatttttgtgataaatatgggtttcatgtctcatagcaagtaattttagcctggagtttgttgtcatacagacactatattctgtctgcctttcattcccttttctctacttccttgtttctctggcagttaggcaccttataatctattgtctgatgcatgtccagctagtgacttcagttcttccaggcttattttacaataggcttgatctttattcagtggtgctacaatgacctgaggatgtcatctgtgattatttgcatgctttcttacatgaggatagtaatttgcatgtaattactttatctttattcatgaatttttatcctttattgctcataaattgaagaagcattttgctggatgttaaatagtcaaaaattgtgatacctctgtgtggaacattttcctcttaaaacaagaataaagagaggctttaatagtctgtcttgttttccactgatgataagagatgaattgcaggaaccacttccactctgatgagaccattcacaacacacagcagcagccaaacctgttccacgatttttacagcttaatctcggctgtgctttcgtgcatttggaagcgtgatggtgccctgtcaggtcgcccatgtgcatattttggggcattgcctctgagttaacattgggcattcctgttttcataatctaggtaaggtagaaaaattctaaggagtcttttgaagatggtgttgaatagcagtatctttgaagttagttggtatttcatatatgaaaaatattgtgacattatttcattaatacataaaaaattcctaaggggtagatgctgttctaatctaagagaagaaatgctgtagttaactggaattatttgtattcctgttaaggtactatgttacatgagatgagagaaacaaataattcaaaatttttggtcttaaggaggctgttaattgtgtagatagtataagtcatggtcaaaaatatccacaaggcagtgtaagtaacatgaatggtgcagaatggtagttaggaaacaaatatagaatgctactcatgtaaaggtaccaaaaataattcttacaaggtagacctgctatttatgtgagcttttgtaatttctgaaatgattcacatgagaaaacaaatgacttctgtgttctggaaaatttcaagagtatttggctattacattgtcattcatgtaggaagaaatacattttttatgaaggagtttattttgcaaatattatcctgctctttgctgtggtaatattgtaacaaagagaattccttttcctattcagaaatactcactggtttcccattgatttaaagttttcctcaagccttgaaatcagtcccactttgaagactggatgaatgatatgggtgcctaggaaatgtgtctccagtctcttctgcagataactaatggaattagccttatattgctaggaagatggtagagtgggtttttgcataactattgtagtatgcagcaataaccctgcaatggcttcctatcaatcttagaataaagtacagaacttttttttttttttttaagagagagtcttgctctgttgcccaatctggagtgcagtggtgcgatcataactcactgtaacctcgaattcctgcactcaaaggatcctcctgcctcagcctcctgagtagctgggactacaggtgcatgccaccacacccagctcatttttaatttttttgtagagatgaggccttgctactacattgctcaggctgctcttgaactcctggcctcaatgtcctgcctcagtctcccaaagtgttgggattacaggcatgagccactgctcctggccatctttaattctatttagtaaatcccatgtgagacaaacccagtttatttaatttttatgtattcaaccaaactattttaatagaattttacatatttttgaatttcaaaaagtaaatgtggacaattttgtcatttaaatattagctgtcttgtgttgttttagatagaggttgcttcttggtaagcagcttcttgaaataccaggaattgtcacgcagagagatagagaaggcaagggcaataggattcccatggaaaagggagacagctgtctttgtttaactaggacagtcctggtttttgatgaaccatcctgaatggatatgtactgagagagtcatgacctaaaaaatgcctttgggtttgattcctcctggaaagtagtgtgatggcagaacagccactgtatgccttctctcaaccagctctggtgtttggaaaagggtattcaggtcctggctttgcagtctttccaaacatttggggtcatgttggcgttattcatagagtcacttcattctttatgtccagttctcttgttagaaactagagctaggctaggcgcagtggctcatgcctgtaatcccagcagttcaggaggccaaggtgaaaggatcacttgaggtcaagattttaagaccagcttgggcaacatagtgaggccttgtctcttccaaaaaattaaaaagttagctggttgtggtggtatgcacctgtagtcccagatactcaagagactgaggtgggagggtcacttgagcctgggagtttgaggttccacttcactggaactcaccattgcacttcagtctgggcaatcaaagtaagaccctgcctcaaaacaaaacaaaaaacaaactagagccagttagagctctgtccatctagaaccactcttgttaacagaactgtaatttccacagcattttgtttttcaagtgagaataagttcttctgatgataaagtcgtgtgctatttataaaaatttaagcagtataggaagcatgaagaagaaaataaaaataccgaaaattccaccaatcacctctaatacttttcaaaatggaaaaagcagtaggcattgggatatttttaaactttgtgttataaacaattgtgagatgaagaacagatgcacagcatggcacttgttattttccgtaacagctttatcgagctttacttcacataccatacggtttacccatttaaagggtacaattcagtggttttagtatattcacagggttgtgcaacctttgccacaattttagaacattttgggttttttttttgtttttgagactgagtctcactctgtcgcccgggctggagtacagtggcgcgatcttggctcactgcaacctccgcctcccgggttcaagcaattctcctgcctcagcctcctgagtagctgggattacaggcacatgccaccacgcctggctaattttttgtatttttagtagagacggagtttcaccgtgttagccaggatggtcttgatctcctgaccacgtgatccgcacgccttggcctcccaaagtgctgggattacaggcatgagccaccgtgcccggccaattttagaacatttttaaccacaccagaaagaaaccctctacccttaagtcattgtccctttaccccaattcctccatacctcccagcatctggcaactactaacataatttctatcactgaagatttgccagttcttgacgttttatataaatggaatcataaaatatgtggggttttttttgtgactggctttcaattagtgtactgttttcagggctcatacatcttgtagcatttatcatgcatggcattttgaaaagcaaatcttagttaaaaaacatgtatttatgtatctaggcatgctttcttagttttagttactggctcttattttaattgtgtgagtgtggtgtatagtgaaaagtaatggctaaatcttaagaatttttaaagcaaagattaaaatcaaagcaagaagccttcctcagattctttagtttttttttttttttttaaataaacgttttaaaacttggtaaattatgtaaaggagaactgtgtagcattttcaatgccagattgaatgtaaacagggatgaattcttgaccaaattgtggaaatgtctgaggtttattctcttggtccaggctcagttttcttgcccagaattgccctatcttcactgccttcattttttccccacccctaagtatgttactgtagttatcagaaacctcatgcctttgtatttctcttaattctttttttctcctataaaagtgggagaaaacagacatggtctttgaaagtctttttaaattacttataaagagtaaaaacacctatcttggttaaaggagattcagttttttacatgtggataagagagtgaaattgtgtttccttaaaatgatgtgaggtatcctcttatcttgaacgctatggaattgggtgcctttatcattttcccctgaaacttccagcttttaggctattccaggtttattttctctctgttgcccactcgcatccagagtgaaagaaacgaaaacaaaccctctttcttttgtacccaaatataagtttgaacctttttgcttaattttaatatcattctaaaacttttctcccgagagtctttagacagatttctcatatttcctaggaaatctgatattatctaattttatatttatacttctctcctttcaaatctcttgaagtggctaatcagaaaaaagcatatacaataaaacctgaagtaggaagtgagattccaagtgaaagaagaactaattattttagttttctgagggctaatagtaactctgagtgttgactgccagaaagttctagttggtacaaaaagaggcacgccagttgagcaagagaataatattagaagtagaaggcacatgcatgtttcagaaaggctctgcagaggaaaggtgatacagcatatttgagaaattgagagaccggtgtacctagagcctagagagcaatagagtaggaattggatgagatacgtggcaatcacatcatggggggcaagcactggattttggtatttatcttaagagcagtgggcagcaattgaagagcttttactaagagcgatgatttgggttaattattaaagtatcactggctactgtggggaaggggacagataccacgattggaatgggcaacttaattagatgatgctaatgtaattgtctaggttggtggtctctcagtttttgagcttatcccctcatacatgtgtgtttatcatttatatatatgtactttgttgttgacaagttgagtacattataagacgttaaaaaacagtaaaatggatgagaaaaattaatgaatggaagtgctactatttttttccctgccccaactgatgtatgttaagcttctgggatacttgttgccccaccctgaacatgactaagcaagggatcatggaacaagaacagtggcaatggagagagtttggagagagaaattaggaggttgcattaacaggacttgaaaattggttaaataggagtaaaagaaaaggtagtggatttctggtttgtgtaactgaatagataagagctctgattaaagagtcaaccaacactctgatagatgctaattgtgttaaagtagcattctgccagaatgtggtggtttctctgagcatatactcaataatgcccttagtaacaaatggtaggagggcatttgatgggcaagtcttgatctgtgttcaggaggaggaagcagagcaatgaacctgaggacacaggttactcttgcctttggaggcattagggtatgacagcattggtaaatgataggcccctcaacttccagttgcctcttcaagtgtctttagctagaggcagggccattcatttcacgactaaaaataaacggcttacaaaacatggtggactgaggaacatattaagactattgccagtgcagacaaataatttttcagcaagttatcaactgatagaagtgattttcatattggcttagaagggaataaaatgcattcgggtcataagttgggagaggattgcaagaaataaaggatgggaaaaaaaacccaatcatatatacagttttgccttaaggttgagtgaaaaaaaaaaggcgggggggaagatgtttatgatggtacattttcatgtgtagctatatatgcacgatgctccatttcctgagatatagaaaagtttttttatcacattttaaaacaaaatttgaaataatatttttgaaaatgtttcaaaatgccactttaaaaatgcattgctttgaataaaatttactgtttgtaatccttatgcctcctagcacagtgccctgcaatgtggtaacttttttttttaatgcagcaactgtaccactgcagtatctgcctcccttctattctagatacctttgagcaaacgtaaactcatttgctttcattctgtctcaaaaatgtattgcgtagaactttgcaatcatgagagaaatacctggggacattactgatggtccgaagtgtgaacaccactaatttagatgctgatgttgtgatcactcacccagtcaactgaccagccttccagagaatgcaaatcagattcaagccagtctttaagcaaacatctcatttaatcgtaagaaacaatgctgagatgggtcatatccacattatcaattgccttgggactaattgctaataggagaaactgctggttgtgaaaatcatgaatgcagagtctactgtagtaattatatacagtaataaaatacagtcatgccaatcaaatctaaacagcctgtcgttttccactactgctaacttacccagcgtttctacatttccctgcttgtacaaaacgcctaatggtaaagtatgttaaaggcaggggtaagcctgaaggatggctgtttgacaactgcattagcgataaagggacagccatgaaaaaaaaaaaaagtcaataggcctaacttaaagagaaatgtcctttcataggtaaaacgtaaggtttatgtaacatcagtgctagtgttaaaaagtatgctgaaaacatcgtattactgaatttactcaacctggacaataagtgttctttcccttattctgctctgttgccctgactgaatgaagaaagagttaatggtatcagtattaagcaggaagttctgttaggcttatgcatatgatggcatgaataatttagcatcttcaggaaatgcaaactgcagtagaatttaagcaacctatcagaatttagatcaatattttacatgatagtatgaaattaaagtcagtggaaagaagatgcttaaagataccaagtgaagaatgttaatagtttaaactgtgagaaagactgggaattttttattggaaatgttttgtcttacgaagcaataatggtttacctgcattctgacacttgtcagatgactttttgccaacatgattggtaatgggatgtggcagtatctttgctgtcaaagaagagataatttctcaggtttttcttgtaagttttaaaaattgtccttatgggtttttttttctctttaaatatggaataaaggaactgaagggtaaaacctgaagactagtcatgtttctttaataaaggttttatagaagtagccatttgcaaacgtcggtaagacagatttttaaaaaaacagtttaaacttataattattgaaaatattctaaattgtttatctcctgtggaatgatctcattagcttggtagacattttatgtgtacgcctgtggtctttctatatcttatgtcattactgtaaataaatattgtgcatgcaactttaatagattgggtggttggaagtacttagcaaaggtgacatttatcaatcttattttgtgtttgcaaaaaaaatacagtgtatgtaatattttcaaagcaagacaattggattatgttaaataatttctaaaaatgatgaaaaattctcttttatttaagacattaccatttttagatgtgtgttatttaattataaattggtttggttctgatttttctaaaacttttagttagcatgagttgtatgttttaaataataacagtcttaggggagatctaaaacactgtcttgtttgcctttatgtgggctttcctaagccccagtgcattttaaccactaattgtttcttggttaataccaacggaaaaagaaaatctttcccatgctgaaaataatttcttcaggattttacagaaaattattgatgtaaagttttggatgtcactaaagtaacagtaaaaaaaaaaatttacttttgtttgtctcatctcaattttgagtgtcactttgatttcatataaacccttccccttttcatagatcatcaccttctcattgagttttttctcctaaagagaatttacttcattgacacttaagctaaaatttaatgtaaatagcctaaataaatggctgtttgatctggccacacatttttaataagacattttgtcaagtatgtatatatatattgagaaaaaaaatagtaacatgtggcttggtaaaaaatgaatagctgacttttagcaaaccaaagatattcttattttgtatcagtgaatataaaactctttattgcagtgtgccgtttataatggctttggtctctttccaactagtaggaatgagttaatcttaagcacttccaagcttaaatttttttcagattcaattctcctaaatgagaatatagatcttgtgaaattaacactaatagccacagatcttggcttcctctaccttatcttcattgactttaaaaatatataaccctaaaatgctggttgcactctttgaccgtataacttaggaaataactaagttataagtgcatcatttgatctatggctgcttacagggtttttccaccaaaaaacgattgcataaatttttttaagagcctatgttaaagaggatgcgtttttattaaattacagagcttccaggatgaggatctagataggacgtatgtataaatacattttgaacatttcaaagcaccttttagtttatgtgaagttcttcagatggccccgttgtccttcgaagcttctaacaccaaggtgtctgttgcagcccagagcaaggttactgctacccaggacagcactaatttgcgatgtattttctgtggtaagcaacattatgtttacattactttttcaagctgtggtacatgctacttgcgcatttccataacttttgttttcttaggccatagtctggtttgtgatatttgggatatatagcaagctattgtttttatgttgtgatatttgttgtggttcatgtaggtgatttggtcagctttgagttggcttgttagcgagcattagaattagttagaattaggatcttaaaacacttcttgtccacctcttccaacacaaatgagaggggtttttgtttgtttgtacttttttgtttttaattattttgtttgggagcaaatttttgatttagaatttaaggaaaaaatttatgtccatcttaatatgatttgaggaacgtaaatgtgccttgtgcaaaggaaacttttgcttaacttgaattaattttaggtgtgcatgttgtgaggcagatgtaagctattacttgctttaataggttgatttctgattgacagcctcctttattcagtaggttagaaatctgtgacttaagagtgaatttaggcttattgagtgttttctttcactctcactctcatatacacatgtgtgcacatatatgtattgtttgcatggacaaaccaggtatgtcacttagccaccccaaattagagagaataagatatatatctaaggatacgtatctatctataaacacagatagatacatatccttgtctaaattctttttatttccatttgtttctgaaactttgttttaaaaacccaagttccaaagagttacttttaattacttgagctttgaaaagaaacctcatatatgcctttttgattcatgtgtaccttgctagccagattattttatgagagagataaagttattaaatgatatacagtattgctccaattttacataaagtgttcagctctgtgtatgtactttatgtgactcagaatttttaatgtgactcctcaatactaatgatactgtttttttttacctatgaagagaattattttaaaatgtatgtactttctggtttaggcaaagaagtacgtgttgcaaatttctttaaaataaaaaaaagaaaaaaggaaagaaaagaaaaggctaatgtatttgttagtcacttaaagttatattttaggattgttccagaggacacagttacagcagtgagcctattgtgtggctgttcataaatccctcctctccctcccagatcccacaatgaaacactgcagattaagtgtgtaatcagtaactttttctcctcatttttctgcctcctcctgggggtttttccgggctatcttttgaactagtcatgagtgattattgatatttgtgttattaggactctctttagctcattttgaaaacccatccaatgttgtatgcctttctatttaatatgttgaggtccatacgcagaataatggatactttacccaattgcagagaaaatattgatttgacctaagtgaaggtgaatctttaaagttgtaaaataatgtgttaaaaagtagatttccccccattattacctttaatttaactgtgtgcaaacaatataattaacacgttgctaagtttaaacttgattgtattgtgtatataataacaccgatttgtcttttagtcctgtgtttttaaatagtctgtggctaattgtgaaaatagatttgtgaaaattaaaatgtgacagtaagtggaatgtgctttaaccaaaactcaatattgaaggcaagactgacatacagttcctattatagagtctcctgatctgattttaatcatttatagggtactgtatcagtgacattgccacatttctctgttacaaacagtaactcacagactttgctatataccttcttcttgtagccaggacaaattaagatcagccactatctttggctgtgagggagagaacaaactctcaaacagctgctattctttatgataacatagaaagagcaaagcaggttcactagtttcttaaccttggttgttcttccctctttttcccctccccaaagggctgttaaccaccacatgatgctcataaaatattgtcattttcccactgaaatggttatgaaagtacctattttgcattttatgagaacacactcatttaggaatgtgacctgtgtaaagtaatgtttatattcctgaacatacagcggcagctgacagactttgcctgatcctagttgctgcttcatgtcatgtggggtgcctttggtattacttaccaattttatagcccattagaatgtttgacaagaaggaaaaatgtaattgtgtaccttaaatttatatttacctggaacttttaatgtttatagtatgtttgtattaatttttaaatgcacataaatttcaatgtgctagttactgcaacctgacaatttgaagaagaaacaaacagaacaaccagattaaatgtagatgtgaaaaagtgccaaggggagtgattccatgcacggacacacacacacacccaatttaaaggatgtctggaaagacaaaaagcccaaaaatccattatcatcacaaagaaccatgtagaaaagaattgttaagagttgttctaggatcaaaattctccccattttaaaaggaacttccttgaagcttttcatctcagctgcaggaataaactgtagtaaattttttttataattatgataacagccacaaaatattacccacattttaaaaatctcctttctgaacagatttgcttagtaagcttttaaaaagctttaaaaaaatattccaaagcaggttctgtaaattgctaaaagattttcttttctcagcttttgtgagttacattaaacttgtgttagttttttaaaaacctgttaaataaaataaataggattgagttgaaattttgacgtcttttttgaatctatatatttgaattaaaactgagattttaattggcaaatttaatccattaatattacctttgatatataacacctgtcctaggtgtgtgactggtataattgcattcttctttgaggtagatgccaaacaggtctaacctactcacattcagctgtttcattatttaagcagcctgaggctttcaacttaaatactcaagtaaacattattttaaaaaatagttaaaacataatggtcttgtgagttgcccatgctaaatgctcacatttagtactttggatatataaagtacattccctaaataatttcatgctacctcagatttacccgcccctccccacacttgtgtgtccccagaagagaggtcttttctctgtaaagtattaaacatttgtgtatagcctaataggagagtctgtttttacatcattattttaatttcccaagaaaagaattctagtctgtttactagacagcaatcatgtattttcatttatacaaacatttacgtgtgtatttaatttcaaaagttttgtttttttttgttattgattacatgggattaatttttttttataatatttatttggttctcaaaatagcagactcttaggaaatctaatgaaatatatcactgcagttgtcatcaatttgtctttagaggacaaataaagtgattaatctaaaaacatttgtaaagaggtgagaaaaaaagttagtaggtaagttcagatcaaattaattctgtttttccacacttgggatacaccagtactgcattacatcctaataaatctttacttccggttgtgaaatctactccactagtataaaatactttgcacaattagcccatagattacaagaatttagtgcacagaagcatttatttcgtaacttattttcctacgttgtctacaaatctttcagaatatctgttaggagcatttgctggtacactagaattcacaaatatatgtagtgtgtcattactcatatattcttctccaagagtggaagataactactgtttctttactttcttgtttactggattagactttaagattgttctattttaaccctaggtattatatattaggtccagtatttatctcattttgtgacagatttgatttttatatccaatgacattaagatgtcccataattcagtggcattctatctaagatgcaaaaaacaggtctgcattgtacatgatatgtgggaatggatggtcattagtgtctcatgacagaaccatgttgtatgaatgcaagtttttttttcttcttaccctaaatgaaaacttaaaattacctgttacattaaaaattcagttcagtaggttaattactatatggaagtttagcaaatgtttgttttcaccagtgctggaaatgctaggctattagacaaaaatggcagcttaaattgggcaaatttgataaatgctttagcatactggagtctagtaataaggttctcatgctctctctctctcctgtttttcatttccagtgttctatttaggtgagtttttgaattctgatttttcatttaagttctccctctccacttcatgaataattaccccaaagagaatgtctcattgtcttagaaactgtcaagcttaggtgcctcttcagatgctcatcgaacacttgttttactcaagctcttcatatataaatgtttctttttccttattgttgatgttttccatttgtttcaagtaagccttctggagatgatgacagtattatgttgcagtctttcatttgctctgtgttatgtaaagcttatattttattttgctagacaaaaagaagacacgtttgtaaatatgtgatggttttatgttattctcatgattttatctcctctgtccagctagatatgaaaataatgttcatctgtaatgttttctccctctgtagggccaacattgcctagacaaaactcacaactacctgctcaagttcaaaatggcccatcccaagaagaattggaaattcaaagaaggtaaattttcaagttattgtttgtactttttctttatgcttcagaagacaaaactgaacatcctgtgtttaaagtagattatgtcttatcagctgtttaagagtcacaacttttattcttacattagtaagttttgtgactgtcattagtaagttaccagatacttgttatgctggacatgagatgttataaaatttcatatgtgtttttttttgtaaaaattatacttaaggtatgtttaaaatattgtaaatacgcttaacagaattcaaaatcttcttatggttcaagaagtcttacttttgtaattataaagtgatctgtgagtactatgattttcatgtgacaaatttaactaaaaagttgaaatattgttggctgtttctgtaacacattgatcttcagatattactatagggtttagtagtagaatacaaaatcattctctactgggcagcattcttccatgactaggagttctctgaaagtggtcagagtacgtaggctgacaggctaacctttggagtaccaggatggtgagcaggcaggcctcagaaccgcacaaacgctgagctactaaaagttccactggaagccccaactcatctgaggcagcttgttcagtttctttagagaacagtcttctgtggtaaatgccattccatccattgagctggggttggggaggacaggggaggagctggtacagctgttcttcagacagtgtatatacttattaatcagcttgattattgtggcactgctcattcccgttctctctacctgctgacctcaggttagatctttcccagattcctcttcccatgtctgctttgaccgtcttcagtatgtgttctgggttatggatgcctccactgctccatttatttatgtcacaggcattttttgttctaagtacttatattgggaagggtggggagagtggagggaacaaaaagcctgaaactcatcagacaataaacatgacatggtatagtagaagatggtaagtgctatggggaaaaatgcaacagagtaaggaggattatatgttgtgaaggggcagagggaagtgctggttgtaattttattttatttttccgtccattacttatcagtctcagtacttgtgagtttaaatagagtggtcagggtagatctcattgagatgaaaagaaggaattaaccaagcagatacctatgtaagtgcattctgtgcagaggccttaaggaaggatgatgcttgtgtgtacatgggaaaacaaggaggccgtggaggctggagcacaagagagtattaggagtagaggtcagatcatgcaggaccttgcaggctactgtgaagaatttaacctttactctgagagaaaggagaaccattgtacagttttgaacataggcatgatctgacttaaaattttagcagaatcagtcagtctgctctgttgagcctacactattgagagacgacttgaggcaggtgcagtgttgtgacagcagctcaacaagaaagccagttaagaggctgttgcagtgaactaggcaggagataatggtggcttcccccaggtgatagaagtggttgttgagaagtcagatccttatatgtcttggtggattgtatggtggggatgagggaaggagaggggttgaggtttttaggctaagctagtgggaaggatggagttgccatcaatagttgtgaaagactgcgtagagcaggtcttgttgggggatgtcaaaaatgaattttgaggatgtttggttgagatttttactggacatgtaagtagagatgttgaatattagtctctaggagactaaggaagaattctaaacatataactcctaccctttctgtcttccggaaatctcatgataaatttgccctactaatgaccaccaccttcagttttctacttggtcatgggtttatttatatgcattttaatgatgtttctggaattttagtagaattttggggaagattacaggactcctcaatctaccaacctgaataagagtccagacactcctgtcttgtcatctccctgctcagcattccttatggctgcctctcctcacatcagtttacttctttggcctggcatttaggaactcaccccatgtttgtgtttcaccccctcatgactgtctctgtgtacaccatactcatctttcgctctgtgtttgtgtgtagcattcacctcttctgacatgtccttctcatatcctttctacgttgtcattttctgtagactcttctccaggcacactgatgttcttgttttctgaattcctgtaacttaatcacacagtgttttgtattttcttcctacgtgtttattttacatttgagtattacctccacagtgaacattatgggctaatttgagagtagaaacctcaataaaatttctaataaaaagttaagaagtttctggtactgaattaatttatatgcaggttttggggtataagacagaaagtatatatttgacctttaatgtggtaattttcttcacttttgcctatgggtttagaggagaaattactgatgtttagctggtaaatggccttttagagacttcccaggtgctagggaagacattacctaggaaggttgttgagttgattaagataacacactcttttcttgctgcctaggattttctgtgttttttgggagttggtgggaggttcacggaggaggtgctctttgagctgtgcctaaagaggcaataaagtaggagtttccagtcatagaagggaaaagcattccaggaagaaagagtaggtgtgtaaaggcaaggcgatgcaaacacacgtgcaatgtgagtacgcttcctccttccccctccaggaccagtggtatggttagatgaggttgtgtccaccttgtaagggccttatatacaattataaaagagatatttgtcatttttctttgacatatatcccgtacaatctgtttttgcctgtggttaaaccatacttggaaaaagatactacaaaactctaaaatatctactaaatatttatatagacacttagtactggttttcactttctctcagctgacagtagtgcatggctggatctggttgtgtaggctagcaaacgggaaggatgtatagcacagtctagtgtgaagtttggttcccagtagaaattatatttccaaaatttatttcatgtggttatttatataaaaatcattttttaaaacttgatttaatcttcagaggcacaataaaataccctcaggccaactttttacttcataagttgagtgaaattgtcctgttaactttggctgtttaactggcctttttctatactattactggaacgtgtagtgaaaaacattatcagtttgcattataaattcacagctgtgaggatgtgggtgaggtgccaaatgaaaagagggattaggtgaaagttggccaacttggcttctttcccttgctcagctcctagacactggcagccagacctgtagagcccagcaagaaactaagattcctctgtgggaaaattgccatggccaagagaagacagagatgttgacactcgtccttgccagtgaagctcatttacttaagggcctctgatcaactttggtgctgcttataaatatgaacagacagccaaggatcatcaaacctttcaggccaacttctataaaagaaggaccaaaacaaagagttgaaattgtatgaaatagatgcaatgcagggagcggaagaaaacctaaaaatatactgcaatagcttcagagaactaggagaatatatttcattgatgaaataaaaatgggtagttattttaaatggatcattcagagaacaagaaagtaaacttggaaactttttttaaaaaccacctcactgtttttttccccgccgagaaatagaagggcgtgtgctgtggcttacataatcccagcactttgggaggctgaggtgggcagatcacgaggttaggagttaaagaccagcctggccaatatggtgaaacccggtctctactaaaaatgcaaaaattagccaggcctggtggcatgcacctgtagttccagctacttgagaggctgaggcagaagaatcgcttgaacccgggaggccaaggtcgcaatgagctgagatcgtgccattgcaccccagcctggcgacagagcaagattctgtctcaaaagaaaaaaaaaaaaaagagagagagagaaagaaagaaatagaagttttgagaactaaggttgaggaatttattctctgaaaatagtcctaaaacaaagaggtggcatatgagaaagaaagtaaagtaagaagatcagattagaaggttcagcatccaaataatagaagttctgggggagtgggaaggagaacaaaaacgtgaagaaattgaatttgcaaataaataacaagaaaatttgctggaactcattgatcgtctagatcaaaggtccgcaaactttttctgggaagggccatctgtgtcatttgctagactcttcctttgtagctcgccatagacaaaacggaaataaatggttgtagccagatttggccctagggctgtatacagtttgctagcttctggtttaggtcaaaaaagctcaccaaaagtccagcccagtaagtggggaaaaaaacaaagacctcccaccaagacctctcactatggtattttagaatgttgtcctagaataagtaagatttcaaatgcttggtaaggggtggtgggagtgacaaggtgggggagcttcaaaatcctaagagaatctctttccagtctaaaatctcctcttctgcacaacttcctaagaagctattggaagatgtgttctgttaagatgagggagtaaagcaagaatgatgaacccatgacagcatccaggagacaaggaatccaacttaggaaagagataggtaattcccgcacgactaaggtcaaagcaaaacctagggaatagcccatccggttgggggcgctgggagggctgaaggctcccgacgggtagtttctgagggaaagcaaaacaaaagaatagaaaaacctgaccgtggttctgctatgttggaccatgttgatagggattacagttctaatggagagtttggggtgaagtagggacaggtatatagaaaaagaatcaaatttttaaaagtactactttttagcaccaaagtaagaaaaaaattgttctagaaagtaaatgtgatcagcagtgaattatgtgatatgtgaatattggtgtatccaaagtggtggtatgagtttattgggaaaatggagaagaaaaagttttggggagctagagatataggaattaaatcatttgtatagtaggaagtcagtagataacatctaaatatgaaaagtctagaagtaatagttctaaatgaattactgtatttagaaacatgtgataagtaccagagtattgaaaataattgcttctggggagcaaaatcagaagtggtgagcgttagtaagaggattactgttctaagtcttataatataatttggctttttaagttatttattactactgttatgtttaattttttatttttaataaatgtagagtcaatagagcacatgtctaagtgttcattcttattagtccaataccctttattattatatcatttattaaatagtttttggttcctactcatataattaatatttggcttggccatgatgaggaaacatattctaagaaacatgagtcagtcctatgttagtctccacatagaaccttaatatagttaatatctataaatagttcgcaaatcaccagtactatctgaaagttataaaaggggaataataattgcggcacagaactgagcagttggaacaatgagagtgtatagccctcctattggccttcggaggccggatggaccaaaagttgaccgccttctcttgtgagtatcaactcttgcctcagcggctttgtaatattaaaacttagctgtcttattacattttatccattttttatttgtttactgatagtgaagtgaaatgctcatgttatacaatcaaactgtatctgtgtagttttattttctgagaaatgtcaataataacagtgttactaaatattaccaactcagaacatttttcctagactgttcctacttcattttgttaaaattgaaatcattcttatttacctagtaacactattcattataggtaaagctgggtgaaatgtattttgaactgatgttacttaacattttacttgcttcaagaaatgtctttgagtcaacataaactaaataatgaatatatatttaaaaagctattaatctcaatgtgggctgatgctttgtgcatctatttacatttggggatagctgttttggagagaaataggtatttgggtggtggaggaactgtgtctgatattttttaaatgcttaaaaaataatattggtgatttgcactataattgtttctgaaaaaaatttatattctcagaaactttcaaattattgtagaatatatatgcctagcttaaaagaaaaattaaagtagtccgtcaggatttttcatggttcagaattaaggcactctttctttgaaaaaagtcctcagacgattctattaatgactgaagaaaacagttggagagagaactctaggaagaggagccatgtgcatttccagtatgtgaattggcagcgataattctgaggaaaagcaaagtttataaatttggaaactcctcctagaaagctacacaaatgtcttgctttagaggtcaaaacatgagagtcaaatttataaaccatccaatttaggtgggaattattcatgccacacaagattcggaagccagagattttctgcttgaatcactattttgggaaatccgtttagatgggcatcttttcagcaagcaagctaaaaattagcttaaagtgttcaacactttcttttcttaccttcagaacaagaaaatagtaagaatctcctgcagctatatgaattgcctgcttgaatcatctgtctgtgaacttagaaatattttccagcattgtgtccttttcctatatcagtagacactccttatcttttatagcctgaaaaccctggaatatgatgacatgtggaacaaacttcttaagtcaatacaacctagctgtaaatgctgttaccaataattctttcagattcacctcacccatgcctggccttctgcttgtgacttaagcttactttttgtgtgttaaaagcattgtattgcttagagaaacagccattaacttggtggttaaaaaaaaacccaactactaagaacttgaatgagaaatgaaatgtagtcatagaatactatttggttcagctgtgagcagtatttacattatcatgttaataatgtaagctgtgaatattgattttccatattgggagaagcatgagtgtagtgagggagttgtagaaggcatcttcctgttagaaagtagatagcaaaagctaaaatgtaagaaacagctgcaagagtaggaaacgggtgggagggttgaggcagtgaactactgatttttgttataaactttaaaaactatatatttatgttgttttggtaaaatagaagaagtaacaaatgctcaaagatctaaaaacttagatcttttcatcatagatttcttgggacagctactgtgctcttaaatgtttctctttagcttctgtatttaaatttgttctaattagaataatatgggtgtatcttttgccctttgggcccaacagattgcttagagcattatatgtaaaatggcccatattttttgatgtaggttgaattatctgaaatttaatacaggctccagctgagtttattaactgcaggttactggagaaacaacaacaaccaaccctgactttcctctgtttattattaaaaacattcttttgaatacatctaatttcttcccctcatccctgcagataaagttattgttatccctcaaaaactttggcagctagtgatttatcaaatagcataatgaagtccgtactagatcctgaaaatctgattttattagtagtcagtatctcaaacaactactcataaataaataactactcataaataaagtcagtttcttgtgtttttctcttgcagtcattgttaagtgtgatggtatgtccaggagagggtgtgtgttttatgagagcagtggggttgatgtatttgtcaaatgggccttttcttttgttgtatagccagcttaggaaacatgaaggagagagatttttggaaagatcttactggtgtgttggtaccgctggaaggaacaaagggatagcatgcatgtgctgtcatttagctttgtctctaactagacccacccagtttattagccagtccagaaagtcccaatttgaaatttccaaataataactattgttgggccgggcgcggtggctcacacctgtaatcccagcactttgggaggccaaggcgggtggatcatgaggtcaggagatcgagaccatcctggctaacactgtgaaaccccgtctctactaaaaatacaaaaaattagccgggcatggtggcgggcacctgtagtcccagctactcgggaggctgaggcaagagaatggtgtgaacctgggaggtggagcttgcagtgagccaagattgcatggctgtactccagcctgggcgacagagcaagactctgtctcggggaagaaaaaacaaaacaaaacaaaaaaactatcgttatagcccacattgaacgttcttatgtttcaagtacttcttaaagagcttttaggtattacttcatttaatcttccccacagtgctatgaaatacgtatgtgtaagataaagatacttttttttttttttttttggagacagggtcttactctgtcacccaggctggggtacaggggcatagtctcagctcacagccacctccattccccgggttcaagtgatcctcctgcctcagcctcccaagtagctgggattacaggcgcacaccaccacgcccagctaatttttgtaattttagtagagacagggttccaccatgttggccaagctagtctcaaactcctgacctcggcctcccaaagtgctgggattacaggcatgagccaccgtgcctggcaaagataactttttttttagggaaggttaattgacacaacttttcctaaagacaatttggaaccatgtatcaaaaatcttaaattcataccttttcacctagcaaaatttatgtccttattgatcctatagaaacagaaaaagattcaaagatgaagacaaatgttattgcagtattgccaatagtgttaggataacttaatatcctactgtaggagactgcttagactgtggacagcaaaataatcgaatattattatgcactcatggaaaataaagatgctgaactaagtgccttaggataactctgtgtgtgtgtgcgcgcgcgtgcgtgtgtccatccagagttgtacacacaggcaggttctcatcccagatatcctcagttttactaacttatgtctccctccctccctccctccctcccttcctcccttccttcccttctttttcttccttccccgcttcctcctttcttttctttcattgtttttggagacaaggtgtcattctgttgcctgggctgatgtgtgatgatgcaatcttatcttactgtagcctcagactcctaggcccaagcaatccttctccctcagcctcccaagtagctgggaatacaggtgcatggcaccatgcctggctgattttaaaattttttgtagagatgggtcttgctttgttgtgcaggcccatcttgaactcttgggttcagacaatcctcccactcagcctcccaaagtgctaggattacagctgagccactgctcccagaccaactttcacaatatattaagtgagagaaaggaaagcagatttcacagtagcgggaaatggttacattttattttgtttttaaagtttatatgtgtatttttacacaaggggaagtctagaggtatataggggtgcgtgtgtgcgcgtatgtgtatatatagatgtgtgtctttatatacatatgttgatgatagttgcctctggatatgagatttcaatcatttaaagtttatttcttctttcttgactcttcttcattcagtaaactttttttttttttttgaggtggagtcttgctctgtcacccaggctggagtgcagtggcacgatctcggctcactgcagcctctgcctcccaggttcaagcgattctcctgcctcagcctcccaagtagctgggattataggcgcacgctaccatgcccggctaattttttatatttttggtagagatggggtttcaccatgttggccaggccagtctcgaactcctgacctcaagtgatgcacctgcctcggcctcccaaagtgctgggattacaggtgtgagtcactacacctggcccattcagtaaatatttattgagctattgctgtggccagtcattgtattttctgaaatattatttgtacaattaaatttgatattaaggatattacaattacaaatgttttcactaaataattaaaataatgacttggttattaaagtggtatgttatttggaaaattcatttacttgcaacactactcatgaaaagtacagaataaaatgaaatgttagtgcaatgtgctgaagcattcagccaatatgatgctaataggagaaatgattttcatttgtatgaaacagtctctatccaaggtagccttcatgtgggaggagagatgtttgcatgctctacattgcttttatttgactcagaaatagtttacataggtgaaaagaatcgctttttcatgatgagtagccatagatgcatgtttttacttttttttttttttttccagacaactacaagaacagcaacggcaaaaggagctggagcgggaaaggctggagcgagaaagaatggaaagagaaaggttggagagagagaggttagaaagggaaaggctggagagggagcgactggaacaagaacagctggagagagagagacaagaacgggaacggcaggaacgcctggagcggcaggaacgcctggagcggcaggaacgcctggatcgggagaggcaagaaagacaagaacgagagaggctggagagactggaacgggagaggcaagaaagggagcgacaagagcagttagaaagggaacagctggaatgggagagagagcgcagaatatcaagtgctggtaagaagtttacaaactcttctgtgttcttgtatctgagcttggatgatgtctcttgtgcagtcatgtgttaaaatatttcacatttgagatgtttgggattaagccatacaatttgaaattatgaataaatatgcagcaattactactttaacattttctttttatttctctctgtattgcttttattgcttggagacttaaagaaagctcttggaaatttttattctgccattctaattcttctaacaccctataaaatggctataaagtgtaagtgtgtttttatgggaaattttttatactggatgaacttcaaatatatttccctcatgagatcacttaaattgtctcaaatactatagtactgtagtaccattcagcaagaaatttgcttgattgcattctaaagattttggaggaagaattattttagagaaatattctctaagactagttatttaaatatgctttctagtattatgaaaaattagtgaaaattatggaatctggaatttactgaaagacataagggttaatatatggctgaaagtttgagatattttaacgtttattaaaattaacattcattataggatttaagaatattccttatggcctaattaaaaagtcttaatgtggtttgattaaacagtggttggttggttggtttattaagttaatttatgtatttttagctacctaattattttctggagttatggccaacaaaacaaaacttttccacaagttagcattgaataggagcattgaacccttcatattaaatgttttgccagctttactagttttgctatttgttgtttttaaaaaaacaactaaatttattcttctgtttatggtcctattcatgtgattttaatgtcctttttcttgtagactaaataaaaattaagactaatactagctttttcttgtaaaagaaattagtcaattaaatttattaatccacttattagataaaaggaaacttatttcatccccttctgaatctcaaaatgtatttacaagttaaaatattcttgggtgaaaatagttatttgcgtttgtgcctaattctctgatactaactgtagtctacatttatacattgtgtctgaatgctggttttgtggcttcactagctccctttttctctctccttttttatcctgtcttttgctgctgctttccaccttctgtccagctccatcttcagacagctccctgtataacgctccacttcctgagtattccagttgccagcctccttcagcacctcctccatcatacgctaaagtcatctcagctccagtgtcagatgccactcctgattatgctgtagtgactgctttgccacctacttccacaccccctacaccaccactgcgacactcagcgacacgttttgcaacatctttaggttcagccttccaccctgttcttccccattacgctacagttcctcgtcctctgaacaaaaactctcgaccttcttctcctgtgaacacaccctcttctcagcctccagctacgaagccctgtgcctggtctacttccaatttttcgcccctccctccatctcctccaataatgattagcagccccccaggcaaagctactggtccaaggcctgtcctccctgtttgtgtttcttctcctgtgccccaaatgcctccatcaccgacagcacccaatgggctggttgactctgtaacatatccagtgtctccaccgcctacctcagggccagcagctcctccgccgccgcctccactgccttccctcgcatcactctcacactgtggatctcaagcttctcctcctccaagcacccctattgcctcaactccctcatccaagcctagtgttctcccttctccctctgcagctgcccctgcctctgttgagactcctctaaactctgtgctgggagactcttctgcttctgagccaggcttgcaggcagcctctcagccggccgagactccatcccaacagggtaaggctttcattattgctactaacagctaatcacttgaaaatgttatatagcagtgactttaattgcctgaatggatgggtaggatggttttgatccttgaacatttatatgccataatgccatgctttttttttttttaattaaaaaaattaaagtagaaaaatgtttttcctgttggattaattgcatttggaggaatttccttattgaactaggttttgatatcttttatagtatcgcagttaaagatgttttctagtatttaagagcccctcataatacatttctttatttttttcttttttttttttgtttttttgagacagagtcttgctgtgttgcccaggctggagtagagtggcacgatctcagctcactgcaacctccacctcccgggttccagcaattctcctgccttagccagctgagtagcaggagttacaggcacatgccaccacgcctggctaatttttgtatttttagtagagacagggttttgtcatgttggccaggctggtcttgaactcctgacctcatgtgatctgccccttcggcctcccaaagttgctaggattacaagtgtgagcaccgcacccagctaatacatttctttcactgggaaaactttgcttgacacgttgatctaccacacaataaatacatgatctaaattgttttccttcatttttctgggagacttagagagatatatttagtgcccaactgtagtcattagatacgtcatcccagagtttcctttggaacagttctgatcttgggccctgtttccttcttgcctttcctatattagatgccccatgttggacttccaggataggtgtcaccctaacccttggagcattatgactttgcaggaggagtagagaggatggcagggttcatatatgccctaaagggttccaaggtccaaaattacaataagtagtggcttgaaggggtaatcaagagagaatagcatcctctgtagttattctccccgtccctaccttattgttatggtaacagggaaggcaggatgtaatctctaagtggattatttgtaagtagaaaaggacctggttctgtaagtaaataagaagatgcttggcaaccctagtttttaaaatatgatttaaggaggactacagaaagaaaactgaaaacaaatttgtacttaaacattgcaaggcttgttattgctgtatatgtatatattttgttgttgttgacttacaaatttgcttaaaaggttagtcagaattctaagacgttcagtttggtttcaccatgacagttatactgtacaaaatgggcacagtcagcctgacaaagtgacctgctgtaccctcagaactcttaacaacccctacagaagggacagactatttctagatgcttcttttaacaatcgatgttttctgcttgtgtaactgctcaagctgaaaaagttagcaattaccacccagtgtgcaaaatagcattttattcgttctgaaaacacccctcttaaaccttaactaaaagagcacctactgtttcaggattctgttattaaataaattcttgttcactccctttgtgattttataacatttgaacatttctcttcttgccccccattttgtgggataaaaacaactctacttcaaatcctatggtatttaattatttccgagcgttattttgaggttttactttgtactagtaaattcctttacttcagtgattctcagccttggctatccattgaatttaaatgtgaagtattttttaaaatgctgaagctgggacttactcctccttcatgtttttaatacagccactttgactgtaaacaattaaatgtatgtgttcactgttactgaatttactgtctcaacacttaaggttaatgtggattattttgggtctgatatttcaagtagtactaactgccatcctatatactagtttgttttttcagggacgcttacctctcttccaaattttataagtatttattttgcttatttaccaaatccccatgaaaaaaaaaagtcttaattagatgatctgttgcatagttctattactaaagctctaacctaaagtaagtagttatatatacttggaccttacatttcagtatctttcaaaaactgatctagacttttacaactatgataaattggactcattaagtaaatacatgagtcagtttaatttagcatggcattctgcgtaccttcccacataaaataatatcactcagctctattgttgatggtcttacttaacatttctctctctcaggcattgtcttgggaccacttgcacctccacctcctccaccactcccaccagggcctgcacaggcttcagtagccctccctcctcccccagggccccctccacctcctccactcccatccaccgggcctccaccgccccctcctccnnnnnnnnnnnnnnnnnnnnnnnnnnnnnnnnnnnnnnnnnnnnnnnnnnnnnnnnnnnnnnnnnnnnnnnnnnnnnnnnnnnnnnnnnnnnnnnnnnnnnnnnnnnnnnnnnnnnnnnnnnnnnnnnnnnnnnnnnnnnnnnnnnnnnnnnnnnnnnnnnnnnnnnnnnnnnnnnnnnnnnnnnnnnnnnnnnnnnnnnnnnnnnnnnnnnnnnnnnnnnnnnnnnnnnnnnnnnnnnnnnnnnnnnnnnnnnnnnnnnnnnnnnnnnnnnnnnnnnnnnnnnnnnnnnnnnnnnnnnnnnnnnnnnnnnnnnnnnnnnnnnnnnnnnnnnnnnnnnnnnnnnnnnnnnnnnnnnnnnnnnnnnnnnnnnnnnnnnnnnnnnnnnnnnnnnnnnnnnnnnnnnnnnnnnnnnnnnnnnnnnnnnnnnnnnnnnnnnnnnnnnnnnnnnnnnnnnnnnnnnnnnnnnnnnnnnnnnnnnnnnnnnnnnnnnnnnnnnnnnnnnnnnnnnnnnnnnnnnnnnnnnnnnnnnnnnnnnnnnnnnnnnnnnnnnnnnnnnnnnnnnnnnnnnnnnnnnnnnnnnnnnnnnnnnnnnnnnnnnnnnnnnnnnnnnnnnnnnnnnnnnnnnnnnnnnnnnnnnnnnnnnnnnnnnnnnnnnnnnnnnnnnnnnnnnnnnnnnnnnnnnnnnnnnnnnnnnnnnnnnnnnnnnnnnnnnnnnnnnnnnnnnnnnnnnnnnnnnnnnnnnnnnnnnnnnnnnnnnnnnnnnnnnnnnnnnnnnnnnnnnnnnnnnnnnnnnnnnnattacaggcacccaccaccatgcttagctaatttttgtatttttagtagagatagggtttcgcgatgttgaccagactggtcttgaaatcctgacctcaggtgatccacccgcctcagcctcccacagtgccgggattacaggtgtgagccatcgcacccggcctacacatgcacttttgtttgaatgatttgagagtaactcagagacacaagcttctattttcctaagtacctcagtgtgaattttataagaacaaggacatttacctgcataaccagtaatataattatcaaaatcaggaaagttaacatgatagaatactgtaatctacaaatgtattattcaaatttcatctatagtccaatgacatctttagtgacagtttttttcctagtgcaagatcatttattgcatttagttataatgtctctttgatatactttatgacagttcctcaatctttcataatactggcatttttgaagactgtaggacaattattttgcctgttatccttcactttggcttatctgatttttcctcaagattagattctagttatgcaggggttgttttagcaggaatattatcagagcaaagtcatgcccttttcatggcagcacaggaagagatacatgatactgtttcattgcattcttggtgatagtagttttgataaactcttgttgatatataaagtcatgctaagaatctattggttcttaaagcttaaaaaataatatttaggttttttaaaattaatgctgatgtttccttctgttttagatgtaatatattaataaaaatatggttgtctaacataggagttgattatgtctgtatattctcattaagatggaggatacctctttcccaagtggagggaatgctattggtgtgaactccgcctcatctaaaacagatacaggccgtggaaatggaccccttcctttagggggtagtggtttaatggaagaaatgagtgccctgctggccaggaggtaaggaatttcattataatggacatgcccagaattgagaggattttaattgtattccaaatacaactaactagatgcacttctttcctcgtagagaagtggtttttatactgaatcagataatatttttaaaaatcggatttgccttctttgtaggagaagaattgctgaaaagggatcaacaatagaaacagaacaaaaagaggacaaaggtgtaagttaataaagatagtctaccataccttaaaatatggaattcaggcacagctcattcaggaaatagtgtcagcatttatttaatttgggcttaattagtttgaacttatatttgctaatttttaactatgcatgtgaagtggcttgttttgactgttatttataaatttttaatggcagtcttagtaaagtgagttgaatatgtgaaattatgggaaaagcattgaagttcaaacctgtggagtttaattctgttccttaaatgagtgaatgacatttcactacttttttcatctcttagaatctcagttcccttgcattaatttaaaaggaaggaattcgcctaaattcatatgtttcccttaggagcttgatggttattggctgtgccccttcagagtgtaaccttcatgccctcctccctgattcagctgggcaaactctgctttgtctgtgctgtatattggtgtgcaacaaataatatgttccccctgctccatctggccaccttagatgccattcctcaaatctgtctctcgtgtctggctttgtagcattggctagtgaaagttctcaaggagaacacatgaggaaaggagctgtggggagggttgaagggaagatggttgaagacaggagaagaaagtctaagctgaaatgaaagggagagaagaccgatgaaagagaaagtggggagtggcagaaagaatattagaagtgttcgtgtaaaacactaaatgtatatagcaacaggggactggtagatgtgatattaatatatatctgtatatttaggaagattcagagcctgtaacttctaaggcctcttcaacaagtacacctggtaagttcaagataaatattttaacctttataaactttctctaaatattaatactccccagttaaaaattccccctttccccatatttggaccaagtgactggacactaaaatgccagagttctttgttcccacctgaaagcattcacttttttcctcctggaagctgctgttactttcttgaggttacttactaaaacaaggaaaatattaatgtactattagatgacaagagtatttttcataattgtttttctagaggtaaaaataaagtgagcatgttagttagtactacagtctgcttcagaacattctcaaattgagaaggatgtcctagccattcatttgggtgatattgataattaagggaataaagtttctgatttgtaaacttaaaaagtctccttaaaattttggggaagtgttcttgaattcagtgaaatttctgacattgagaattcttgagcatctgataaatcacctagaatattaacaaaagtatatttcactagaagtacttgatgagtactgtatccaagatgagaatacgaactcattacatattcacatgttatttcttcatatttgattaaagactaagggctggactatctattgaactccttatctattctggaatgaaatgacataaataaacttgatgagttaatatctagagtggtccataagaaaccattatagagaaatgcttatattcctacagttttgatttaaagacaaccagctgcatctacagttccctttttaattttcatttttttaatttttttgagatggggtcttgctctgttgcccaggctggagtgcagtggtgcagtcttggctcaccgcaacccccacctcctgggctcaagtgatcctcccaccttagccccccagccccctaagtagctggggccacaggcacatggcaccactcctggctaattgtttggatttttggtagagacagggtttcaccatgttgcccaggctggtctcaaactcctgagctcaagtgatccacctgtctcagtcttccaaagtgctaggattacaggcgtgagccacagtgcaccacctagaattcctttttttttttttttttttttaagtacctctgaagtttttgtttttgtgattgtaatccatcttttcaccactccccccattcctcattcttattattaaatggtgactcttcagtaggttgattgctataccataattaacatcatggctttgttttccctctgaataggactcagtttgttattttcattaaaaattcactggtttgtgacccacttattttagctttatccttctttctgtaagccaaaattaattgtatgtactctcattagtaccgcatagatgttgtaaatccgaaccatattttgggctcacagaacctttagaatatgatgagagctatagatcctctttccagggaggaaaattgtatttttattcagatttgttcataatttcagaatattcatgaatttcttgaaggttatccatggactccaagttaaaaattccttatctaatatataatcccttatataaaatatgaaaaactaaggcacaggttttgtgtgtgtgtcatatatataaaatcaaaaagggcagggcctgttttctcacttgtttcattccgtttttaaactgacattgtgtcaggcacctgaagtgaaaggtacaggtcctaagcccaaaaaaactcatggtacagctgggaagatgagacacacaggtgtgaagttaacctttttacaaccacttgttgaatactaagtagtgtgtcacagagggaggaaatgacacatacgagtcacctgagtcaactttgtagggaaaagtgacatcttagtattccttgaagagtatttagtttggctgaaagtgaggggaaggtgtgatatttcaggatgtaagtatagcatgagcaaggtatggagttggagatgagcaagaagagattaggaaataggaaatagactagaacggggaattctttttgaggaatattgtagggaaaaggttgaaaatatgagttagaaacaaaaatgttgagagccttttataaaattatcaagagtttagactttatcctgcaagtactgagttcagtggacatttaatccactgaaactgtttgaggcacattaaaatggcacttgtgattttcccattgaaactagggaggattaagataggcagaccaattaggaagctctatacgcatgccagtaaagatcctctgaagggaacccagccttgcccctcctgaaacacacccgagctccttagagagaagaggcccttgcttctcagcttccacagggccagctgaaccagatgagcccttttaagactaaaagatagttctggtttggctgattgagaaaggacctcagccagctgttaaaaggtagcacttgctacatcttaaccactttggaattactccctcatccttccacccgcctcctctttagtgacagtgtccgatgaccgttcccttccctgtcccggtgtccctcagtttcattcaggacttcccttttttcacctgcttgggctggtgtcacttggatatgtttctgattcggcctgtcccaaaccccatccgattatttgatcttcctggtcaagtgtggaacttgacaccactgtggcggtcattgagaggctgtgttagctgttagaatacaaaagaaggaatataaaaaagaaggaatttagttgatgaggagtaaagcaagatcaataatgactttaaggtttcacatctaatgccttcatgcaacaagaaatccagaaccaaaagcagggcttcatggaagagtgtgagtttatttttgcgttaagtgtactttgaagagacggtaagctacctgagaatgtgcaaaagccagctgaggagctgcattggaactcagagcagttttagttaaaactatacaatgagatcacaattcatgaatagacttcattctcctgtggcccaaattctttcctccatgagaagattccacttctgattttacccagtcatgtagtgaggccagtgacagcatcagtgagtcagcccagattagaaaaacaattcaagcacaatagacagccaactagtgagtcactgactacatagtgtcttttgtaataagagcttagagcgagcttgtttatatttaactggaataatcggctaaggcccaagaattaattgtttaagaatcaaggaagtacaatagaatttcaggattctgatatttattttgagttgttcctatttttttccccaagagggactatttggatttagattaaatgttgaaatacatgaacatattataagttatacttactgtttttatcattggcactaaaaaataatttaaaacagtgtcggtaatactattccattttaattaattgaactatcctaattttaaaattatcctactttattcttactgtcctttctttgttagagaaactccttactatcctaaggttatagaatcataatattttagacttaacaatgtaagttttccttggaaacttactgtactagcttataatttcttctcattttaaggtctggcattgtgcaaattagagtccttacagatttcaattaaagtttagaatttaaatttttatttatattactactatgtaaacaggtataatgagatttagtattttgttatttgttttataataactctggaagcatttatttatttaatagcttttgttttttatttttaaagaaccaacaagaaaaccttgggaaagaacaaatacaatgaatggcagcaagtcacctgttatctccaggtatcaatttttttctctaagttttatattttatttgtataaaaaaaaattaatgcattcttagtgtagaaaaaaattgaatggtaagaaattatacagaggagcccataaaactctcgtgatcctcctagtattggacaaccaccaagcctcattatatattactcatctacattactagtgattgataaattctaccctacatttattaaccagatgatctgagattttaagatagctttctttttcccaatttgtattttgaaaaattcaaaactacagaaaaattaaaaggatagtacagtgaatatgcgtatacccatttcctaggtttaacagttgtcaacattttgccccacttgtcttaaatatctacctatccacacttttttcccctctgattagtttgaaagcaattcacaaataagaactgtttcaccctaaatacttcagtgttttttggaagaaccaggacatctgctgtgtaaccacaataccattattactctcaagaaatttaacattaagcaataatattatctactatagtatatagtcacatttccccattagttccaatgacatagattttatgtatatatatttatgtatatatataatttttggagccttttttaaacctgaatatcagctggagagaaaagagagcaaaataaaacatacatctttgaatttgtaaagtagaaacatgtatttccctatctcatttgaaacttgtaagtgtaatcaagttagaaaagatagtatccagaaacaaggctagttaatacttgtttctacaagtacatgtgggcatatttaggcaaatttgttcttcctttagctaggcatactttattttcatgactaaatttatatcacagctcctgaacatagatgaaaccttttcttggtttatgagacagtttaaaggacttgtatttttcccagaaaaaaaaaaagtatgtatttagaaactaaaaggtattttgtcttttctttctgagctatttgccttatttttgtctcgtaaaaagcaacttgactctaattatagaaacctaataaagataagtacagggatagactttatattatcacagacctgttctgtgttagtctaagtctgaatttggatttggcttcctatgtggttctttctgctagtaggaaagaagatttggtagtgacacaattgtttaagctccacaaagaaactaggccttttggaatgtataaaagcttttagtttctaagtgattgaaagatgatcatattttactttagaagaaagggggaattgcttttggtggacatgtgttttcagtagagtagaaaaattgcacatttatgtttctcagactcctaactgagatggccttctaacacatctctactagttacggattttcttcagtagcacattatgaagtgctgatttattaagcccataacaaggagctggctaggcgtggtggctcatgcctgtaatcccagcactttgggaggctaaggtgggtagatcacttgaggtcacgaatttgagaccagcttggctaacatgatgaaaccccatctctactaaaaatacaaaaattagctgggcatggtggcgcacacctgcgatgccagctacttgggaggctgagacacaagaatcacttgaacctgggagacggaggttgcagtgagctgatatcgcgctattgcactccagtctgcagacctgtcatgtgtcatttgtcctttctcttcatcatgcttcattgatctgcatttcacagtgaactaaaagctaagcctacgttgatggcagaagtcatgtcttagaagggacatggacgaggttctccaaatggaatacattctttgatgtatttggtccatttagtaaaggaaaagttgttctttgaaagatttttttatttttcctaattccagggtagggaaaaaaagatttttttttcagacttggaaatttaataagtgctctaaaggtcaccattttgaaaataattttatatagatgagttgaatcttgattcttaatatccagtagtgcaccataatcatgttccaattctgttaggtggttttccttccctttcccaaaatagaaattctggaactcctgattatttcctgaccactcatatatcttttgatagatttgatccaactactgatatataggttttaaaatttcaccaaaagctgttttaaaccataaaggatttttaaaatatgtttaaaagagtaagaactatattgcttttcttcctaagttatctctcctgttccttcggaaagcaagtgtattaagtatgtcttatccttgcattgtagtgaaggtccccatttctctttggaatagctttgtcaaaattacgttagtggtaagatggattaatgtcccataatatgcatgagatattgcatattgctgtatttgttaagtgaatatgtcagagtaaaagcaagactgtttggttaaaaatgctttaaactatgactggattataacgtttgggaagttggtgcattcatctgtggttattaagaccttacagatcttgtattcaagatgggaaaactagtcctttacatgcctcctgagaagagttaattttgtatacttttatatacttactgtgcctacaacctatataaaaagtagccattgtgtaatgatttttaaaattttctgtaactggtatcttcacataactaaaagtaatcttaaaatatcttttattggggaaaaattggttattttaaggttaatagactcaattcttgttttgtttgctattaacaacctataaaacagtaacataatgagaattattttttaaagttctattgtgtatccctttcaatggttttccccttcatagacgggattctccaaggaaaaatcagattgtttttgacaacaggtcctatgattcattacacaggtatcatcctgctgtgacgttgtgatttgagacttttaaataacatgttcaggatagggctgagctttttctacctggattggtaatcaccacaagggagatttttttttctttattttgaataccttttaaaaattctgccatcacttcacagttggattcaaggataaatacaaatggtaaacatattagaaatactagactgggaatctaaggccacatgtattatctaggccatttgtagcttaagcgttttcttttaaaggctgttcgccttatgattataagacaaggtttcaaaaaagttgaatagaagatccttttccatctgttactggaacatggactaatattaaagccatggttgtggataattgattatttgaggaaaatctctgtttcctagatactttgtagtaaattatcttggacagtttaacatctaacaccctgagtagattgttttctaggatgagccctattataccattttttaattaagaagacttaagaactagttttttcttaattaaaaaaattgacagctaaaaataatcctgcaatgcttttcagttacttacacaattaatttgacagaatagggacttaaatatagtagtacagtcattttataggcagatgtttaaaggcaacgctctcatcataaaaaaataaaaactgacccagcacctggtggttcacacctatagtttcagcaccttgggaggccaaggctggaggatcatttggggcccggagttcaagaccagcctgggaaacatagcgagaccccatctttacaaaaaataaaaaaaaattagctgggcctggtggcttgtgcctatagtctcagctactcaggaggctaagacaggaggatatcttgtgcataggagttagaggctgcagtgagccatgataacaccactgcaccctagcctgggtgacagagtgagaccctcttttaggaaaaaaaaaaaaaagtgaaataaaaacctgagaaaccctcattttgtgatcaattatgatgaaaacccataggttagaaataactgaaatatatttatgttattttacacatctattttttaaaaaaatatacatcaagttcactgggaatatgaattaagtggtgttcatagtggatgtctattgcagtgagttgggagttctgtaagcagactctggccaaattcttacttgctaaaattatttttatgctattaatgatcaaaatacttgacaagttaattttgtcagccagttaaatcttcacaaaatgtttatattccagtagtgaaatagttttgtgtttttttttttttttttttttttgaggtggtttgttttggccaaaagatttctttagaaaatttgctagtacatagaaaagtagcatttaacaatgagatttttaaggctgggtgccatggctcatgcctataatcccagcactttgggaggccgaggcaggaggatcacttgagtccaggagtttgagactagcctaggcaatgtggttaaaccctgtctctacaaaacatacaaaaattagctgggcatggttgcatgtgcctgtgggaggctgaggtgggaagaagacttgaggccaggaggtcaaggctgcggtgagctgagatcatgcacactgcagcctgggtgacagaatgagaccctgtgtccaaaaatacatatattttttaaatgtagtaaatctgctcagttatcttgctgctttcacacatagtaccccctgggataatgttattgataaacttttttggtaaaagttaagaaaaaaagtggtgattacatctttccttcagtatgaaaagttcccccctttagttaattatcatggtggtggtggtggtgatggattgcatgttagcatgaattaaatttttaaaaatttgcatgtttccacaattgtttattacataacaataatttttgcattgcctagtaaatatggatatattcataacatacttgcccaattaaatagcaggctgtagttcatgtgaatttcagaggtattcattatataacttgagaaaataactagctaaatgggccacttaaatgggaaatgtaaaagaaaagcagagtatgaattatagtttaattctagagaacaggaataggtagcatgagtgaatatatgaaataacatcctaaactttaagaatatttgccagaagtgactctgcattttatggatctaagtaaatcttaagtgaccttggaatttagtagtcttccctagcaaagtaagaaggtgtagcctcacaagaggaaaggaaatatttcatataaatattattccctacagtgcctagctcagtgcttattgaatgaaattttctggaagttatttttccccctattcatataagcagatacctaataaagtaaaattggacgacttgcttcctaacagtcttttaagcagtaatacgttttgatagtaaagcagattaacaggctgggcgtggtggctcacacctacacccagcaatttgggaggctgaagtgggcaaatcatgaagtcaggagtttgagaccagcctggctaacatggtgaaaccccgtctctactcagaatacaaaaaaattagccaggcattgtggtgcacctgtaatcccagctactccagaggctgaggcaggaaaatcacttgaaccggggaggcggaggttgcagtgagccaagatcgcaccactgcactccagcctgggagacacagcaagactgcatctcataaacagcagcaacaacaacaacaaaaagcagattaactcagtgtttaatcttcaggaaccatgcctatgggtttaaagtattttatgtcttataagaattataaattataactttgaaaaatttattatgccttttgggtcttgcttcagattgctaacattggtactctgcaaaattgggaatatatgatttgcctgatggttttaaattgcatttatttgtggctcataaaggagggcatttactagactaaaccagaacccagaggagtgcccatttaaaactctaggttttccactggggactcttttattgccggacttggagagggcgccatgactggtttatttggtgttgaaacttgtttaaaatatacctaatcattgacttattaagaattataatagaaactaaacttttgaaagtgcaataataattgacaatctgcttctgtctggcatatcctttttatttaataaaataaatttatggaagtagttagcctgaaacacaccattcaaatgacgtctccataaaaatttcacaaggaaatagtcacatagtctaatctaataaacatttttaaaacattttttattttgatgcttgaaatggaataatatgtataaagcaaatcatgctcactaaaaatgttttcttcctgcaatccaaggcatcagctttgtaagctgatttatgttagtgtaaaacattcaagtctttatgtttctcctttcactggtttgtccaggtatttaagtagataatgtaaaagttcaaaagaaagacaaaacaagattgtgttatttgagcctcagatgtttcagctggcctcttcatcactgttttggtcaacgtgccacgttacctggttacctcatgcccaaagaatactgtcttctactcttttctgaagaagtctcaccatcttgtcacctttttctagttcctttataaataagaaatactgagaaaagtgaaaaaatgttgttttatgttctaatcagccctacaattttgataattttttaagaaaatggcttttttaaagaaatgtatttaaatctggtgttgggttggtaaatttgcaattatttatgaactcattaagtattaagaatgttgtttacctgtcctggaaatctcatttatacagaccaaaatccacacccttatcacagcccagtgccaatggagtccagacggaaggacttgactatgacaggctgaagcaggtgggtgctcagtggcagctttcctttatttgtacttgtttctttttaaaaaatatcccatatgcatatctttgacatggatcctgaatgtacttagaaagacgatagagctattgttatacaaattaaacagtggcattagtagtactgcatttttgcaaatctacacttccggttcattgagtttgcatgaaggtccagaggtagtggagggtggggttgtggttcagtgataacagcataaggtgtaaatgtaagtgcatggtacgcagttgtaaagaaaacaatgggcttttacttttcagtgactgtcttggcaaaattgaacccaacaaatctgattttggcaagagtgcaaggaaacaggcactcttctatacttctgctttctaaaaagcagtttggaaaaacagaatcaaaagcctgaaaaataaatgtcttaccttgaattctgtgatatgaattccaggaatttatttaaagaaaatattatggaagtatacaaatgtatagtgggtggagtagaggctctgtaggcttcaagggatcataatttagtatgcttaatagtaaattgtgaacagttgcctgtgttaggtaacaaaacaaatgtgtacagttatctcaattttataaaaaagaaaaagatactgtccacgtttggattcatatgccttatagttaatacctatgtactcaggaaaaagtagtaagtgataagattgtgatttaaaataccttattcacagaagaggtgaagtacattttttagataaactgaattttcatactgcaaagctattggaaaagttaaattgagttataaaattttaaaggggagcacgtggccattgaaaatcaagccttgttttgccgtgtactgaatatggctttcttgaaaaatattttaaaatagagcacttccacacgcttcaaaacatggtcagttcttggtcatatgaagaattggaggataacaggaatagatttgatttgggggatgagatgtaaagagtaatttggatcagggcatctgtgagtctatttaataacttctgtgtctcagtcttttccattgttaaaatgaagacaaactaattgatagttttattttaaacatgagaagcttttcaaaaggtaaactttaacagagcaatttaatttttcctggggtattcagtgttaaagtcacacaattcaaaactaattcttccaaaggacagctgttacttttcacccattaaaattgtgtcactttgtcatgggacctctgatcttgaatctgcagggggtttttttatttctttgttttttgtttttgagacagagtctcactctgctacccaggctggagtgcagtagtgcaatctcaggtcgctgcagcctccacctcccgggttcaagcgattctcctgcctcagcctcctgagtagctgggattacaggtgtgcactaccacgcccggctaacttttgtagtttttgtagagacagggtttcaccatgttggccaggctggtctcaaattcccagcctcaagtgatctgcctgccttggcctcccaaagtgctgagattacaggtgtgagccaccacacctggccaaatctgcagttcttgaaggagggcccagagcaccacagttaaatagaagtataatgtgggctacgtatatattttaaaatttttctagtagctgcattatttatttatttattttttttttgagacagagtctcgctttgtcgccgaggctggagtgcagtggcgtgagccaccgtgcctggctgtagctgcattttaaaaatacaaaacaaaaggacattaattttaaaacttaattatttaaagtatgttttaatatgtagtcaatttttataaattactaacgagttattttacattattttcatcatactaaatctttggaatctggtgtgtgttttgcacttcacagcacatctcatttcagattagcctcatttcaggggctcagcagctgcatatgattcgtgcctgccgtattggacagcatgggtcaaccagggcctcatccaccttcctgcctacccattagggcaatccctgaggtcccttcagggaaatcctagactccttgaaatatggtttggcagctatggtgattcctgagaaatctccatacatacttcagacaaaaggacagatttgccaagagccagtttttcagtttactgtaatatcttcctcctctaaacttcctttgcatcacctctcagactgttcccagaggactagattaaaagcacagctgttatcatttctagaaactatctgactcatacgtttcactggatgacagagtaattatcttaattttaggaagcattctatttcacatattgctaggctagaataagccaggattgggaagggcagaatattaaaacaaaattcaccaaggctagtcttccaagaaatagaattgtggctctggaaacaaaaaaaactacacatcatatttcatgacattcttaaaattttatgagtaagaatctctttagtggtaattttgttctgtatttctggtatttttctctaatattttaggacattttagatgaaatgagaaaagaattaacaaagctaaaagaagagctcattgatggtaagtgtctggacaaatttactattcctataaaacaatgtttaagattgaccatttttaagaaaatgcaaataaggaaatacccagctgattagttgagggcaatgacttccatagtcctgcccttttaggattagggttttggggaggaggtttctccttcatataatggaaattatttttataaatagggattaaacaatatccctaagtttcaggtgttgtcttttcttagatggaaaaccacatgaacagatctttctctaggttacctctactcacctatcccagtgtcctcttgtttttgagcccacataatcagtgttttcattttgtatacaaaaggagaaaataaatatatagaaattagtatcatctttctaatattaaagatgtgtgcaatgaaagatgcaaagttaatcttattactgtgagtttgagcacaatccttaaagtttcttaggaatgaatcactcatttatcttactttatcattatatttattttcaatacttgttcttttccatccagcaatcaggcaggaactgagcaagtcaaatactgcatagaggaacagactaaggagagataggactttaatctggaggaaaaatatcctacaaacaacaactgttcacaacagcaaacccctacatttatgagctgtaagaagaaaatggagacaaacagaaggagggaaaaaccaacctactctgaaagccttcagacattatgactctggtgataagctctttccctctccgtttgctgcttttttctggcctttacaacagaatggaagagaatcatttaagagttcctgtaacagttatgcagaaaatactaaaacccatcaggcaagatcaccacgcattgaaatattttcatatcaagataaagtcgcacattttccacaatacattgctaaaataaagaggagaaaggcttaggaagtttttttgcagagagtgctggtaaagaattgagcaagtttgctattgtattgtaatgtttctctcaggtttgttcttcctatcatgtttgatattccatgaataattgagatcagccctatgtaagttaagatcataatatgtggaacaaatggaattgtaagtgctttcaaagggtaatatttataagaaagtgtccgaaaaatgtttcttcagcttgagaaattttagaatgataggaagtttctcgagttagccttcatgcaattttgtagattaaaacataaaatttgtccagaacttaaagatttagatgccttcctaaattgttacaatgctttaccaaatctatgacttctacataacacaaaccagtggtcaaatgtaaacactatattgtagatttactgtaggttttcaaccttttttagatttatgcatgtggacatttttataatgtaattacaatcaccacaaggttagcttttttaattgcagacagtaatgcatgtcacactaatatgtagtggccttttcaaggcctagtcccagggaaaacattttgtagagtataggggagtgggaggaaggggaggaataattttttatttaaagttgatttctgcactatctttttctcagttacctgcatgaataaataatgagaaatattttgtgactttaattggtaaatatgttacaaaaccaagtacttaatcttttacatcatgtcttcagctatttgtattttaaccagtaatttcaatggtctgaaacatgattctgagcttcacataatatcttaactgtggaactcaaaagtttgatcactgaatttggcagttattattacctaggtacccccgctgttacacaggtgtttagatacgtgttcctgaatgaagctgcttttgaattttgttatgttgaaatgcaagaaataacaatgatggcagcaattaaggtcacagaaatcattaggtaaaggaaaaccaatgaggagttctgcagttttcttttaataagtaaagtgagacttgggtggtgggaagaaggaaggtgggaagaaggaattagacactctgcctgccactctgcgtgtgtgtgctctcgcgcacgtgctgtctatatggaagccactcccttttctttcctttgaaactggtaaggttaaaataggggagaaatcctacatgttggaatgatagctttttggaaaatttaagaaactctccaggctctccatcttgatttatgcttgagttgttatgtgccatatttgctttgaactctgattatcagaagttttactaaaactttgaaataattcactttcatctgctttctagattttgtacatctcagtccataaagcaaagcttgttgatagtgtagttttctaaacgctgcaaatttgcagcctttaccactacaaagaagtttggatgagggattttttttttctttgtcaaaatagttcctgtttctgtagaaatttcatttttagattaaactgtgatggatgagctatcataattcaagtatacatttcttttttctatcagatattcattgtcatgcagtagtagtaaaaacatcaaagatgcagcaagcttattaagtattattttctaaaagaaataggaggcattttcatctttattattgtacttttggttatgcaaacactttgataatataaacagttatgtcccctataaatctggtcagcaacctcttttgattttgttgggtaagttaaatagtctgtagtaggtagagtactgggtacaagtggtccaaactaagataagagactaaaataaaatgctaaatcttaaaagaaactgggtttatgcactaaacgttttgtgccttggtctaatattaacatgatgtatgtgtaaactgacaaaaaaaaaaaaaaaaaaaaaaccagtgttgaatcatgctatatttcccatcatcccagattgctaaatgttctttccaagaagtctgaatgaattattatatacatttgctatcatacatgacagttgtgtcattattagagatttcagtaattaaaatgggaaacagaagcctaagttatttaccttatcaaaaccacgttccttggaaccacattattatgatggtttttgtgctcttgtacgttggatgtcttaagctgagtacagtttaggggatcctttctaatgacaggaaggcactgctttcctcaacactgtgatctgacctgtgacaagtctgtactatccactatgtaaatggctcacaagtcaattgcaaacaaactgaatgtacaaatcttagtgctggtgctgaaatctcttcagaatagtcatcatgatttaaaagtttgtttaaaaatttgcaagcatcaagtgtcaatcaaaactgaagatgaaacactaatgaatgttgaattctcatgcttttaggtgtacttcctttttagaattttcagttttctgctatttttaccgtaactatttcgtttaaatttgtttcatttaagtttcctacatgctaacttcgtttgtgcgattgaaataaaattgcagtatatatatgttgcttgtttgtgacacttagataatcttctgaaataatttgttttaaagtaagttatattggatgtgaaaaacaccttttaaagtccaagactttactacttaaaagtttacatgtcacgtcactattctttacagatttcatagaagtcgtgaatactaagtaatgtatacaaaagaaatatgtgatgatgtgtctactttttgtttgaaataactgttgggtgttccctcttcttattttctctctgcccaccttgacacagtaacttcctcttatagtcaagatgatgattaagtgtttaatttttattccattttgttctgcaacacgttcagatacttaaaactcattcatgcagttagaattatcctttatgtagtttgcatggtaaaggacattgtgtggtaaagggcattattgagtaatgaattttaagtatagcaaaatatgtatagtgtttatacatgatgctgatttcttaaaacctacatataagcagtagtactttttctctattataaagtattaattttgagttccattttataattctgatgtcttcattagaaatacaaaaatacaatccttgtattttttctttgaccagacccaaattttccccttcccccctccattctcctctccacttctcgtggaccgcgtgttcccaatattcattaacatttgcagccattacagagttacagttgtaaaattttcagctgtttttttttttttttttttttttgctctagcctgtctcatgttcttgcttctcttcatatgtaagtcagtatttttgtctacaaattaaaagtcacttgtcattcaaaaatgagttaagtaacatgataatcttttaaatttacctagctacaacttttatgtctcttgtaaatttatatatactttcagtgccattgtgaagaattggccttttaattctaagtagtattaccctatgaagcacagtgtgcaaaggtatgctacaaggtctctttaattcctgtgtggccattataattttataacaccattaccctttaaattctaccgattataagcagcgtaaaagtaactatataaagcaaacatcgcaaaggaactctgcaggagctcttaattcctttatgtagctatcataaaattcactttcctgaagacatttactctcattcacttccaaactccaaacctttttctggtagcaccacttttgtttttaatagaaagatgagttcatatctgtacatctctccaaagctctaaggaatgagaaaaggatcctagtatattgaaattactgatgtttaatacctctgccttttcactaaaagccatttaatatttttaaagtcaaaacttgacatacaggtatttataaggaatctccatgactctgaaggaatgaaattgatgtaggtagctttggctatgtaaagacatagtagaggacaattacttaaagaagagttttcttttgaggatttgtagatttgactaagcagctgaagtcagtaacccctcaagaaaggccgtttatagaagccaagaactgttggaggtctgtgatgcaggtttttctgttcccaacatcaaaagctgtggattatttggtgtgttcccctttatgttatctctcgataatttttgagacatcaagattttttaaaatatcaatactggaaagatgaaaccttcaaattaaaacctaaaattgattagaaagaaaagtaaaatattaatgcagtaaatttaggatggttacagatactcaccatcaacataaataaatggagttctaggataaattatttgtggaatactaatggtcaagtcacataagagtaaaatcttttggtgaggagacacatttgacaactgctaaagaattaactaaatttgtctttctaaatagttttctttataaagtaacagaaacattgtaaaaggataaataaatgactgtcataatgacttaggatgttgtaagaatgtctgccacatttattggttatttctgttgaaatctgaaggaatcgatacatctgaaaattgagaaagggaaataggactgtccccgttacagatactctgtgatgcacacaaccttctaaacggaagtgttagtatcatttaaagcacatagtaggccttgagtatttgcagattaacatgcagaaaaaatcaaagatgaagccccaattaagtgtttgaaccaaagaatcacagtcactgagctgcacccccgttctgtgaagcatgttaaatactcataaagagcagagagcagggcccgtagacgcttctggtgtaggacacaggaattctaggcagagggagaaaattaggggccccagttggtggctgagagtaaaaagaatataccatttgagtagtgctgttctttttcctcagtttttaaagacatataattcctagtagttaggacatctaaatagctcggtaaactggtcagaggcgggaggattgcttgaggccagaagttttgagatcagcctgggtaacagggagactcatttctacaaaaaaatttaaaaatttaggccaggcatggtggtgcacacctgtaatcccagctactcaggagactgaagcgggaggatcacctgagcccagggaggacgcggctgcagtgagccgttatcatgccactgtactccagcctgggtgacagagcgagaacctgtctctaaaaaaaaaaaaaaaaattctaagagaatatagcttttcatagaaattattagaaaagcttacatatttcattagagagcccagtttgttagactacatttattccgtaaaagttctatatacaaatgacaacccatagtttatcatgtaaatctgatttaactgttcccttcaattccaagaaagatttcttcagcagtagatgacaattctaaaagcataaagaaataactaataaaggagatggatgatgttataggttggtttggttgggttttagtaaatagttattcttctaagaaggcttagaaaatcgagaattgaatagttggtactttgaattccataggaaaaagcactcagaagaaaaagtctacattggctagtgtttagattgagagttaattttcccatcaagtccaaaagtttccatccaagtctatagaaactgagagaaaaggttcttggcttacacttaaaatacacattgttgcaaccatataagagagatacattacagaacgcttttaaaaatttggtctcttaagcgcctaacagtccatgctttagtcacatctgtgaaacctcttttctttttttctttttcttttattttttttttttaaagattaaaggcattttaaaaataaatgtttcatggccgggcatggtggctcacgcctgtaatcccagcactttgggaggctgaggtgggcagatcacctgaggtcaggagtttgagaccagcctggccaacatgatgaaaccccatctctactaaaaatacaaaaaaattggctgggcatagtggtgggcacctgtaatcccagctcttcgggaggctgagacagaagagtcgcttgaatccaggaggtggaggttgcagtgagctaagaccgcgccactgtactccagcctgggcgacagagcgagattccatctctaaataaataaatgtttttcaacgtgttttatgtgagaaataccagcttttcattattactaccagttgatctcaggtgtcacttggttggttctgctgaccgaggcactgggcattttaaatatggagtttccctccacccattgatcaagtctgaggtttgtccatccttggtggcaggctagcttaaccatggattcacaaaccccatttgattgtcgtaagtcatgaggccaccccagtgccagtggttgggcatcacagtgagtctgaggtgatgaatttgagttagctgtaggctagttccgcaactcagcaacagcccatggatggttggtaaaagacgttgactttgccacttaaatttccaggagaagaatagcttatagtttatctgaggaaagtaattgggaaggcttagatattgagaagaaagccctgttaaaatctaggtagcatttcctttcttctttattactagagggatgggaggttcaggcctgagtcaggactttacaatttggtgtccttcccagaggtactttgggcttgatcattttaagtttcaattgcaaaaaaaaatttttgacggagtgttgctctgtcactcaggttggagtgcagtggtgcgatctcggctcactgcaacttcccccccctgggttcaaagggattttcctgcctcagcctcccaagtagctgggactacaggcgcgtgccaccatgcccgactaatttttgtatttttagtagagatggggtttcaccatgttgcccaggctggtcttgaactcctgagctcaggtgatctgcccgcctcggccttcaattgcagaagtttttgaagggagaatatttgatcctcacataaaatgtccttgtttctgaaagaaaacatggtaaaaattgttattgagtccatgtctttgccaccttgttggacttgatttccctttctctgtgttcctcccgccctcagtctctctcagtctgtccttttttgtgtgtggagttgtgggcaggtcattggactgggactgactttaccagttttcaggctgtggggctagtcagtcattctctctgagccttctacctctaaagttgagttctttttttaaattctttttgttttgtttttattttttccttgccactatacaagcaaggatagataaagctttttattattattgttattattattatttcgagacagtctcgctctgtcatccaggctggagtgcagtggtgtgatttcagctcactgcaacctctgcctcccgggttcaagcgattctcctacctcagcctccttagtagctgggactacaggcatgcgccaccacacccggctaatttttgtatttttagtagagacagggtttcaccgtattggccaggctggtctcgaactcctgacctcaggtgatccacccaccttggcctcccaaagtgttgggattacaggcataagcgaccgtgcccatccccgataaagttgagttctgaatttcctctttcactgtattctcggcagctactggttggtttattctttttttttaatcttttttggtttattcttcttttgatctttgaagagaaggagaaaaaagatctgagtttggctctcccatcttaagtgcagcttttagttgttttatagtcatagacgctattgcactggacagcatgcatcctggatgtaaacaatgcggaaaaatcaatggagtgaccatcttggggtcagtggtgttgcataaagcaccagtggtgtgctgttctgtgtcagtttcctctgcgccacgtgctttcacagtttgaattaccagcatctctgtggtggcttcagtacattctccattgtgcttcaacctggaagcacattctgccgttcagaaagactgattccaatcatgtaatgggaccacacgagatccatgctccaattatatgaatagcagaaggtccatttgactcttgtagttcaagagctgtttctaagtaaacagactttccagagctcgatgaagtgaagaagcccttctttcaattcctgggcagaattcagtggttttcatatcatctgaacctgctgtgctgctgtttattctatcactgtcagccttgaaaggaaaaaaggaataatcttaccctcctgcccttcttattttatatcttccatcttatccatctatatccatgtagtcattccttccgagttccctggttttaatccaaaagactctgtttaacagcaatgtcttggcagaccaggtgccgcttccgtgccatttgagggctctgagtctttgcttcgtcttaggaagataaagataatttggcagaaagtcagagatggaaatagcagtttgggatgataaaagatgggtcctgttttgctgacattcttttactttggttcttggtgcgtgtcctttgggattcatttcttgctagcatgaataggacatgcttttcgttaggtgcttttcttttttggagaacatgaagtgtttctaacaaaactgaatgagctagaaagaattctattttgagacatctgtagttgatgcaaagtatttctgtaatcctcaatgacagtacttacatatttgcatagaattttttttttaatttttgaggaaacctctctggagtctgtatttataggagcatcctgaaagtccctattatgtagctggtgggagcgagagagggacagccacactcgtgctgtgagcagagcacaacttcaggcagagtgaatgccttctgagttctcattggaagctttctgttgctcagcctctggcagatttcagaaccttctacttaagccaggtgtggtggtgcgtgctcctaggcacagcgactcggggggctgaggcagaaggatcacttgagcccaaagttggaggccagcctgggcaacatagcgaggcctgtctccttaaaaaataaataaataaataataaataaataaataaataaaaaccttgtccttgactattgtgctgtctgctgcccctttgtagggatggggttggggtcagaataagcatgtgcatgaatggcggaaagctttggtggtgtttgtttgtttgtttgttttttgagaggtgggggagtcagcagtgaacctttctggttaaagaacaacgtacataatttctattatgagatttagaaggttaaatacttttttttttcaggcctaccaagttgatagaccaaaagtatatagtagaacagcacagtagaaaaaatttaaaagtgaatttcttatggtccaaaaggatggatagtcacagtccataacctttcataatatatgctggaattggaatctcttgtcatcttgctttgctctgaattttagaactagaagtgtgcacgtatgtcaaaagattatgcagagctattttctttgctaacaatgtaaacatttgcaccccatgaatgggactttataatctggaagtgagcctaaggttgcgtatactgaagtcatgttttaaaagttaaggttgacttaaacatatacaaggctgtattttaattgtaactagaaatcatttactatgcatacagaacctcatgtatcttatcatggaatttgtgaattaatgggccttgccgaattcaagggtaagggaaactggtaacaacttgttttaaatcaacatactataagctcctgcttgcttgactcaagttgtttgaaaatctgaattaaacaggatctcattgtcaggaaacatcttctaagcttgacatctacgtttaagaagggaacgtggaagagaaggtgagacatgaaactaaaacagctgggagggtaggatcagactgcacctgatttttggaccaaagtttcatataggaataaataaaaaggaggaccacttgtgagccaacctaggaaggacttgccagaaagtagcagctcctgctgcaaaatacagtgccttcaaaatgattctctgtgtgaattgcatgcaatttcatgtaaccataaagtgtaacctgtatgtgcatgacatgtgtctagaatgtgtaaagttaggattcagcaggaaggggcctggccctgtcactgtggtggatcagtggacctgctgaagtcactggactcatgtgacttaggtttgcagcatcagacccctgtgtttgcattaagtggccacatcgttgaaatcggatcaatctctccctcagctttctttcctactttgcagctttgctggttttaactgcttcattcttctgcttcttggtatccttttttcttttgaaataaaaacatgaaatacttaattcaaatgagatttgtatttattttaccagttgctcttaatttaccaaaggtatacgacatgaaaagagttgcattcttttgtcttggttgtgattctgaccttaaaatacgctcagttctaaaagcttgaggagcgttctatactggtccttctgcatttcagcctgtcaccaaggggagtgttttgcgatccgccatcctttccctgaatgctgctgctcctctatgacggaaagcttggtgacctcttcattggaggcgtccaaagccagtgaacagcctgttggtaaatgaacgagctgcatgtacgtgctattttcctccaggaccaaatgccctgtgcattttagtattaagcgtacttactgcaggaaccagtactgggaccactgcaaaactacacaatggtgcaagtgctttggggctttgaagagctgaagacagacataagacttagtgttctcaggccgggcatggtggctcatgtctgtaatcccagcattttgggaggggtgggcggattgcttgagtccaggagttcaagaccagcctgggtgacatgacgaaatcccgtctctacaaaaaaaaaaaaaaaaaaaaaaaaaggacttggtgttctcactttgtgaccatcctgcccctcactggaggtccctagaggcaggtgcctttcagctaagaatatctggaagtctgtggtttgtgaggagcttgctggcacattagtgtaaagggtgtgatccttttaatggccacacttttctgtatgatgtctttgttttcattctctgatgtcagggaggtgaaaagaaggctcaggtgaaaagaaggttcatcaactgaaccagagtaacttgtcacctccttttttgccagcctcatttctaaatagactgaatgtctgttacctctcctctccttttcaactgagaagcccttggtgtacagcggaaaggggctgtaggggaatgcattttgccactgcagtcatgagctgacccagccttctgtattcttggatgttttcattctaggctgaatcccattgtgttatggcaaagaggccagaccctaagagactatatgctgaaaagatttgtgaagcccctcagttcccagtaacttttggagcttattgtcatgagattgctaccctagccctgggcagtgtgggcaaggacaccgtggcacctgggcactgagtccgggagttgtattttagccttctctcctctcagctgtaaagtgaggtgtttaggtcttcaaaggtcattccagctccagcttctatggtttcaatatgctgggggtatctggctgaggctccccacccaggtggcccagctgacagtgacagtatcatagagtgcgagatagcctctgtcaccacactgacagctgcagacactagtatggaggggttatgtgggtgaagttcaaggcgtctctctgtgaacaagctagaaagaaccactcatttgtcatttctccttggccacaggctctcatggcaaaggcctctgactgaggagtaacacagcgttgaaccaattttaatattgcaaggccactcctgtgggtaaaggcattggagatgtatgcttcaaagcatttttaaaagtcacctgggatatgacagtgatgtctatccttggatgattatagctcttaagtcatcactcccgacccccaagacaaaaacgagtctgagaagccaggaagctggtttgcaaaaaatgtgtcgcgttgagttgggcctttcctgccacagctcctgccgctgggtgaagtgttggaaccctacagacaggtcctgtcgcagccagctgggaagccgaggtgagcaggcctcctgggacagatggggccccactgatgaggccactgaagccccacaaaagggctggctgctgtcaggagcctccacagctgggattgccaaccacgttttggcttttttaaaaaaactttttttaattttagagatggggtctggccatgttgcccgggctggtctcactcctgggctcaatcctcccacctcagcctcccaaaatgcagggattacaggtatgagccaccatgctcagccttaaaaaaactttattgaagtaaaacatatggacagaaaagtgtacgtatgcatacagctcactatcttgacaaactacacccatttgcacagcacccaaagcgagaaaagacgtcaagacccagaagccccctcgtgtttccttccagccactccctcccagcatcacccctctcctgacttctgacccccgaggttgctgtgtttgtgcttgatgtgaaggaatcctgctattttgtgcttggttcctttctcccaatattgcatgtgagatcatccgtagtgtgtgtagtggtggattgtctgtcctcgtgatatcgtagttcccagcttagggctattatgggtagtcctgctatgaatattctagcatgtgtctttggtgaacatatggatgtgtttcttctgggtgtgtgactaggaatagcgttggtgggtcacagcgtatgcctgcgttcagcttcagtagatcctgacccacttctaaacgtgcctagcagtgctggagccatttatgggcatgtcagctggcggggctgcgagcctccctccgtcgtagctcccttctgtgaatggccccacgggcagcacagggaacaatccaacgaaagaaccgaacctgccttggacagctaactaactgcggtctcattctgtttccctgaaacgtggaattaagtttcgaatacaactttccttccctcttaacaacgatattattcatgtctacatttattgcaagcatttacctagaagataaggcctatttcctccaataaggtgagtttatactcaatgaaattaattttttcgttcatttagcattgcttcctaacaagttgtcaattgatggagcagacatttctttcctgagctgcagattataaaggggtctcactctcagggcacaagaagcaagagcacatacccaaaggccaaggaagtggctgccttctttgtttttccctaaatgatgtcctctagagaaattcccacagccccattatgagacgggaatttgcttgattaaaggagatgattccactttctgtctagtaatctggggcatgaagtggatggttagatacaaatctccagtgttaagtaccagtaatttttgtcagtatgaaaaaagtggctgggtgcagtggctcatgcctgtaatcccagcactttgggaggccaaggtggacggatcacctgaggtcaggagtttcagactagcctggccaacatggagaaaacccatggacggatcacctgaggtcaggagtttgagactatcctggccaacatggtgaaaccccatctctgctaaaaatacaaaaattatcagggcgtggtggtgggcgcttgtaatcccagctactcaggaggctgaggcaggagaatcgcttgagcccgggaggcggaggttgcaatgacctgagatcatgccactgcactccagcctgggcaacagaacgagattctatctcaaaaaaaaaaagtgctttactttttaaaaatgtaattagagatgtagtcttgctatgttgtccaggctggtctcaagcaatcctcctgttctggcttcccaaagtgttgggattacaggcatgagccactgccaaagattatttattattattataacttaactgggagctgttcaagtcccaaagctctctagctctcctaagttttcaaaagaagggaaaagactttttccacatgatatcaatcccatgtgtcagattatcttgtaaatgttgagacgcgtaggtcagcaagggtccagaagctgggagtgtgcacagcaggtggaaatggaaggggaatttgtttttgccttgcagatctcctgtcctgactcaacacttaatggcacagtgtctcgggtgctttcttgaaacctggtgatgt

SEQ ID NO: 665 - DNA, 6828 bp, Homo sapiens
  misc_feature (1)...(6828): n = A,T,C or G
gaggcggcggccgcctggggaccagctccgcgcctcggcctctccgccccctccccagcctttctctcgccctcttctcccacactcccggccggcgcctcggctttgtgcgaggagatggtgtagccccctggccgccgaaggaggagccggacacttgtctcccgtctccgagctgctccccacccctggaggagagacccccccctcggctcggcgccttctgcgtctcccggctggtggggaagcctctgcgccgccggcaccatgagtgaacagagtatctgtcaggcaagagctgctgtgatggtttatgatgatgccaataagaagtgggtgccagctggtggctcaactggattcagcagagttcatatctatcaccatacaggcaacaacacattcagagtggtgggcaggaagattcaggaccatcaggtcgtgataaactgtgccattcctaaagggttgaagtacaatcaagctacacagaccttccaccagtggcgagatgctagacaggtgtatggtctcaactttggcagcaaagaggatgccaatgtcttcgcaagtgccatgatgcatgccttagaagtgttaaattcacaggaaacagcccagagcaaggttactgctacccaggacagcactaatttgcgatgtattttctgtggtaagcaacattatggccaacattgcctagacaaaactcacaactacctgctcaagttcaaaatggcccatcccaagaagaattggaaattcaaagaagaaagaatggaaagagaaaggttggagagagagaggttagaaagggaaaggctggagagggagcgactggaacaagaacagctggagagagagagacaagaacgggaacggcaggaacgcctggagcggcaggaacgcctggagcggcaggaacgcctggatcgggagaggcaagaaagacaagaacgagagaggctggagagactggaacgggagaggcaagaaagggagcgacaagagcagttagaaagggaacagctggaatgggagagagagcgcagaatatcaagtgctgctgcccctgcctctgttgagactcctctaaactctgtgctgggagactcttctgcttctgagccaggcttgcaggcagcctctcagccggccgagactccatcccaacagggcattgtcttgggaccacttgcacctccacctcctccaccactcccaccagggcctgcacaggcttcagtagccctccctcctcccccagggccccctccacctcctccactcccatccaccgggcctccaccgccccctcctccnatggaggatacctctttcccaagtggagggaatgctattggtgtgaactccgcctcatctaaaacagatacaggccgtggaaatggaccccttcctttagggggtagtggtttaatggaagaaatgagtgccctgctggccaggaggagaagaattgctgaaaagggatcaacaatagaaacagaacaaaaagaggacaaaggtgaagattcagagcctgtaacttctaaggcctcttcaacaagtacacctgaaccaacaagaaaaccttgggaaagaacaaatacaatgaatggcagcaagtcacctgttatctccagacgggattctccaaggaaaaatcagattgtttttgacaacaggtcctatgattcattacacagaccaaaatccacacccttatcacagcccagtgccaatggagtccagacggaaggacttgactatgacaggctgaagcaggacattttagatgaaatgagaaaagaattaacaaagctaaaagaagagctcattgatgcaatcaggcaggaactgagcaagtcaaatactgcatagaggaacagactaaggagagataggactttaatctggaggaaaaatatcctacaaacaacaactgttcacaacagcaaacccctacatttatgagctgtaagaagaaaatggagacaaacagaaggagggaaaaaccaacctactctgaaagccttcagacattatgactctggtgataagctctttccctctccgtttgctgcttttttctggcctttacaacagaatggaagagaatcatttaagagttcctgtaacagttatgcagaaaatactaaaacccatcaggcaagatcaccacgcattgaaatattttcatatcaagataaagtcgcacattttccacaatacattgctaaaataaagaggagaaaggcttaggaagtttttttgcagagagtgctggtaaagaattgagcaagtttgctattgtattgtaatgtttctctcaggtttgttcttcctatcatgtttgatattccatgaataattgagatcagccctatgtaagttaagatcataatatgtggaacaaatggaattgtaagtgctttcaaagggtaatatttataagaaagtgtccgaaaaatgtttcttcagcttgagaaattttagaatgataggaagtttctcgagttagccttcatgcaattttgtagattaaaacataaaatttgtccagaacttaaagatttagatgccttcctaaattgttacaatgctttaccaaatctatgacttctacataacacaaaccagtggtcaaatgtaaacactatattgtagatttactgtaggttttcaaccttttttagatttatgcatgtggacatttttataatgtaattacaatcaccacaaggttagcttttttaattgcagacagtaatgcatgtcacactaatatgtagtggccttttcaaggcctagtcccagggaaaacattttgtagagtataggggagtgggaggaaggggaggaataattttttatttaaagttgatttctgcactatctttttctcagttacctgcatgaataaataatgagaaatattttgtgactttaattggtaaatatgttacaaaaccaagtacttaatcttttacatcatgtcttcagctatttgtattttaaccagtaatttcaatggtctgaaacatgattctgagcttcacataatatcttaactgtggaactcaaaagtttgatcactgaatttggcagttattattacctaggtacccccgctgttacacaggtgtttagatacgtgttcctgaatgaagctgcttttgaattttgttatgttgaaatgcaagaaataacaatgatggcagcaattaaggtcacagaaatcattaggtaaaggaaaaccaatgaggagttctgcagttttcttttaataagtaaagtgagacttgggtggtgggaagaaggaaggtgggaagaaggaattagacactctgcctgccactctgcgtgtgtgtgctctcgcgcacgtgctgtctatatggaagccactcccttttctttcctttgaaactggtaaggttaaaataggggagaaatcctacatgttggaatgatagctttttggaaaatttaagaaactctccaggctctccatcttgatttatgcttgagttgttatgtgccatatttgctttgaactctgattatcagaagttttactaaaactttgaaataattcactttcatctgctttctagattttgtacatctcagtccataaagcaaagcttgttgatagtgtagttttctaaacgctgcaaatttgcagcctttaccactacaaagaagtttggatgagggattttttttttctttgtcaaaatagttcctgtttctgtagaaatttcatttttagattaaactgtgatggatgagctatcataattcaagtatacatttcttttttctatcagatattcattgtcatgcagtagtagtaaaaacatcaaagatgcagcaagcttattaagtattattttctaaaagaaataggaggcattttcatctttattattgtacttttggttatgcaaacactttgataatataaacagttatgtcccctataaatctggtcagcaacctcttttgattttgttgggtaagttaaatagtctgtagtaggtagagtactgggtacaagtggtccaaactaagataagagactaaaataaaatgctaaatcttaaaagaaactgggtttatgcactaaacgttttgtgccttggtctaatattaacatgatgtatgtgtaaactgacaaaaaaaaaaaaaaaaaaaaaaccagtgttgaatcatgctatatttcccatcatcccagattgctaaatgttctttccaagaagtctgaatgaattattatatacatttgctatcatacatgacagttgtgtcattattagagatttcagtaattaaaatgggaaacagaagcctaagttatttaccttatcaaaaccacgttccttggaaccacattattatgatggtttttgtgctcttgtacgttggatgtcttaagctgagtacagtttaggggatcctttctaatgacaggaaggcactgctttcctcaacactgtgatctgacctgtgacaagtctgtactatccactatgtaaatggctcacaagtcaattgcaaacaaactgaatgtacaaatcttagtgctggtgctgaaatctcttcagaatagtcatcatgatttaaaagtttgtttaaaaatttgcaagcatcaagtgtcaatcaaaactgaagatgaaacactaatgaatgttgaattctcatgcttttaggtgtacttcctttttagaattttcagttttctgctatttttaccgtaactatttcgtttaaatttgtttcatttaagtttcctacatgctaacttcgtttgtgcgattgaaataaaattgcagtatatatatgttgcttgtttgtgacacttagataatcttctgaaataatttgttttaaagtaagttatattggatgtgaaaaacaccttttaaagtccaagactttactacttaaaagtttacatgtcacgtcactattctttacagatttcatagaagtcgtgaatactaagtaatgtatacaaaagaaatatgtgatgatgtgtctactttttgtttgaaataactgttgggtgttccctcttcttattttctctctgcccaccttgacacagtaacttcctcttatagtcaagatgatgattaagtgtttaatttttattccattttgttctgcaacacgttcagatacttaaaactcattcatgcagttagaattatcctttatgtagtttgcatggtaaaggacattgtgtggtaaagggcattattgagtaatgaattttaagtatagcaaaatatgtatagtgtttatacatgatgctgatttcttaaaacctacatataagcagtagtactttttctctattataaagtattaattttgagttccattttataattctgatgtcttcattagaaatacaaaaatacaatccttgtattttttctttgaccagacccaaattttccccttcccccctccattctcctctccacttctcgtggaccgcgtgttcccaatattcattaacatttgcagccattacagagttacagttgtaaaattttcagctgtttttttttttttttttttttttgctctagcctgtctcatgttcttgcttctcttcatatgtaagtcagtatttttgtctacaaattaaaagtcacttgtcattcaaaaatgagttaagtaacatgataatcttttaaatttacctagctacaacttttatgtctcttgtaaatttatatatactttcagtgccattgtgaagaattggccttttaattctaagtagtattaccctatgaagcacagtgtgcaaaggtatgctacaaggtctctttaattcctgtgtggccattataattttataacaccattaccctttaaattctaccgattataagcagcgtaaaagtaactatataaagcaaacatcgcaaaggaactctgcaggagctcttaattcctttatgtagctatcataaaattcactttcctgaagacatttactctcattcacttccaaactccaaacctttttctggtagcaccacttttgtttttaatagaaagatgagttcatatctgtacatctctccaaagctctaaggaatgagaaaaggatcctagtatattgaaattactgatgtttaatacctctgccttttcactaaaagccatttaatatttttaaagtcaaaacttgacatacaggtatttataaggaatctccatgactctgaaggaatgaaattgatgtaggtagctttggctatgtaaagacatagtagaggacaattacttaaagaagagttttcttttgaggatttgtagatttgactaagcagctgaagtcagtaacccctcaagaaaggccgtttatagaagccaagaactgttggaggtctgtgatgcaggtttttctgttcccaacatcaaaagctgtggattatttggtgtgttcccctttatgttatctctcgataatttttgagacatcaagattttttaaaatatcaatactggaaagatgaaaccttcaaattaaaacctaaaattgattagaaagaaaagtaaaatattaatgcagtaaatttaggatggttacagatactcaccatcaacataaataaatggagttctaggataaattatttgtggaatactaatggtcaagtcacataagagtaaaatcttttggtgaggagacacatttgacaactgctaaagaattaactaaatttgtctttctaaatagttttctttataaagtaacagaaacattgtaaaaggataaataaatgactgtcataatgactt

SEQ ID NO: 666 - protein, 533 aa, Homo sapiens
MSEQSICQARAAVMVYDDANKKWVPAGGSTGFSRVHIYHHTGNNTFRVVGRKIQDHQVVINCAIPKGLKYNQATQTFHQWRDARQVYQFGSKEDANVFASAMMHALEVLNSQETAQSKVTATQDSTNLRCIFCGKQHYGQHCLDKTHNYLLKFKMAHPKKNWKFKEERMERERLERERLERERLERERLEQEQLERERQERERQERLERQERLERQERLDRERQERQERERLERLERERQERERQEQLEREQLEWERERRISSAAAPASVETPLNSVLGDSSASEPGLQAASQPAETPSQQGIVLGPLAPPPPPPLPPGPAQASVPPPPGPPPPPPLPSTGPPPPPPPMEDTSFPSGGNAIGVNSASSKTDTGRGNGPLPLGGSGLMEEMSALLARRRRIAEKGSTIETEQKEDKGEDSEPVTSKASSTSTPEPTRKPWERTNTMNGSKSPVISRRDSPRKNQIVFDNRSYDSLHRPKSTPLSQPSANGVQTEGLDYDRLKQDILDEMRKELTKLKEELIDAIRQELSKSNTA

SEQ ID NO: 667 - DNA, 7374 bp, Homo sapiens
  misc_feature (1)...(7374): n = A,T,C or G
gaggcggcggccgcctggggaccagctccgcgcctcggcctctccgccccctccccagcctttctctcgccctcttctcccacactcccggccggcgcctcggctttgtgcgaggagatggtgtagccccctggccgccgaaggaggagccggacacttgtctcccgtctccgagctgctccccacccctggaggagagacccccccctcggctcggcgccttctgcgtctcccggctggtggggaagcctctgcgccgccggcaccatgagtgaacagagtatctgtcaggcaagagctgctgtgatggtttatgatgatgccaataagaagtgggtgccagctggtggctcaactggattcagcagagttcatatctatcaccatacaggcaacaacacattcagagtggtgggcaggaagattcaggaccatcaggtcgtgataaactgtgccattcctaaagggttgaagtacaatcaagctacacagaccttccaccagtggcgagatgctagacaggtgtatggtctcaactttggcagcaaagaggatgccaatgtcttcgcaagtgccatgatgcatgccttagaagtgttaaattcacaggaaacagggccaacattgcctagacaaaactcacaactacctgctcaagttcaaaatggcccatcccaagaagaattggaaattcaaagaagaatggaaagagaaaggttggagagagagaggttagaaagggaaaggctggagagggagcgactggaacaagaacagctggagagagagagacaagaacgggaacggcaggaacgcctggagcggcaggaacgcctggagcggcaggaacgcctggatcgggagaggcaagaaagacaagaacgagagaggctggagagactggaacgggagaggcaagaaagggagcgacaagagcagttagaaagggaacagctggaatgggagagagagcgcagaatatcaagtgctgctccatcttcagacagctccctgtataacgctccacttcctgagtattccagttgccagcctccttcagcacctcctccatcatacgctaaagtcatctcagctccagtgtcagatgccactcctgattatgctgtagtgactgctttgccacctacttccacaccccctacaccaccactgcgacactcagcgacacgttttgcaacatctttaggttcagccttccaccctgttcttccccattacgctacagttcctcgtcctctgaacaaaaactctcgaccttcttctcctgtgaacacaccctcttctcagcctccagctacgaagccctgtgcctggtctacttccaatttttcgcccctccctccatctcctccaataatgattagcagccccccaggcaaagctactggtccaaggcctgtcctccctgtttgtgtttcttctcctgtgccccaaatgcctccatcaccgacagcacccaatgggctggttgactctgtaacatatccagtgtctccaccgcctacctcagggccagcagctcctccgccgccgcctccactgccttccctcgcatcactctcacactgtggatctcaagcttctcctcctccaagcacccctattgcctcaactccctcatccaagcctagtgttctcccttctccctctgcagctgcccctgcctctgttgagactcctctaaactctgtgctgggagactcttctgcttctgagccaggcttgcaggcagcctctcagccggccgagactccatcccaacagggcattgtcttgggaccacttgcacctccacctcctccaccactcccaccagggcctgcacaggcttcagtagccctccctcctcccccagggccccctccacctcctccactcccatccaccgggcctccaccgccccctcctccnatggaggatacctctttcccaagtggagggaatgctattggtgtgaactccgcctcatctaaaacagatacaggccgtggaaatggaccccttcctttagggggtagtggtttaatggaagaaatgagtgccctgctggccaggaggagaagaattgctgaaaagggatcaacaatagaaacagaacaaaaagaggacaaaggtgaagattcagagcctgtaacttctaaggcctcttcaacaagtacacctgaaccaacaagaaaaccttgggaaagaacaaatacaatgaatggcagcaagtcacctgttatctccagaccaaaatccacacccttatcacagcccagtgccaatggagtccagacggaaggacttgactatgacaggctgaagcaggacattttagatgaaatgagaaaagaattaacaaagctaaaagaagagctcattgatgcaatcaggcaggaactgagcaagtcaaatactgcatagaggaacagactaaggagagataggactttaatctggaggaaaaatatcctacaaacaacaactgttcacaacagcaaacccctacatttatgagctgtaagaagaaaatggagacaaacagaaggagggaaaaaccaacctactctgaaagccttcagacattatgactctggtgataagctctttccctctccgtttgctgcttttttctggcctttacaacagaatggaagagaatcatttaagagttcctgtaacagttatgcagaaaatactaaaacccatcaggcaagatcaccacgcattgaaatattttcatatcaagataaagtcgcacattttccacaatacattgctaaaataaagaggagaaaggcttaggaagtttttttgcagagagtgctggtaaagaattgagcaagtttgctattgtattgtaatgtttctctcaggtttgttcttcctatcatgtttgatattccatgaataattgagatcagccctatgtaagttaagatcataatatgtggaacaaatggaattgtaagtgctttcaaagggtaatatttataagaaagtgtccgaaaaatgtttcttcagcttgagaaattttagaatgataggaagtttctcgagttagccttcatgcaattttgtagattaaaacataaaatttgtccagaacttaaagatttagatgccttcctaaattgttacaatgctttaccaaatctatgacttctacataacacaaaccagtggtcaaatgtaaacactatattgtagatttactgtaggttttcaaccttttttagatttatgcatgtggacatttttataatgtaattacaatcaccacaaggttagcttttttaattgcagacagtaatgcatgtcacactaatatgtagtggccttttcaaggcctagtcccagggaaaacattttgtagagtataggggagtgggaggaaggggaggaataattttttatttaaagttgatttctgcactatctttttctcagttacctgcatgaataaataatgagaaatattttgtgactttaattggtaaatatgttacaaaaccaagtacttaatcttttacatcatgtcttcagctatttgtattttaaccagtaatttcaatggtctgaaacatgattctgagcttcacataatatcttaactgtggaactcaaaagtttgatcactgaatttggcagttattattacctaggtacccccgctgttacacaggtgtttagatacgtgttcctgaatgaagctgcttttgaattttgttatgttgaaatgcaagaaataacaatgatggcagcaattaaggtcacagaaatcattaggtaaaggaaaaccaatgaggagttctgcagttttcttttaataagtaaagtgagacttgggtggtgggaagaaggaaggtgggaagaaggaattagacactctgcctgccactctgcgtgtgtgtgctctcgcgcacgtgctgtctatatggaagccactcccttttctttcctttgaaactggtaaggttaaaataggggagaaatcctacatgttggaatgatagctttttggaaaatttaagaaactctccaggctctccatcttgatttatgcttgagttgttatgtgccatatttgctttgaactctgattatcagaagttttactaaaactttgaaataattcactttcatctgctttctagattttgtacatctcagtccataaagcaaagcttgttgatagtgtagttttctaaacgctgcaaatttgcagcctttaccactacaaagaagtttggatgagggattttttttttctttgtcaaaatagttcctgtttctgtagaaatttcatttttagattaaactgtgatggatgagctatcataattcaagtatacatttcttttttctatcagatattcattgtcatgcagtagtagtaaaaacatcaaagatgcagcaagcttattaagtattattttctaaaagaaataggaggcattttcatctttattattgtacttttggttatgcaaacactttgataatataaacagttatgtcccctataaatctggtcagcaacctcttttgattttgttgggtaagttaaatagtctgtagtaggtagagtactgggtacaagtggtccaaactaagataagagactaaaataaaatgctaaatcttaaaagaaactgggtttatgcactaaacgttttgtgccttggtctaatattaacatgatgtatgtgtaaactgacaaaaaaaaaaaaaaaaaaaaaaccagtgttgaatcatgctatatttcccatcatcccagattgctaaatgttctttccaagaagtctgaatgaattattatatacatttgctatcatacatgacagttgtgtcattattagagatttcagtaattaaaatgggaaacagaagcctaagttatttaccttatcaaaaccacgttccttggaaccacattattatgatggtttttgtgctcttgtacgttggatgtcttaagctgagtacagtttaggggatcctttctaatgacaggaaggcactgctttcctcaacactgtgatctgacctgtgacaagtctgtactatccactatgtaaatggctcacaagtcaattgcaaacaaactgaatgtacaaatcttagtgctggtgctgaaatctcttcagaatagtcatcatgatttaaaagtttgtttaaaaatttgcaagcatcaagtgtcaatcaaaactgaagatgaaacactaatgaatgttgaattctcatgcttttaggtgtacttcctttttagaattttcagttttctgctatttttaccgtaactatttcgtttaaatttgtttcatttaagtttcctacatgctaacttcgtttgtgcgattgaaataaaattgcagtatatatatgttgcttgtttgtgacacttagataatcttctgaaataatttgttttaaagtaagttatattggatgtgaaaaacaccttttaaagtccaagactttactacttaaaagtttacatgtcacgtcactattctttacagatttcatagaagtcgtgaatactaagtaatgtatacaaaagaaatatgtgatgatgtgtctactttttgtttgaaataactgttgggtgttccctcttcttattttctctctgcccaccttgacacagtaacttcctcttatagtcaagatgatgattaagtgtttaatttttattccattttgttctgcaacacgttcagatacttaaaactcattcatgcagttagaattatcctttatgtagtttgcatggtaaaggacattgtgtggtaaagggcattattgagtaatgaattttaagtatagcaaaatatgtatagtgtttatacatgatgctgatttcttaaaacctacatataagcagtagtactttttctctattataaagtattaattttgagttccattttataattctgatgtcttcattagaaatacaaaaatacaatccttgtattttttctttgaccagacccaaattttccccttcccccctccattctcctctccacttctcgtggaccgcgtgttcccaatattcattaacatttgcagccattacagagttacagttgtaaaattttcagctgtttttttttttttttttttttttgctctagcctgtctcatgttcttgcttctcttcatatgtaagtcagtatttttgtctacaaattaaaagtcacttgtcattcaaaaatgagttaagtaacatgataatcttttaaatttacctagctacaacttttatgtctcttgtaaatttatatatactttcagtgccattgtgaagaattggccttttaattctaagtagtattaccctatgaagcacagtgtgcaaaggtatgctacaaggtctctttaattcctgtgtggccattataattttataacaccattaccctttaaattctaccgattataagcagcgtaaaagtaactatataaagcaaacatcgcaaaggaactctgcaggagctcttaattcctttatgtagctatcataaaattcactttcctgaagacatttactctcattcacttccaaactccaaacctttttctggtagcaccacttttgtttttaatagaaagatgagttcatatctgtacatctctccaaagctctaaggaatgagaaaaggatcctagtatattgaaattactgatgtttaatacctctgccttttcactaaaagccatttaatatttttaaagtcaaaacttgacatacaggtatttataaggaatctccatgactctgaaggaatgaaattgatgtaggtagctttggctatgtaaagacatagtagaggacaattacttaaagaagagttttcttttgaggatttgtagatttgactaagcagctgaagtcagtaacccctcaagaaaggccgtttatagaagccaagaactgttggaggtctgtgatgcaggtttttctgttcccaacatcaaaagctgtggattatttggtgtgttcccctttatgttatctctcgataatttttgagacatcaagattttttaaaatatcaatactggaaagatgaaaccttcaaattaaaacctaaaattgattagaaagaaaagtaaaatattaatgcagtaaatttaggatggttacagatactcaccatcaacataaataaatggagttctaggataaattatttgtggaatactaatggtcaagtcacataagagtaaaatcttttggtgaggagacacatttgacaactgctaaagaattaactaaatttgtctttctaaatagttttctttataaagtaacagaaacattgtaaaaggataaataaatgactgtcataatgactt

SEQ ID NO: 668 - protein, 713 aa, Homo sapiens
MSEQSICQARAAVMVYDDANKKWVPAGGSTGFSRVHIYHHTGNNTFRVVGRKIQDHQVVINCAIPKGLKYNQATQTFHQWRDARQVYQFGSKEDANVFASAMMHALEVLNSQETGPTLPRQNSQLPAQVQNGPSQEELEIQRRMERERLERERLERERLERERLEQEQLERERQERERQERLERQERLERQERLDRERQERQERERLERLERERQERERQEQLEREQLEWERERRISSAAPSSDSSLYNAPLPEYSSCQPPSAPPPSYAKVISAPVSDATPDYAVVTALPPTSTPPTPPLRHSATRFATSLGSAFHPVLPHYATVPRPLNKNSRPSSPVNTPSSQPPATKPCAWSTSNFSPLPPSPPIMISSPPGKATGPRPVLPVCVSSPVPQMPPSPTAPNGLVDSVTYPVSPPPTSGPAAPPPPPPLPSLASLSHCGSQDPPSTPIASTPSSKPSVLPSPSAAAPASVETPLNSVLGDSSASEPGLQAASQPAETPSQQGIVLGPLAPPPPPPLPPGPAQASVPPPPGPPPPPPLPSTGPPPPPPPMEDTSFPSGGNAIGVNSASSKTDTGRGNGPLPLGGSGLMEEMSALLARRRRIAEKGSTIETEQKEDKGEDSEPVTSKASSTSTPEPTRKPWERTNTMNGSKSPVISRPKSTPLSQPSANGVQTEGLDYDRLKQDILDEMRKELTKLKEELIDAIRQELSKSNTA

SEQ ID NO: 669 - DNA, 57860 bp, Mus musculus
  misc_feature (1)...(57860): n = A,T,C or G
agataaaattcactacacagggaagttgacttcctcataaacaagacagatagccacgcatggtagtgcacgccttcaatcccagcacagttaaggcagaggcagtaactcgaagagttgaattcagtctatacaatgagaccttatctcaaaaaacaaagaaacatcataatatggacccttttaatttatattaagtttcataaaaaaaacttgaaactaattacgtctcaaaacaaatcataacttattattaatctaatactctaccagaaaggatcagagtaggccaactgcaatacatcctggtcagcagttttttactattgatccaactgtttagaaacaattccttagtacttcttattttaagtagtactgttaaagattacaaggcaatagtttgtctttaaaatatatctcttttaaaacttactagaaattaccagctttattggcagcaacagttcttaaggcccaactgctggaactcagtaatacaggctatacaaggaatgaaacacttaagtatgaaaattgtcgaaatattcaaactacctccaaatgatgtgaaaaatatatttttaaaaattctattattctcttagttgcttctgataacaactcaagtaatacatgcttgtgaaaacagttcagacagagcccctaactcagtgacccctctgttgatgatgtttcttgagaccttttctgaacctctgatactgtactcactgacaggaatcggctaacgtagatgccattttttgctgctcttgcaaagatcctgggctcagttcctatcatccacttagcagctcacaattcctgtgaggactggatgccctcttctggcctgccaaggtaccaggcatgcaagcagtgtatatacatacatacaagcactcacacatacacataaaaccccaaaatcttttttagcactatcactttctgtgctaatataagcgtatctttcttttacacaatagtctatcaattaactactgagacgaaatcttcaacttttctttttcttttttggaaagacagggtctcttggagtttactgtagctcaggctgtcctcaaactcagagatccttctgcctctgcctccgaagtgctgagaccatgtgtctgagctttaagtcccagttggttattgtcttcaccctcccagtccttctctggttttgtagtgttgaggttattgcctcaagtaagcaaggtcggacagtcttgttttgttttgttttatttttttcctagacaagatttctctgtgtagccctggatgtcctggaactcactctgtagatctggctggcctctgcctcccgagtgctgggattaaatccgtgtgtcaccactgcctggctagatggttctaaaggtaacaatgccatcttggtgtctcagttcaggctggttttaaagttactgggtagccaaaatgaccttgaacctctggtcccctggcccagcttcccacgtgctaggattacagatgtgcaccatcacacccagtatcacgcagtgctgggaactaaacccagaacagcagcagtgctaggatggccctttacctacatccctagccccaagaactgactttaaaatatcaaatgatgttcaacttaatcaaaaggcagaagggtgataaagaaactaattctgaacctatgctcaacccagaaaaaaatactctcagtgaagtcgattcctgaatccttctagcttaaaagagcactatgtgagcaggaaaatccagaacagagactaataatttaattatctgagtttcaaaaatgtccctttaataatacatgtaattacacaaacagaagtgaaagaagagtgcagccaggcacggtggcatggacatggaatcccagtttcttgggaggccaacatagaaagattccccaagttcactgccaatctaggaatcttcaaaaggagccaaggatacactgtactgaagtccacctcgttcttacaaggtgggatgcttgaaacacaagcaaagaatttaacaaccaaaacagcattacagatgttaacctaatttacaaatgaggatggttaccatattcttgcagtcttagtaaaaagcaagtccttttaggaacataatgagagcgtaaccagccttgtgctgactcgcgcagggacacagtaccggagagtgatggctctggccacggggtcgttactgtggatcactgagaacaccctcttcacaaactcatccacatttagaatcttctccaggtgcttctcactttgctgcgtcactttgagaacacacagccgcaggaagttgtttctagaaaagaaacaggcaaagaaatgcctcactctaggaacagtgcgtgtaacttgggttgagtcagaccagtgctaatggtcagtgcttttcctgctccccactaagaaccacccaactctgtatacggtggctcccgagcgaaagcagtgtaaagcccgtagccccgctgaaagacgcctaaaggcctgacccaagaaacagctccaggacagaattaacctctgcagtcactcaaaggcgacagccagtgagtcaggcgatcttcctccacacagcttagaagagataagggtaaggagcatacacatctccaagactgtacctacaagtcactaaatgaaatcaggaatttctaaaaccatctgtaagaaagcctacaattttacaaaatacatatacagtagcagaataaggctgttctgacttaatttatcttgttccctgaagaaacaatttcgctctgaaccttttcattttttctaaaagtgtcattaaatctcatattaaagtatggtacaaagcattatgcattcaccgagagtaactgagtggcaagaagttctaatggaccagaagaaaagacacagtataaaacagagatacaagtagcctgtcctttgggctgctgaggcattcagcacacttacccaactctgaaaacatcagctaactttaggaatgctgagttgatgaggatagggaacgggtacttctggaaaagcctgggaaagcgcacgactgcctcacactgctccccgagtttgccagacctcagtcctattgaaaaagcacaggaggaactaattacagatatgtcaaatactgacagaagctaacttacagaaatgtcaaatactaacttatacaggaggacagcaagttttcaacaagtaaaaagaagcactgttcaaggaactggagagatggcttagtggttaagagcactgactgctcttccaaaggtcctaagttccaagtcccaacaaccacatggctcacaaccatctgtaatgagatctgatgccctcttctggagtgtctgaagacagctacagtgtacttacatataataaataaataaatcttaaagaaaaaaaaaaaaaaaaaaaaaagaagtattgttcaaaactaatgacttctgttcgaaactaaaaatggaaggctgtgcaagatggcacatgcctctaaccccaacacacaggcaaaaagactgcagttcgaaataaaaacaaaacaaaaacaaaaaacagctgacaaaaacaaatgaaaatggcatgtaccttagttacttgcaggcagggcatggatggtggcacacacctgcaactgcaccacatgggaagaggcagagatcagttcaaggccatcctcagccacataccaagcttgaggccagcctgggtcacttaaggtcactaaacaaagcaaaacataataccgtaatataaaactacctcaaaagaaaaccacaatagccaccaaacaaataagtaaatgccgtagaaatttcataaacattcattttaaagtttttatttcatgcatacatgtgagtggctgcataggccagaaggtgttagattctggagatggagttacacctggtggtgagtctcctaacttgggtcctctggaagagtagcaagtgcttttaactgctgagccatctctctaggccctaaactgattctcttagacacaaagcaatgaaaaagaaataatttttaaaatgttgaaagttgattaagactattcaggaatataaaatatgagtgaatttaaaaggattgaggtcagttagggttggtagtataagcttatagccctgggtatagcctggctgagacaaaagaatcacacttcaaggctaaccctggctccagagcatgtacaaggctagcctgagcaacctagtaaaactctgtctcaaaggtgaggtgaggggcatgaagagagactggaaccacagttcagtggttgagcacttgtctggaactctcaaaagcaatccttagtactataaaaaataacaacaagcaagcaaaacgacacacacaacgtatgctttctatcaattgaattagaagaatatctagaaaccttccaagtatttggtaatcaatattctgttaagtaacccataggggaaagaagaaggaaaataaaaaatatattttcaacggaatgaaaacgacaatacagtttgtaggctatgactaacacagtatttcaaggaatagttgttaatatcaaatactcatgttaggaaaagaagagcttccaatcaataatctataacctaacaaatgtatcaacatagctgtggtggtctgaataagagtgacccttgtatggtcggcagttagtagagctgtttgagaaggactaggaggtgtggccttgttggaatgggcgtggcctttcccatgtccagtccaatctctccctctgactgctgcctgtggatcaggatgtaaagctctcagctactgctctagtgccacacctgatggtgatggactaactctctaaaactgcaagcaagcctccaattaaatgctttctttgtaagagttgccttggtcatgaggtctcttcacaacaatagaatagtgactaagctcaatgtggaaaccaaatttttaacattgattctggaaagactaaaaacacctaactaaaagatgaccctcagccgggtgtggtggcgcacgcctttaatcccagcactcgggaggcagaggcaggcggatttctgagtttgaggccagcctggtctacaaagtgagctccaggacagccagggctacacagagaaaccctgtcttgaaaaaaaaaaaaaaaaagatgaccctcaacccttagtctgcattatatatagatgttaagagctataattttaaatattttgagactttatttatttgctataacacacacacacacaccacacattttgcttctatgtataaatgtgtaccttgtgcttgcaaggcctgcagatgccacaagaaggcattggatcacctcacaccgaagactacgagctgccatgtgggtgctgagaactgaagcagggtcccctgaaagagcagccagtgtccttaactgctgagccatctctacaaccccataaactgttttcaaacaatataaatctcaggcacatgtgttggaatgtctcatctgaaatcagcaaaaactacctagttaattatgtagttaatctcttaaacatttttagactagacttcttgggttttgtttaattgctgagattcagtcttgcttttcaacacagcctatcctggcactcactatgcagacctggctgctttgaaactcactatgaatgatctcaaactgggagtgactacatgtctgcctcccaggctctgtggttacaggatacgtcaccacacctggcatttaaacctgctaaacttctaagaacacctaacaccacactgccaaactaattagatgagagcaactactgttactaagaaacgagatgctacagtgagccctgtcatttagggcctatgcagctgacactgtgccgccacaggaactgtgagcacccctgagctagctcttcatctcctgctgctaatcaaagcatgtgtcttactggcaggatctggtaactcggagctgctctcgaaagacaagctagggaactttttgcctccaccttcatgagaaggggctcctaagggctactcctcaggtagacattcgagacactaagtaaccacagatgcaaccaatatccactaaagcaccactaacaaagcattaccaggaaagggtgtcttagacaatggctgcatattttctttacctcagatgaacatggctcaaaattgaatctctaacatgtatacatctcatatattcattttttaatggtgcttggttgtaacaggactaaaaaaaatttccaagtatcaccacacagggttagaatacagctcaattgcaaagcaacagaacaccgggaatgagaccctttgttcaagcctcagcaccacaaagaaatagagtaagtataactacacaatagaaggtgtactggctagttttgtgtcaacttgacacagctggagttatcacagagaaaggagcttcaggggaagtgcctccatgagatccaactgtaaggcattttctcaattagtgatcaagggggaaaggccccttgtgggtgggaccatctctgggctggtagtcttggttctataagagagcaggctgagcaagccaggggaagcaagccagtaaagaacatccctccatggcctctgcatgagctcctgcttcctgacctgcttgagttccagtcttgacttccttggtgatgaacagcagtatggaagtgtaagctaaataaaccctttcctccccaatttgcttcttggtcatgatgtttgtgcaggaatagaaaccctgactaagacagaaggcaacccacaacccacagcttaataaacagttaataaaggtcacttcacatttggaaggcagaaatggcaatttctgacataattactaagtatcctcccacaaaacttcagaaatcactgctaataaacatgctgacatataatgcagactgcacatgagaaaatactagtttaaaacaataagaaatgagactatttaataattcccattgtaaatcataagacaacagctcacagtcatacataaaagtaaggccatggtttcaataagtggatttctgtttagtttatctgaccttgtccatcagggtcaccaaccaaactgcagagtccatgctccctaattcagcttcaatgtggtaaactagttgctgaatctagattctatataaccttaaaggttcacttaccaatgctgtcagactaaatgtagtctggtaataaatatcctcaggaaaaaaaagtctgaatccatagggccatgtttctactactcttaaaaccaccagtaatgacatggcgtcagccgcctagtgcacacccaacccagtggctaaggccattcattctctcagaggggctgtgctgagtcctcactccctaacaccagttacattcctgcacacatgggcagtacaacagtggtcttcacagggagaattaagatggtggaactgggtggatggtaacaacgctaggaaatcctagtgtgtggattctgtcctgactctcacccagttctcaagagttgaatcagcactccacgatcaggcttttcctacagcattaggttcaccagcttccactcatgtgcagcaagaaagggaatgagtcaccttccccactcccacccatcctctcaaagccaggtgtgcacagagccatcaggttgagtgatgtcactaaacctttctctctgcaggaaggggatcttgcctgttttcatctggacaacttccaatcactggaggggcaaatacttggtctgatgataataatctacattaggaaaagctacacttattagagtaatatgtgggactcagcctttagcagctgggcccactgtgtcacactactgttcccggctgatacaatgtgtcttgttgagcttagggcttatctgtaaaacactcaacagcccccacttatttcttacacatatgtgttttaatttcaactcttcttattaaaaaggttgtactattactttcattacaactgtaaccttttctttcaaagagcttcacttttaattatgtgtatgtagggggagggagagatgggtgtataacagaccctctagagttacaggcagttgtgaggtttggggtgtgagtgctgagaactgaactctggtcccacaaaacagcagtgtggcctcttaaaggctaagtcatccctacagccgcagcatcttttttttttttttaatgtaaaccttatttcattgttattgtatgtatgtgtgcacatgtgtgtgactgtcaggcttgcacaggaagtgtttcacacagtaaaccatcacactggctcacaacacttagaaggtaactctggatgtccttcctttccttgctccatatccttaccctgctctacaacactatctactcttagcctgggacaagattagctacgctagagccatacacatttcggtgggaagggagttggcactgaataaaacagtgtaatgggccacatcaggtctaggacttgggaggctgaggatcaaaagttgagagttatccttggctttagggagtacaggccaacctggatgtcacagactttagtaaaacgtaaaaaactcttacctgtaactggtttcaaacttggacaaggaactaaggtgcatatttaacatgccaaagtctaattgacctccaggttctctcagcatcccccagtccctacttggcacaccctgccccccagacttgaacttacagatccttggtttccagtcccgttctctacaggttacacactggctacagttaaccaagaattgcctatagtgtaaaaaccttggcaggaaactgaagcaaaggtctcacatttacacaggacttctttatggatagctatctgtcaaagtccctcttcagcctttaataaaggcatcttttcgcataccactgccatttaacatttacaacagctgacatactgtgcccactttgctgacatatcgaggctagatgataatgccgcattccataatcactttagtagaactggaatttaactcctaaccctaaaattttttctcttagctacctgtataaggggaactaactcgtggaacttgtgtgcagagaatgagcgcgttcagccaagcttttcggatgttctcatccacatggaacctgctttagaacgcgcaattgacagtctcgcaagacaaatcgctgtaaaacgctcagaaaatcatttggctctcttaatgaaggcttcacctgcactgaacgttttaaaaaataatctcaaaattcagcactttatcttatttgctgcctgggaaaccagagactgtgcccccaagtggtcaaaggcatcctcgcaagcacgagcctctgctccaactgtgcaaggctactccagcaaccctgcatgcgcctaagcgctggctccaagactagcagccgtgcttcccgccccatacatcggcgcatgcgcctttctagcctctgtagctgccgccactaggtggcgccactccccccagacgcttcgcccgcgtccctcctccgtacctttgtccagttccataagagcggaattagcgtccagctcctgttcgccatagccggcatcggccaggaacgacttggttgagtttgacgccatgacccggacagttacccgactcgcccagtcacaaagattgcaaactctaccccagcaccgccatcttctcccgccgcggtctcgcggatttttccctccgcgcgctgtcaggcagtgtacgcatgcgcctcggtcgccccgcggttcgccagttcctctctgggcccccccgcgcaggcgctcagggagcctgtgaaccttgggttcccgcggctgagcgagagggaggcggagcttaggatgggggcgagccttcgaggcgccaggacgctgcgacgagagccaatcagaaagcgtgacgtcagtttggcgcggagtttggcggccggggctcttagtggcgggagttggaggcgaaaccgcgccgcgttgtggagggtgcagacggcggctcctgtggaacttgggggcgatcttctcggcgttcccctcagctgagccttctcctcaggcccagatgctcttcaactcggtgctccgccagccgcagctcggcgtcctgaggaacggtgagtaacggccccaacggccgctggccgtggcgggaaccacctccccccaggcgctccaccttggatcgctgccgactgtgggcctccaggtctcccgcggccggagcgaatccgggcgagcgaggaccgccgaagaacatcgtgcttgggttccttccggacgcttttcaccgtaatcgagctttttagttcggaacggaggccgaagttaggacgctcagtggcgtcccgggcccctggctgcttacgtcaatatcgcgcgttaactagagagtgcacgcttgtgagagtcgggggtgggagacgctttggcaccagcgatgtgcctgccgtctctgcagaaccttagcgatcactgcaagttcgttgtgcaccagcgcgcatggcccgcagttaaggaactcaatcttaaggcgccaaagtcccctcccccatctctgcaggctctgaaaagtcctaaaatacagactaaaagatgcccatagccacacccacgaggtgaccacgggtaatggatggaagggtattgttccaaatgtgtcttgatgccgaggtacttccagaaatgggattaaactcgtttttctcttcacggtggaattcagccatgttctcctgttagcatatagaaagccagctcatctcctacagtactcttaaaaacattggcaatctgagatgcgattaggctgatgtgttgttaaactaagaccttgaagagtggtcctaagaatgttgagaagaggaaaagctccttgaggtcctgcccggatctaaaactttgtagtcgtattccctctgtggatactcttgtagttacattctgcctctttctctgctcgaactttacaaaagttacttcgccctgtgttaggaatggccgccctgcacaatggttgtgagcggtcttcggagcgtctgagtttcaactccacctcttttcctatgtgctacattttctgtctacccacttttcagtctgtcgttccggcttacagatagccagacagacgttcagtgataggcactggcattcattgattgttacctcctgaagtctgcatctcttttcccctccggtgttgctgggccttaaatgattatagccgtaagtaaggattctactgctgctacactcttccattccctatgttttgggttaatttctgtaaaagctgtatgtattgaacttaatctagacagttaggcatacaagcatcttatattctaatgccccaaactgagttggcttcttcccaatttttgggagtgacattattttaaactggtgtccccagctaaaacttagactccatattcctcattatgacattttcaaaagaaaaaaaagaaatcccttaagtctgcttgaatctctttttccatccccacagattcagcctctttacctcaaactgagtcttccattttctctattccatccccaccattgggcctgatactttactccctgatcataacaagcctctaaatgtgcctttagtttcctttctctaccgatatttgtaagatggaaatataattacttttgtgagtttttaaatccatatctaagaatttttactataaactttaaacatgcaaaattataatttttagccttatagtgagttagcatcttaagataaatactattttagccttttaaatacatctgacactataaacaactataccaacgtggaagtcgtggtctctgtttttgaaaaggtgagcaaatgcttactgttcgatgttttatatggttgctttttcttctgaatatttctatcttaattctccgcaaatttatcctattgtaatttaaaagttcttgtcaccctgtcatgccccatcaaaaagcatataaagtgctgttttctgtggttttagtacccagtagtcacaaaggtttcccttaggatgaattatcaccacagttaattaatagtgggcagttgttagaaactaagtaacttcttaaaatgttttaagaaaaaagcaaaatttttattgaaagtgcatcttttaaagaaatggatttaggtatctggtgccttgtggtctcaaattgtctcatagttaggacctcactagttttctatttgggattttgtgtgtgtgtgtgtgtgtgtgtttatttatttagcacatgcctttaatcccagcacttgggaggcagaggcaggcggatttctgagttcaaggacagccagagctacatagagaaaccctgtctcgaaaaaccaaaagaaaaaaaaaaagatttatttatttatttttatttatatgcgtacattgtactcatatacacaccagaagagtgcatcagatcccattacagatggttgtgagccaccatgtggttgccaggaattaaactcaggacttctggaagagcggtcagtgttcttaactgctgagcccatatttaaaaatttgtaatggacacatctttcaacaatgcaaggtgtaagatgaggaagggagagtagaataccttccttttgtggaagtagaaaggaagtgaagcaagtgataggaaagggaacccctcaacctgttcagacagagtagctttagaaataatgtgtgggagctgttgaattgtcaaggggttgatcctctgaaaatgcaaagccttgtatatttcttttgagtgtgggcctttagctgtgtattgaagaaagaatggacctttccagatgagtatgggtgtctggaaaacactacaggttcatattcatagcataataaagatccaaaagtatattatggggagatacagaaataatgaactaagtagagcttgctcagtgagtcactttaaatactgtttatcagtctgaatactagtagaggtaaagaggcagagtaaaggaattagcttcattgtgaaaatatccaaagcaaattgtatcttcagtttttttaggttttttgtttgtttctctgtatagccctggctgtcctggaactcactttgtagaccaggctggccttgaactcaaaaatctgcctgcctctgctttccgagtgctgggattaaaggagtgcgctaccaagcccggcttgtatcttcagttttactcatgtgatttctctttgaatagacttaaaacttcacatcatatacctgcgtttacatttctttacaatgcagccttttgttttcaattttactttttgagtatttgtgaacataacatctttttagtggtctttcagagagtacatattaggttacttaatatcaaaagttagaagccatgcccctacaagcaattttaaaatctagactaagttccttttctcctttcttctcattccttctcaaactagattgagtgatatttctgttaggctgaaatatcttctctgtttgagaggggtcgctttctcatcatctttatcccttccttctattttgcaaaaggaaggcattctcttgtccccattgtataccttgcattgtctcagaatagacaaactgctggatgtctggtacagaattttaaataaacaaaactgagaattggtagtgccctaagacatgaatttaacatttgcagcacttacaacttgtcagctcattatttcatctgatccttgatcagcaattacttctttaaaaaatgtttttcttactgaggctgagcatgttaatctaaaaaatctgaaggctttgagtgctggtatgttcaaaagcctcaggatgcccaaccagtaaaatgtaagcaaatcggaaacatccttggtctcaaaaatgttttgaataagaacattcaaccttttatatttaaatgagccaacctacatgttcatactaatcagattttagatgatgacttagtatttagaaccgggatgtacattagaaagttggctttctttctgaaatgaaaatttactttgagttctctaaagctgcatttcttaggggcagagacagaccacttttgagtcatatctcacataagatactgggttcctgttagaattttaggatcctagaatttcagcactttagggaaaaggagttaaattgctagtcaatacagtaaccgtttgagtgctgattgtgttatggttgcagtttgcttgattttctcattcatgcactcccaaaacgaacttttcatggaagggagtaacagtttaatcggtaatgctttactggctgcgttttactggtaaatcggaactggatgtggtagaacatgcttttaatcctagcacttgggagtcagaggtaaacaatcttgaattcaaggctagtctgatctatgccatagtaaattcaaggccagccagagctctacataatgagactgtctagaaaaacaaacaaacaaacaaacaaacctatttatagtataacccaaatgtcctcagagtgttttgatttcttccttaaaatggcttaagaaaatagcataaatgtctggttgatctccannnnnnnnnnnnnnnnnnnncctggtcaacagagtgagttccaggacagggctggaaactgagaaaccctgtgtcgaaaggaagaaaaatagcagaagaggtgttctggagcaccatagatagtgagtagatctgagttacatatgtaaagttctatgtgaacaaatacttaaaggaactgttttgttttagggtggtcttcacattaccctctacaatcccttctaagtggttatcagtgcaactgtaacgatgaacacacgtcttatggagaaacaggagtcccagttcctccttttggatgcaccttctgtaccggtgagaaaaggactaagtacactaagcttgaacagaacattgcttcctacttagagggaaaatagactttgaaagaaaagaaatgtaggtagatgttaaaattattctcataactgatgatttataaggtacagagatgtttttaagatgaaggtttttttttcctagcaatcattttaaaaatgtgaaaagaagttcttgtctctagtctcatagtttaatggaggaaaggtcataaaaaggaactttaaaaccgacagtttctatctgctggtggtttgtatcctggttttatttgccatgggccagtaccactcttgatttagtcaagtcagagtatctaaagactattttgatggttagagtagggtttttaaaaattatttttatattatgtgtatgagtgttttgcttgtgtctatgtttatgtaccacagaggccagaagagggccttaggtccctgggaactacagttgcagacaattgtgagcagccatgtgggtgctgagaatcaaaccccagttttcttttgttgtagttgttttgtttttgagacagggtttctctgtatagtcctggctgtactggaactcactttgtagaccaggctggccttgaactcagaaatctgcctgcctctgactcctgaatgctgggattaaaggcgtgcgccaccactgcctggcaaaccctagttttctaaaagaacaataaatactcttgacctgagccatctctcagccctgttttgagtcacttgatacttttttactcattttgaaagttcttacatattctttgtttctcttcagctcccagtatggagcatatattagcagttgctaatgaagaaggctttgtcagattatataatacagaatcacaaactagcaaaaagacatgcttcaagggtaagtctgtaattttttaacatttttaattcataaaatctttggtgtaaattattgttttaatacaaggatgatggacagcttgggtggaataaggtagataaccatgcacgtgataggtgagagataagtgcctccacagaactagcatgcagggtcaaagcaaacagaacctcagatgccaaactaaagtcagaataacgttgtttccttgttagggttaggaaggctttggacatagagaatgttttgatgtgatcctattttagagaatacttctaatactcagaaaataattttatttctttgggaaagtatatagtgcatgtacatgagtgtgggggccagaagttgttgttagatgtcctcctgaatcatgctctgctttactttttgagacaagatctcacactggacgtggggctcattcgttgtattatacttacacctggtatttatttggctgttggctgttgtgaactcaggtccctttgctggtgcagcaagtgctttatccactgagtcctctctcccccatttgatgttaggtagtggctcgcgcatgtgtcctggagaggctgtgtgacatctgtgactccataatgctctttggcctgttgatagtagagtactagctatcatcttataataaaaacttccaaagtgtcttagttatggattcgttgctgtgaacagacactatggccacagcaactcttacaaagaaaaacatttcattgggggctggcttactgtttagaggttcagtccattatcatcatggcgggatgcacgacagcttgcaggcagacagcaggtgcaggtactggacgagctgagagttctacatcctgatccacagtcagcaggagactgctccactaggcatagagtataagacctcaaagcctgccctcacagtgacatgcttcttccagcaaggccacacctactttaataagaccacaactcttactagtgctactccctgtgggccaagtactcacacgcattctatttaagctaccataaaagatgtttaaacttgtactggtatgactgtcattggatacactctggatctgtcacacttatgttttctttgtttagagtggatggctcactggaatgctgtctttgacttggcctgggtccctggtgaacttaaacttgtgagtgacttccattttattatgtctgagtagctgctgataaagggtttctttcttaaattttactatattacttttggaaggttacagcagccggtgatcagacagccaaattttgggatgtaagagctggtgagctgatggggacatgcaaaggccaccagtgcagcctcaagtctgtagcctttcccaagtttcaaaaaggtaggttggtatttgtcattttccttaatggtggggagacacaaggacatttttgtttgtctttgctctctcaaagttgtcactttacctaactaggtggtagagattttatctgaaaatcttaatggagttagttggttggacccatttaaatctttttattattgtattttaatgtgtatgggtctttcacctgcatatatatgtctgcactgccaaggccaggagagggcactagatcctttgggactagaattaaggaggttgtgagccatggtgaggggtttgggaatccaaccagatcctgtgggaaatcagtaatcttaacctctgagccctctccagcccctgtgtctaatctttggttattatcgtcagcttttcctgggaaggtaataagacttaggacaattttactttttctatgaccaactttgcaggtgggtaagatagtactattgttagctgtaagatagttggtttattcttatctctgtctagtttcaatgggatgagacacaaactgattttttttttttattagtctctgtgcaatacttgggtattacccttaaactaattctctaacactagactggctgcttccccaaatacttgctatttgaatcttcctgggtatttctacttcagcagtgtagtgttgtagggaagcatttcactctcgcccatgctgctggtccatcatgactaatggagatctgttctctccatcttctcttgtgtgctctttctctctcctttctccttatccttcatggtccctacctgccacccccagcccagtaactcaaactccacgtctctttattctccccagtaattggctgtagccatctttattcaaccaataatattacattgtggagcaaggtttacatagcatcactaatattacattgtggagcaaggtttacatagcatcacttggtgtgtgtgaggtggtctcctagggcagagggaggactagatctttggagcaggtatttagcatttgaataaattatatatagcacccgactaaccccccccccccacacacacacacacacacacacaccccagttttttgagattttggagtcaggtctcaccgtaaggcagttgatttcagaatcagggagatccctctgtttcttcctccccgtgctgggattaaaggcatgtgccgcatcacttagcaaagcgccctgtttgtatttactcatacaaatgctctgggatactgaactaagctactgagtgggttagacttttggcaaagttaaattgtatttctgagacacgctctcagactaaccagaaacttgtgatcctcccacctcagcctcctttgttgggattacagacacatgccaccatctccaggtcataaagtttattctgttgtagttgctgttaagctggaattctgaaaagttaatatatgtcgtgagttttgattccacatcactgttcattaacaatgtattgtgtgaagttaagaatgtctgtgttctcatttgttgaactcttaagatttaaatttaagtttatgtaaaatgtatgggaataaattatgatcatgaaattttacctaatttaacagttttggaaaggggaaacaccatgtctgttaatgcctttgtctacgttttaaaactgtggataagtttatgccaatgtcgtgtaaaagaaaatgcactgggtcggatgtggagctctagtggcttttatcctggcttctagtgttacagttagctgagttggaaactgcctacaaggttcagcctgcccttagctatgcatacaatagcttagaaacaacttttattttagacttttaaaatgactttgcatttgttactttgattaggttagtgcccaacaccatttaagtcaggaaaataattatgagcataataatgaggttgggnnnnnnnnnnnnnnnnnnnnnnnnnnnnnnnnnnnnnnnnnnnnnnnnnnnnnnnnnnnnnnnnnnnnnnnnnnnnnnnnnnnnnnnnnnnnnnnnnnnnnnnnnnnnnnnnnnnnnnnnnnnnnnnnnnnnnnnnnnnnnnnnnnnnnnnnnnnnnnnnnnnnnnnnnnnnnnnnnnnnnnnnnnnnnnnnnnnnnnnnnnnnnnnnnnnnnnnnnnnnnnnnnnnnnnnnnnnnnnnnnnnnnnnnnnnnnnnnnnnnnnnnnnnnnnnnnnnnnnnnnnnnnnnnnnnnnnnnnnnnnnnnnnnnnnnngttgtgagccccatgtggttgctgggatttgaactctggacctttggaagagcagtcgggtgctcttacccactgagccacctcaccagcccctgtactcattttttaaaaaaacctggagactataaatgttagtgggggttttatgtggttttttttttttttttttttttttttagttttatgctaacatagtaaaaaagttgattggtccagtttattcaaccctatatgaacaagatactaatgatcctaattgaatagtagtgaatcctaattggatactagttggtgctagtgaaatttgcctccctgaatggctgtcctctaaagactggtaagttaggcactttggccagaatgaggaggaatagcattagattttctggtagataatttaaattaactgtgaatgtattttcttgtctcctaaaaacttaaatatatttgaacctttctaattcttcaccttgtttaaagccagtcagttcttcatcctaaactggtggttctcaacactagtgatctttggttatctgatggtttttttaacatgctaattcaatggtaatctctagtagttgagccaggttatctgtgcgcctgtctgtctgttttacttcatcaagggattccagtgtattgctacagttgaggaatgttttttaaatttaaacttaactttgagaatttcctaagtgaatattatattcatagtatttctacctctcccctccagctcatcgtgtgtaactccacattctcaaatatgtatgtatgtatgtgtcagacgtctgtaactgtggggatattgctgttcttttagctacttcctgcttgatcatgggcagaccttctgacaattttttttcctaatttttcattattaagcagaagtataataaagctcacacctgtttagagataaaaacctgaaagttaatttgaatttttggttggctgagggaaagtgggccacactagcaagtatatatgtacaaactgacaatatgaccagtccatggtattagaaagcttttattgtaggtatgagagagaaaatccaatggtatcgagaagaatagaactgagagaaaaagtagactaaacatggccagccagcagactggacccggccatgagcaaagcatgagggacaaagtgggaagggtttagacagagggaacatagctgaaaaagcaggattataaggacagtgagtaatgggggggggggggggcatgaactggggaagttttattagagtagtgatggtgagaagagctaggacttagaaaattgtaacaggtacttttgatgccaagggaacctgaaggacaaagtgtgctttggaatgctaataagcaccacagttagccttttgcctcatctgccttttggaatttgggaaaatagtttcctttggacctaccactatgtacaacctactgagtccatttaatgttgctttttttgtgcatgtatttaaggctgacccctggggattagaaatttattgggaggctggtccatagaggaaattgattttcctatagttcttcatctaagggtgaagctttatgaaattccctctacccatgctagcatgtcaactggtatagtcattgtgtaggttttgattaggcagccacactgttgagatctcagaggcacagtggccgtctagaagccaccatctcagagcaggtattctgcccttctggctctcggaatctttcacactctggctcctgcagtgttcactgggtcttgggtgtaggagttatgttatagatgtaccaactgagggtgggcatacgaccatgacttatttgaatcttgagcagtgtggctctctgtatgtaaacagtttccatctgctgccaaaagaagctgctttgatgaaggtagagccctacttttaccttgttggaggataagagggcaaactattcaaaacatattatataccataaaattttctgtttttaactgtgtatttaaacagtttttagtttactcagagttgtgtagtaattaatatgggagagcaatggatctatcagtcaatttgttaactccactatatcatccagagaggctgagtttgaagacataagtaaaggttctctctgtgtctagttcacctgctgcttgggcagctcttgttgtgatagagcccctctccacccctagtctctttcctgcttcctctatcttaaaaggaagctggcaggtttctctgttggcatttggttacctttgcctcgattgctccatctaatcacctgatttagttgttaactcctacaaaattaggtgtttttattcagtgtccacaaagctctcaagtagttgttttgggactttgttcaatttatagctattattatagttgaatcagtttgttaattgctcactcttccatatagggagcagaattcctttttaaatattttgtaaatgtgcctattttgcagtggccttgtgcatactaggcaaatgctgtaccactgaagctatatacctagcttccactgttacctaaaatataaacagtacaaataagtgggaattctgtgttctattcaatgctgctgcctctttcatacccagaggtagtactttgatctgctaagaaagaggacttttagacgttccttacctcaaaataggaagattagtgcctacctactagattggcaggcacattgaggtaatgtgtgagaaccgtgtagagcgtgagctatcttagacagtaagctctcctctgtgctaacagttgctacgctgtcgttttcttactatcatctctggtggcaaattcagtgcttttggagaatgtgttctctggggaaggggaatggaatgtgtctttgattcgtttccaacatcttgatggctcttcccacagctgtgttctctacaggggggagagacggcaacattatgatctgggacaccaggtgtaacaaaaaaggtaagctagttctgtcttaattttaataagtgcttaatgctcaaaataaaatgaaatgctagtgatttcatctgataccagcagggggcacttgtgttcccttcctgctcaagtctcaaggtaatgattattgcaaagctattaatagatgttcttagtttcacattgtctctgaattataattccgtctatctaaattattgatagaattaaaactactgatgtatagttcactgaataaaggtttggttgagatgtttttgtttgcttttaattttcctttttttatcctgacaagatggctcatcagataaaggtgctatccatcaaacctcaactacccaagttcagttcctacaagtaggagagaactccttaagttgtcctctgacctccactcccctcacacacacaaaaaaatgccttttaaaaaaaatcagattaaattgaatataagcttgtattgtacagggtggtattaaaggagatggtcgttggtgtgtttattattaatttatgtattgattttaaaatgttaaactatttttgtggagcagttttttgggtttttttgtttgtttggctggttggttttttgggttttttttttgtttgtttgtttgtttgtttttcgagacagggtttctctgtatagccctggctgtcctggaactcactttgtagaccaggctggtcttgaacccagaaatccacctgcctctgcctcccaagtgctgggattaaaggcatgcgccaccaccgcctggcagtggagcagttttaattttatatcagcattaaagtgcagagaatttcatatatactgaacacctacacagatgcagcctttgcagtcattcagttggtacatttttaagctgttaagcattggctcatacataattaattcataatttgtatcagggtttatttttcatgttacacatactatggatattgacaaatatatgacatgtatccgccattgtaatatatagagtactttcattgccctaaaatatgtctgctctggtgtttctacttcctcacgaagccttgctaccactataactgtccgtggttctccagattttcataaatggagtcatgtcgtatctttctctttgcacagaattactctttgggcaggaataccacattgtatccactcatccactgaagggtgccttgattgtttgtgttttagccattaagaataaaactataactatatctgtgtttttctttctttgtgtgattaaactcaccatgggctctttgggattttgtttttttgttttgttaaactttgtttgctttttcattgtgtgtatacacaaccacagcgcatgtggatctgttttcccttttgaacatgtgagcagggaatcaaattcaggtcatcaggcttggtgacaagtgtctttacctctactgagtctctttggggtttttcggttttgtttttatactagttagtcaaaaatcacaaaatttgaggttctatagaaatgattaaatattgctttcagcttgaaatcagaaaacattaaaatctttggaacctttcagatggattttatagacaagtgaatcaaatcagtggagctcacaatactgcagacaagcaaaccccttcaaagcccaagaagaaacaaaattcaaaaggacttgctcctgctgtggtaaggttttagagaagtgtatgtgtaaataggcagttgttactgtatttgcttgcttttgaggcaagatctctgtgtgtacttaggttggcctggaatacatgatctttctaccttagcctaccaagtgttaggactatagactgttcatgagccaccattcatgacatgagtggctcttaacagtagggagaatcaaatctctctttaaggaatttgttaggcaaaaagatggatgtaactcttaatttctttggtattaactgtttatagtttacttagccctactgcaatggttctcaaactctggtgagaatagagaacatggtaaagattcagctttctgagcatatatgcatttgttataaaaggtgaaagggtagtttgtgttatttttttaatgaaaataggtaatataaagatggatggagttttagttactttcttctagatgttttagacaccttaccgtaaacatggtgatgaaattcatacacctttagtattaaatttttgggggtgcttgctagatctggtacgttgctcttctgtatttatgacttgtaaatttttttagagaaacatcaaagcactctcagtcatcaaatgcttaagcaaagactgttatacggggactacactggctggcaggcctgctgctagtcctacatgctacagataagcaccaagatgtcagagtcatatggacttgggagaaaagaagcaagtcactttgagtgatagaaatatattcagaagattaagggcaccctggtgttttgggggtcagtaatttgatgtagaataaacacagatgcagcttttaaaccagtagttctcaacctgtgggtcccaactcccttgagggtcacatcagatagcctgtatatcagatatttacaattcataacagcaaaattacagttataaagtaacaatgaaaactttaaagggtaaaggtttccacgacgtgtgaagaactgtattaaagggttacaacattagcaaggttgagaaccactgctttaaaacaatagttaaaaaaaaaaaaactgagtcattactagctactttaaacaagcatcttaactgcaaaattttttcagtcttcaagaatgtgggttcacattcttaagcaaacgaaagtgaataaattcacacttgcaaaaagttttatctcaagagaagagaataactgttccctttgatcttgtagaaagatgggaaccttcagaaataaaaagtagactacttcctaagattgtttaagccacacacccccagaacccatcctcgggtatgcatgatgccttgttttagtctctcctggcttcttgctccctatagaatatcggtctgatctctttcccaaccttttgaggatggccagcagctctgggggtgttccttcctcctttcctggatatagcccagtgagtcactcggtagctggtggcgttggggtggggaattgctatgcttgtggaaagtgagtagatgcaacttacatcattgaaggcatcatcgggcatgtgggaagtcaagttcagcttataagacccccagcccatcagcagccctgcctttttgcaatatatggatcaagcatgccagcaaataagactatcttaggccctgaccctgctgcagtttaccacccatgtgtgtggttgtgctgctgtagtcgtatgtgtagtagacagaagctcgaaacatgaccatagtacatcctctttctagaaaagaaagtggccattaaactcattaatgcagttttcctatatgtgaggtctgaataaatatttaggggacagtgtaactgctaaactactgtgactgaacagtgcattcttcaatccatactctgtgtgtggggaccagatgacattaaagtgtcaaatttcattgaattccaagagaacttctgaaggagaagcatttaggagataaagttcttttctgcacgtgtaactgagcatacagcagcattttctggtgaatgagacacaggggaaatcgatttcctacgctgtagggagctctgagcagacttggacaagtcatccttcagtgaccggtttattcctgttatgtgtggtgtgctcgtgttggtgtgcatgtgtgaaaatcagaggacaacctttagaagtcatttttctccaccatggtctcttgtgaccagactcaggctgccaagcttgcacagcaagtgcatttttatcttcctgactatcttgctcactaagttcatgttaacatacatgatagtcatgtttaggctgtttccttagtaacatctagaattactgggaaaagattaagggaccagcaacatggctcagtgagtaaaggagctttttctatcattcctgatgccctgaagttgatccctggaacccacacaatggaaggaaagaatttactccggcaagttgtcctctgaccgccacatgtgtgcccatgttacacacatggcatgcatggagagatcaaaaacaatttatgggagcccagttctctcctaccatgtggattatgaatattgaattcaattcttcaggcttggcaacaggtgtcatactcactgaaacatcgtacccaactaagggaatttttaagtgtggttttgttggtttggtttggtttgagacaggatctctaagtagcctagttgacctggaacttattatgtaaaccaggctgggcttgaacttacgagagatttacctgcctctcctcccacctgctaagtctaaaggaatgcaccaccatgccctgcctttgttttaataaattaaaaaaatatataacatatattcttttcccctttccctttactcttgccttctacccctccctggtctcaaaatcatggcttctctgtctttgttattgttgcatacacacatatgcatgcatgctaaatataaatataacatgttgtgcttatttattatttagtatctatgacttcagggctgagcccatggtatggaataactggagaataactgtctcctgctgtcagcattccttcattgcttagagttgtttgtctgtatgtgggaccctgggaggttccctcttctacgttggcttgtctgtaagtgtactgcttcgggtcttgtctaggcagccatattgttaggatattagggaagcttcttgacacttttaggagacagtctcacagcagcttcagaaaggctagttttaagtaccttgtcaaataccctggtgaagctatgatgcccaaaacagaatttccttttttctttcttgtgctattaggattcccagcagagtgttactgtggtcctctttcaggatgagaatacattagtctcagcaggagccgtggatgggtaaaagactatttcttctgctttttaccccactgcctttgtgagctatggtagtacctaatcccattgaagaagttaagtatgtgccttattttagacacagtgggtgatggagctgggaagaagtttacaggtcacactggaacataaaaattgagataatacatgtgcacattgcctctggcacatagcagtatcgctgctgcagggtgggtagcttgcttgggatataaacagtaaagttaaggcctgcgtacttctatgtgcatgttatctacaattgatctaaatactgatggccaaatgagtctgcagtgcttgttcatttgtcctttacagaatgctgtaaaaatagattgtttgtatgcagggatcctttacatgtacatctttgcctatttccaattataaatacaattctgtattcaagtttttaattttaaaaatgtcttcctaaaggtacttattttatggtaaatgtgtagttctagaaaacccacaaagtaaagagcaagacaattatcccaacaggaaaaatgaaaatggttttcctctttcacaggaaaatgtgtttagttaaggagttatgtatagaaataaagcatggggtgtacaccctgtgttttgggggatatatgcggtcttacaggttaggcagggttttttctagaagaacaatggagcaatgactgtcgacatgtgacctccagcttccttttcccgctgccctgggatgagtgtcagtgactcatcactgggtcatgtcacatctgtttccctttgtacgagctataagcttgacactggaaacaatttcatatgaaatagttaaattgattggattccagtgagttgttctccgtgtacctggcagtgtgccggaggacatagattaaaagtcacttcatacgcgtgtaagtaacattgttaggataggtgtagactggagtcaaaccacccctttcccagggtcacaataagaccatctgtgtgttagatgtttacattatgatttgtaacagtagcaagattacagctgtgaagtagccatagaaataattctatggttgggggtcactacaacacgcggaattgtattaaagggccatagcattaagaaggttgagaaccactggtctagatggtttatgaagtatttgtcttgatttttagaataatcaaagtatgggatttgcgcaagaattacactgcttatcgacaagaacccatagcatccaagtctttcctgtacccaggtaccagcactcgaaagctaggtaagcctttgtagaatttgggatgtaatgaatttcccttagaaatcaaaaagacttaaagtgttaatataaggctaatttcagcaaaaacttgagaaagagttaaggacatggatgtcaagataaaaatcttaataaagttttcatttctttatatttttgaaacagaattatggcatgaactgcttttggccccacactttaacctcactgacagtctattattaacttctctcaggatactcgagtttggttttagactctactggctctactttatttgctaactgcacagatgacaacatctatatgttcaatatgactggcttaaagacttctccgggtaagttgttattcaaattctcttttgttaatgatatgactattcaaatctctcttcaaaagacaaaatcagctgggaaatctagctcttgtacttgtctggtgatctaggttcaatccccagtacaaccataaaaatgaaaggaaagaagaatactttatggcctgcaaagatggcttagttggtaaagtgcttgccacacagacatgaggacctgagtttaatttagatcactagcacccacgtgtaatctttgctggggaagtcctgggagactcctggggcttatggccagagctagccttgtagaattggcgagcttcaggttcagtgaaagagacttatctaaggttggcaatggaaaagacacctggtatctttgacctccggcctccacatggtgtatatacggctcacaggacacacatacacgatgtaaactaaccctggtgcgttattaagtgtgtactcttttatgtatactttcctatacacatggtgtatatacggctcacaggacacacatacacgatgtaaactaaccctggtgcattattaagtgtgcactcttttatgtatactttcctatacacatggtgtatatacggctcacaggacacacatacacgatgtaaactaaccctggtgcattgttaagtgtgtactcttttatgtatactttcctatacacatggtgtatatacggctcacaggacacacatacacgatgtaaactaaccctggtgcattgttaagtgtgcactcttttatgtatactttcctatacacatggtgtatatacggctcacaggacacacatacacgatgtaaactaaccctggtgcattgttaagtgtgcactcttttatgtatactttcctatacacatggtgtatatacggctcacaggacacacatacacgatgtaaactaaccctggtgcattgttaagtgtgcactcttttatgtatactttcctatacacatggtgtatatacggctcacaggacacacatacacgatgtaaactaaccctggtgcattgttaagtgtgcactcttttatgtatactttcctatacacatggtgtatatacggctcacaggacacacatacacgatgtaaactaaccctggtgcattattaagtgtgtactcttttatgtatactttcctatagtgtagtaccaaagagtcttgagttttcgttttgcctttctgcaattttaaannnnnnnnnnnnnnnnnnnntatgttcaatatgactggcttaaagacttctccgggtaagttgttattcaaattctcttttgttaatgatatgactattcaaatctctcttcaaaagacaaaatcagctgggaaatctagctcttgtacttgtctggtgatctaggttcaatccccagtacaaccataaaaatgaaaggaaagaagaatactttatggcctgcaaagatggcttagttggtaaagtgcttgccacacagacatgaggacctgagtttaatttagatcactagcacccacgtgtaatctttgctggggaagtcctgggagactcctggggcttgtggccagagctagccttgtagaattggcgagcttcaggttcagtgaaagagacttatctaaggttggcaatggaaaagacacctggtatctttgacctccggcctccacatggtgtatatacggctcacaggacacacatacacgatgtaaactaaccctggtgcgttattaagtgtgtactcttttatgtatactctcctatacacatggtgtatatacggctcacaggacacacatacacgatgtaaactaaccctggtgcattattaagtgtgcactcttttatgtatactttcctatacacatggtgtatatacggctcacaggacacacatacacgatgtaaactaaccctggtgcattattaagtgtgcactcttttatgtatactttcctatacacatggtgtatatacggctcacaggacacagatacacgatgtaaactaaccctggtgcattattaagtgtgtactcttttatgtatactttcctatacacatggtgtatatacggctcacaggacacacatacacgatgtaaactaaccctggtgcattgttaagtgtgcactcttttatgtatactttcctatacacatggtgtatatacggctcacaggacacacatacacgatgtaaactaaccctggtgcattgttaagtgtgcactcttttatgtatactttcctatacacatggtgtatatacggctcacaggacacacatacacgatgtaaactaaccctggtgcattattaagtgtgtactcttttatgtatactttcctatagtgtagtaccaaagagtcttgagtttcgtttgcctttctgcaattttaaaatagttcttgtggataggtttgctttttagaatgctagctaggtgtgttgacacatgcttaatcctagcactcaggtaacagagataggtggatctctgagtttaaggacaaccaggactacatgataaagagaccttgtgtcatgtcaaaacaaatgagagagttaaatgtacgggtaaacgttgcctggtgatgacttgcctttccactttgactttggaaaggacaaggacttcatgcttgtgatttttgttttcaattcacagtattgtaatgtactaataattacatcccatgctcagtttagcatagaaaaattaagttgaagccacgcataataccacatgcttaaaatctcagtgtttgggagactgaggcaggagggtcaggagttcaaggccatcttaagcttcctcagaacaacagcaagtcaaagtgagttaattataatgaaagccgccattgggttttagactttttgccatatctgaaacatttgcaatgtgctttataccaccttttcctagaccagcagagagcaataaaaacagggttagtcacaggtgatggttgcccacacctttaatcccagcccttgataagcagaggcaggcaaatctgagagttcaaggccagtctggtctacagagtgcaggacagccaagactacacagagaaactctgtcttgaaaaacaaaacaaatatgattagtaggaaattcaatttatatttttctgttcagggctggtgagatggctcagtgggtaagagtacccgactgctcttccaaaggtccagtgttcaagtcccagcaaccacatggtggctcacaaccatccgtaacaagatctgacgccctctcctggagtgtctgaagacagctacagtgtacttacatataataaataaataaatctttaaaaaaataataataataataattttctgttcatagttcagtgcaaaagataaataacttcagctttgaagcagtgatcagaatgaaggaacttctattttgcaggtctttatcatagtgaggggttttgttgttgttgaatgttatatctgtgtgtacagttaaaggctattattgagccattgtgtaggtgctgggaattgaaccccgggcctctagaaaaactcagtgctcttaactctgagaaccaatttttggtcttgtttttatttaaaaggtataaatacaaagtatttttttctcccagtgtgtttttttaaatggtatggattatctagtaagaaacctaaccctgatgaagcagtttacagatgagcatatattatgcccctctgggtctgtctatcactcagcctgttaaagagttagatttaaaaaaaaaaaaaaacaaaacaggtgtatctctgagttccaggacatccagggctacacagagaaaaaaaaaatgccaataataataatagacaacttcggcatgtcagccaaaattcaaatgattcttttcacttatttttacctttttcatgcaacaaatatttgaggctttattctgtttaaattactacagtctagaaaaagtgagacgtaccctcaaagctcacagtggtaagatcagtggagaaagtcctataggataagataggattaggcatcctgcattctttttcatgaaattgtcatatgacatttggtcaattccatagcaagtttatgttatgttgagttacgtagattgggtctaatacaaaccttatttttttttttttaatatttatttatttaatgtaagtacactgtagctgtcttcagatactccagaagagggcatcagatttcattacggatggttgtgagccaccatgtggttgctgggatttgaactcgggacctttggaagagcagtcggcgctcttaaccactgagccatctcaccagcccacaaaccttatttttaatctatgttttattttgttctgtcttatttttaatctatgttttattttgttctgtcttggcacttggtaacataagttgagacagtaataacacttgtatgttttgtgtgtgcatttattggaatactggaaatgatagtagccaagtaatttggtttttctccctggcagtggctgtcttcaatggacaccagaactctaccttttatgtaaaatcaagtcttagtccagatgaccagtttttaatcagtggttcaagtgatgaagctgcctacatttggaaggtgagttgttatatccctacacaaatagaaagctgtggtctagtgtgaggttcatatagcacaagcacacactactgaccttttacatcaaatgtttacaaggtcacttgctgtgcacttccttttataaataatgaatgccatggaccaaaaagaaaagttgccaggggtggggcattctgtaggagttctgctagacaagttgtcaggagatggagaaactgaaaagtggtcagaacctccgatgctgttgcttcttagaaattacgtgcactgccccttctgttccatattgtcagactcttccttaggtatctgtcagtttcatgtaaacagttgctcacaactgttggtataactcttccttatttttttcttacagcaatatctagccttcaggctattaacaggtattttaatacaattaatagtattgcttaatatttccttattttatagattctccattactgtttagtaagtgaacatatgcttcttaaaatccatattttttacatacccatattctaaagcaactgccatagccaagaaacttaaatgatgttagtggaaagatattaaaaaagtaccatctcatggttctctgtcccgaaatcgctccacccagctcgccaaattcccacagccttttgaggtgtgcttcttgcaagcccacactttgccactgtacctttctctctggaacccagttgagttgccacatgaaggaaaacaccacacaaacttagttcagaatcaacaggtaactcagtctctgggtgcagcatctagactcctaatttgtgagccattctaagttaagtcctcaagtaggagatcccatcggataaacaggggcggcaaccccacctcccagcccagctacagtttggcctcatcatctccagcctacaggccaactttcctctcctgcttcccctcttccactctagaagtcccgcctactcctcacccagtgattggtcccctgaaatctttattcattaggggaaggttctgctacagaataaagtcctgggggaagtgcagaaggagttgcaagaatgacattgtccccacggacatcttctagtgacagtctcccagtagtcacaagatagagatgccaatctgcccaaagcagttgtgttagttgtgttccttaacgtgaatctttgctattggagttgtaatgaattttttcttatgagtgtatatctgagactcccatcttacagaaggccttttacctgctttctttactcttcctgaagttctatactgtctacttatttgctaatacaaatgcttctcttacatttaaatttttgagtttcaaagttttgctctttgtattttgtttcttccctcactgtcttactgcatttatttttctaaactcccaacttagttacagaatttcattcattctacacatctgtcatttgaggtttctttcttgaaagaaaaccacaaactgaaaatttagatgtatcatataacataataaaatggccaattccatacataaacactagattaaaatattcaagcaaaaatacgtatatgccaaccattgttttaagccatttaggtgagttatttaattataattatatatgtaaacatatacataaacattttcttgctgattctttaaatttctctagcataggatccttttttaaatggatttggttggtgagaattgaggtggtgcacactaagtatttgttggggttcccagcccatctatgctaaagcccttgcataatgaaagaacaaaagaaaagagtttatatcttcaggcaaaagagaatggcctaaatggaaatggactaaatctgtggactctgacactaaggcccaacattctagtaagacaaacattgaacactccactttttaatttcctactccttgttccactctcttccccccacctgtttctgatacagccactgaatagtattgaagtggctataaataaatgcatttggcatggctggtctcccgctgactggcgggacactgagctgacactttaggacgtgtcaatgatctcatggcaaaataaagatcagacttgctttccaattggccgtagtaaggagatttttttttgaggaaaagtgctgatggatttttttccctgtatgcttaagttctcaaagtactgtctgaggtctaaaggtgagagtcattttctttaagaggtccctcagaattttagctctgtgatttcttgtgtctttaacattctataggaaatagagtgtgtataagaggaccgtttctgtgttgaccaccccatggtatttagatggttttctgttttgttttgctttgttttgttctaactttaaattagtttccttcctactcaaaagggaagacatgaaatcaaataattatagtagtggtttttataataaatttatgttaaacttaattggaaaaatcaattcaaagccatttgagattcatgagaaaaattaatcctgtttaaagtactcttaagaaagatagacctgagctgtcaaagcccttgtcaccaaagttcacaaaaaccttatcagcatttggcttctgtttctttccctttttactaaaacggaatttaggagtttggtaaaaatctacttacagttcagagtatagtaagatgtaagagtacttgcctagcatatgcaaagccttgtatttgattccccagcatcaccaaataattcttttgtattattgtatataattcagtttggtcactatattttttctttccatggatgtttgcctatttgaaatattttatataaataatatcacctaaaatatggcgttttgtgtctgactttcatttactatgttctccgggtttgggcaagtttcacattacttcagtacttctaaggtaaagaatgttctattttatagtctaaacatattttttatctgcttaccacttgttttactctattattaaaattctgctgtcaccatttgtatgtttttgctggagtgtatttttgttgctcccagtacatttaagaataggtcatgtgaggccaggcagtggtggtgcatgcctgtaatcccagcacttgggaggcagaggcaggtggatttctgagttcaaggccaggactgcacagagaaaccaaaaaaaaaaaaaaaaaaggataggtcatgtgatacttaattacacatttttttttaaagtgccttctgcctatttcttgatcctatataaagtacctggtttatgaattcagtgaataaatgctaactttactgctattaatgctggttctttgctctatgagtttttataggggtctttttttccttaagcctgggtactttctgttggcaggcacttggtttttcttaaacgtttactattttgtgtctacagttaggttctcctaggtaaaccctaacttagacactaaggactgagcagggtcctagaatgatatgaagaagtgttttaccagagatgcttgcacaggtgtgaagatttcccctgcttttctttgagtcttgggtaaagagaaacctaatggactagaatcatcacaaatagagaggagaattcctggctgaaaccatcctttaatgtcctttataaggagtatttttttctgtgaaagaatgacttatagtctatagcattgtaggaatgatctatgtatctgttaatacatttaacttttaatttaacaaggcaaattagagtatattctttgtgtggttttaatcattgtgcatttgcctcatagcagagacaagagtggtaatgattgcgttggataaccttatagaccagtatctgttatcttagctgtaatctgaagactctgttaagctgacttagtcattgtcacaagtattctttccaaagttgcctccttcatgcaaatgacccatgattcagagcctcaggaaaatagagaatgtgttcaccgtgcaccttgcttttcaaatacatctactaataacagagtaagcttgtactctattatgctggggttcctgtgtgctttaaaatatattgataactttggaaagaattgactgtacaatgctatcaagtacctatcactgaaagtatccaataataagaaaaagtttgaatgaaaaaatataaattgtagctcatgtcccttccttcagattggacgttcatccaaatgaaaggatgatgcttggggttttggtcatagtcgttgtgtcttgctttaagcagaaaaattaaacctttcttcttatcctaaaagggctagttgcccattacaggttccttcaggattcagctgattcccatagtcctggaggtggctgactatagaaggtctggatgtggctactgtgtaaaagcaggactgggttgaagagcagtacctggaactgaacttcagtgctcagtggctgagggacagtgccaaaactgcattttaatttaaataagagccagctgctgtttgaacctctgactgttgagctttactaacaactctaaagcctaagatggagtcagggaggctctggcctctatgcaggagcaagcaccattctgactgctctctttggtttgcctaggtttccatgccatggcatcctcctactgtgctcctgggtcattctcaagaggtcacgtctgtgtgctggtgtccatcagacttcaccaaggtttgtggatgagtcttcataactgattttaaaaagtggatcccagatttgcatgttttcccacagtttattccaaatgatacagactctgatgtttagacatgtttagacacggtttctcctggcctttcttaccaataggaaaatcactatgtgctgggtttctaatccactgagctcttcttttcttaaataggagttgaaattttgaactgaagataaatcttaaaatctgaagtgaaggtctagagaggtggctcggtggttaagagcaaacactgttctttaagaggtcaacctgagtttggttcttagcatcgacatcaacatcaggagcctcatggccagctgcccataactccagctccagggggatccagcacatctggcctccatgttgtgtacctgctatcaaaagctttgagacacatgcaattaaaaatatatagattttttaaaatatttaaaccaaatctaagatgaaaaagtagtaagtggctggaagatggctccatgggtaaaaacacttgctatgtaatcataatgacctgagttcaaatctccatcaattttaaaagctgggtagttgctttaaaggatttttaaataagataaaagaatgtaaagaagcagacgtgtagtaggtgtccgtaaatataattattgtcactatagagcaattgtggagttccaaacatttttttggcctcccagtaagggaaggaaaatgttgccagtctcttgggggccacaagttaaaagaacgtgtgttctttttttcctttctgtttagtgactgaaatagagaaattgtataaacaaatgccggggaacagctctggcattagtggccatttgcctctagctcttcaagctgggctttctctgccataaaaggcttgggaccaagatcaggaatggtcggatatttttaaaggggcaaaggttatttttaacttctttgagactagtgaacttttgtttttccagattgctcctttacctatctgaaagagcatctctgagtcttcgaagagcagctcttttgcacttgttgtggactgctggaggcacagactatgtctcatctgagaaatgttctcgttgctttagccataagattaagcatgcagaatttagaagaaacttatagaattgatatgtgttgattgatcatttcataaaaggaaaccatagttacataacattaaataaaaagttagagatgtgagttgcccatcttctttggagaccaaaaagaaatgagcctgtaagtgtaaatggctgaggagagaatggtatgctggagagagcgtcctctgctgttgttgcagaggacccagacttagttcccagcacccacatgacgactctaacttcatttccattgagtctgatgcacttttctgttctccgttgctatacgtgtccatgcaagaaaccaacgtttgtatcattggaaatctaggatgattctgaagcacgagggatagagaagtagatgatatttagatgtcatctgttttatgttacagcagagaaaatcagtcgctactcatgagccctcatctaccatctttttttgtttgttatgaaactttatttgaaacttcattcacattctcctcctggttcttagattgcaacctgctctgatgataatacactgaaaatctggcgcttgaatagaggcctagaggagaaaccaggtgataaacattccatagtgggttggacctctcagaagaaaaaagaagtgaaagcctgcccaggtaaggatagcatgcattctccaaggttttttggtggtggtggtggtggtggtggtggtggtggtggtggtggtttctttcttttgttagttgagtcctactgtgtactatgggagcctaggtttgttcttgttttgtaatatttttaaagaaaagcatcattttggctttttttttcccttcaagatttatttattttatgtatgtgagaacactgttgctgtcttcagatacaccagatcccattacacatggttttgagtcaacatgtggttactgggaattgaactcaggacctctgagaaagcagtcagtgtttttagccgctgagccatctctctagcccttggcatttcttagaagagaattatccagatcacaactctgtttatctatgaaaaaaagcacagtaatggatttagccaacaaatatttatggactgtcatgtactaggtactcttagttttgattggcaatgaccagaagactcaagactcagatataaacacatgaaataacaggagctgcttagtagcataagtgagagaaaagaatggaaattgctgtcaaatgtttctatgatagaggggcctcattgacttaagtaagtgaagtacttggtgagccgtgtggctatttggaagactattccagatacagcatggcaagggtaaggtgctgcagcaggggagcactggcatgtctcctctgcctcagtgtccttagcactaaagcagtgagggacagcaggaaagcagtagtagcagaaaacggagtttgtgtataacggaaaccttcaaagcctgtgtggtagcacatcccttttaatcccagtactcaggaagagtgagtttgaggctagcctaacctctctagcacatcagccattgcacactataagccaacttctataacagattgtctgctattaactacactgccccccttttttttttttggtgttttcaagacagggtttctctgtgtatccctggctgtcctagaactcactctgtagaccaggctgccctcgaactcagagatctgcctgcctctgcctcccaagtgctgggattaaaggcgtgcgccaccactacctggctgttttctggctttcttaacactaactgcaaggtataacccttttaattttaccaaagttttgctaacctttagtgttcacaaactcttctctttgacaccccatatcataacatcgtaaagaagaaattacctaatttcttaaccatctttcagtccctcctctgctctccagtatcatgtttctgttaacctttagtagacacttgcagcatgtggcttttgagtatcaaaaacttgatagctattctttatcccatttattctttacccaaaagccttattggaacttggtatgttgctagacatgtagtatttcaggacttctgtgcaaatacacatatgggttgtttaaatggaggacgtgattatcgacctgaactgagcagtacatccaatgaccccttcttgattcctgccatagttactgtaatcaaagccagagcagatgtgtgatgcccgtggctaacgtccttttcatagcagcttaggacagtgacgctgccagctgtgactttactggaagaacaaactcactttagacaagtctaagcacttgcttaaggataaaaattgaaagaaaagtatttatcaaactattgtcttgagctgtcaagatgccttagtggcaccaatcaagcccaacaagctgaatttatgcacacagtaaagaggccagttcccacaaaatactctggcgtgtcgaagaactgtgattcaagacaagactgataaaatagtgaggacagaataatacactaagattggctctgtaaaacttaatttttgctgagagagatctattacatgtctttttttaaaatagggttttttgggggggttgttttttgttttggggggggggttaatgagtattttgcctgcgtgtatatatgaagaggccagaagaggggagttggagcctctgggactgaagttaacagatgtggatacttgaagctgaatctaggtaccctagaaaaacagccagtactcctaactccctaccccagccatcttttctgctcagattacattttctatcagtccattaaatttactttttatgtaaatgaaatttaataattatcaaaaagactgagaatgaatcagtaatttttttttcttgttatttaatttggaaagctcaaaaaatagtgaaaaattcagtattggctgttaagaatttatgagggtagaagcataagctttgtaagaattcccaggaaatatttgtcgtgtgtggggtaaggacacagacttgtccacaagcttgatttgctttccaaagagcaggcacttaattctgaatgttctttggcattcttcgacgccatttgtaaactaagcaggaaggctgataaacctcagggggatcacttctgtaaggataagatgtttcacttcacaggtgtgacaagataagctgtgtgaatggttgagcccaagtcaagtactgagtgactgtgccaagatttggctctgtgcatttgtgttggggagcctgaggccttcaaaggtttacaagaacagcagtgtcacttcatttaggactaagctaccactaataacctgcattcctgttaaagtgcgctatgatgcatgttaaaggttatagtgcatctgttccttagtgtactcccagaattgtcagtggaaccagcattcccgtgagacgtgttggtgataaagtaaaagatagaatcacatgttaaaaatgttgtaggctagaaaatcttaaatgagcaaaatgatattagtaaacatttgtcagaaggcataaattcaaaccacaatgacacaagtcacctcagctgtcacaaggcttggtgttgaactccctgtggtcccagaaggttaaggaaatatgtaatttaaggtcagtctgggaacatggtaaaaccctgtcccaaaacaaattaacaaaaaggataataggtgtgggtgaggatgtatacgatcagtgctcctataaattatttctactgtttgggaaaatgggacagcaatttcttttttttaaaaattaaaaatagagctcccatatgatccagcaatcccacttttgggtacatatccagaggaatcctcagtgtgtggaagagacccctgcactcacgtagtcactgcaggttatacataccatccacggagcagaatcagcataactgtgatcacaagagaataaagacagttgtgtataagtggtagtgaggaagtttagattggagggagggatccgattttctttgaaacaggattttactgtgtagccctaactggcctttaactcatgacccttctgcctcagcctgtaagttctgagagtctaggtatattccatcatgcctggattgctcggctactaagagagccaggcacagaaaggaaataatactgcatatttcttctgtgtagaacccaagcactaaatttaaagactggagttaggaagaagccattgttgtcatctattcctcctcttcctcctccataaagatatgagaaacttgtcttgttttttttgttttgttttgttttgaagcagggtttctctgtgtggccctggctgtcctagaactcagaaatccatctgtctctgcctcccaagtgctgggattaaaggcgtgcgccaccattgcccggcaaaagttttttacttattaattatatgttgctgtcttcagacaccccagaagagagactcagatctcattacagatggttgtgagccaccatgtggttgctgggatttgaactcaggacctttggaagagcagtctgtgctcttacccgctgagccatctcaccagcccccttgttttgtttttaagaattattttattgtatgtatgtgagtatgtcccctgagtgaagttgcctgtgcagacaagaagtatcagattccctagtgtaggagttacaatctgtagtaagctgcaagatatgggtcctttttttttttttttttttttttttcttttttaaagaactgattgtgtggtggtgcacaccttttaattccagcacttgggaggcagagggaagtgggcatcttgactttgaacaagatagccagaaccacatctaaaatcctgtccttaaattaaaaaatccagaatagaatggtgattaccaggtgcttataagatcaaagatcaagctgggcagtggtggcgcatgcctttaatcccagcacttgggaggcagaggcaggaggatttctgagttcaaggccagcctggtctacaaagtgagttccaggacagccagggctacacagagaaaccctgtctcaaaaaaaggagggcagatcaacaagtaggagatattatttgaaggttataaagttttgtgtgcatacaagcaagaacatggaaaatttttaaatattaatcatattatgaggtgatagattatatcatagatctatttaatcattttacaatatgtgcatatgttacaataacacgtttatccccaaattcataggataaaaagtagaactgttatggtgaaacaccatgtgccttttgatctcgttttttgtagcaagtttgtggtgtgcgttgtgtcatctgcacgtggagactgttgggggtggtgcttgtgctttagaagttttatctctcctaggctttgccaagtatatgttttacatcaggggcttaggaaactggcagttagacacaggagaggaaaattgctaggggggtatggtagaaatggaatgattttagctatttactgacaaaccaacccttagatgatgatgttagatatgccccttgatgaaaaaaatcaaggactttattacatcattttctttctgattttcatgctcttcttcattttcagtaacggtaccaagtagccagagtactcctgccaaagctcccagagccaagagcagtccatccatctcctctccttcgtcagcagcttgtactccgagctgtgcaggagacctccctcttccttcaagtacccccacattctcagtcaaaaccactcctgccacgacccgttcttcagtcagcagaagaggctccatctcttctgtgtctcccaagccactctcatctttcaagatgtcgcttagaaactgggtgacccgaacaccttcctcatcaccacctgtcactccacctgcttctgagacaaagatctcatctccaagaaaagctcttattcctgtgagccagaagtcatcacaggcagatgcttgctctgaatctagaaatagagtgaagaggcgtcttgactcaagctgtctggagagtgtgaaacaaaagtgtgtgaagagttgcaactgtgtcactgagcttgacggccaagcggagagtcttcgtttggatctgtgctgcctttccggcacccaggaagtccttagccaagactccgagggtcctaccaaatcaagcaagactgaaggtgctggcacaagcatctcagaacctccttctcctgtcagtccttatgcttctgaaggctgtggaccactgcctcttcctttgagaccttgtggagaaggatctgagatggtgggcaaagagaatagctctccagagaataagaactggttgttggccatagcagccaaacgcaaggcagaaaattcatccccaagaagtccatcatctcagacacccagttccaggagacaaagtgggaagacgtcaccaggcccggtaagcttaaatgtgggaggacacatgtcctatttgaaggggactaggtgcagttctcaagattgtctgggaatcaggttaataacttcgccctgttactccattaatccttttgtctgctcacattcttcagtcttactgcttgactcactaaagccttcctctcaccatccagagtgtcgattcaaaaatatctctcctggtagacagtatgggtttttttttttttttttttttttaggtaaactttattcttgggaaacttgccaacatccttaagtagacttttttagcttgtaattgcattttatgatcaaaatgaaacttagatatttcaaagcaattaaattacagaatccttgattttttttttaatttatttttatttgttggcttttcctcaagtttctgattgtcttgcatatagcaatattctgaacacttatttctaaggttcacttttcagtgactgacaggacatttaattatggtaagagaaataagtgagctttgtaaagcctaagagtggtaaagatagaagtagctgagcattaggtaagccatgcacaccagcagagcaatgcagagctgctgttactcggtgtgaagttatggggaggggcattcagttcctggggctcgcaaggttcttgttctaagtttaaaagggagatggaaaggactccaatccaattaggggcagaagctatctttagactagtactaatgtggtgagtatcctgcctcacttaacatccttaacctagcctgtgcttcagggaaaggaaacaaaagatagatatataaaggctatttactctgcaagccaaaccaaaattttggtacagaaaatgacaaagtttctttttctcaatagtaggaatgttctgtgttcctagccaaaaatttgtcatcagtgtccctgtggctcccatctgtctttcctgacccccatgattacttttcactgacaatataaatcttaaaaagctttgagaccagtgtgctgatctagttttttaagttttgggttttgttgttgtgttttggttttggtgtttttacgttttattgacttacaagctttcactatgtatcccagactggctttgaactcaggaccttcctgccttagtctcccaggtgctgagattgtggggctgtgtcactatattacaactaatatttatcagaaaaatgttccttttttggaagaaaatgaagaaagtgctgtttttgcacttatcaattgaggggctgattttgattcgctcaagaaaatagcagttttaacctagacatttgctgtggggacttggaactttaacttggggtgtcgctaactctacgctttcttctaggtcaccattactcccagctccatgaggaagatatgtacatactttcgtagaaagactcaagatgacttctgcagtcctgaacactcaactgaattatagatgctaatctgaagttcattgaacttgggtctacaaagattttttaaaaaggctttaaaattctggtctttaagaaaatggtcatcttttcattttggaaaaagtccttctactctttagcagacctagtcaggccccactgtgtataggcacagctgcctaggtgagtgctgtctccagttcccggggcggcttgtcctctgtagtctactctagcagtctgtggtaatcacgtccagctcgtggatgcaggaatcaaggagtgcttttgtggacagtggagagtgctagtccagcacagggcccatccgtgaaggccagtctgaagacatcctctgcagaagatgccttaagcaagcgtgagcttatttgaaatatatcatttgttcactatatttgtgtgtgtgtgtgtgtgtgtgtgtgtgtgtgtgtgtgtgtgtgtgtttctcaaactggataaaaatgtgatattcacttcgtacattcatattgtcttcatgtacggtatcaatgtcaactctttggagaatgtaggagaaaacatcagaaagctgagtttttgaaagctgtggaggtcttttctttttttttaaaccagatttctattacaaaccagcatcactcatgagggagcaaggcactttcttgagagagatgttttataaaatcagtatacagtgagaccagggcagttctctagggtctgtgactttttttaaaatgtcattagatttttaagataaagtaatttcttacttataaaagttgatattgctttaaaaagaaatctagaacctggaaaataagctttttttttttttaaacaaaaggcaccagctgtctagtatattggtaagcaaaacataaagagcactttatctcgacagttagtgcagaggttgtgtctgttgactctaaattgtatttgaaatgctgtaacttttctttcccttaaatgctacatgttggtcctcatgaaatgagcatcatatctccctttgcagactcttagaaagaaactttatgttggagaaaggcgttcccttatagttagaaaagagtttgtctcattcaaatctctgggggctagctaaactttatttcaattctcgtgatttttaaatattttattaaaaacgtttaagtcctttgagattgtaagttaagcttataaaacaaaccaaactgagaaagttaaataagtgttgggtttctgtagtcattacagtcaaaccacacacacatgcagcagctttcgctgagcgctggggagtcttcagtgatgttagctttttgagtagtgggcagtaggaaggaatttttaatgatgtagaactgccaataatgttaaatatctgctgctttgaaagccagtggtggtggtcagtaaagcagatgatttgtgtctctgtgtctggccacactgccaagtgaagctggggtaagtggctgtcagaaacttcaggctctgcttggaaaacttggtaccacaaatgggtgtcaaaggtcatgtgtaacaaagtagtaattatccctgccgtgtgaccttgagctgaccctgaataatcagccttttaccttgtctgatattgtcctttcctatgatttttttttacagtgacctgaaagcaatctacataaaaggaagtaatcttagagtcccttttgcttgcttgtagagtaaaatgtgttatttccaaaggtataatctagttcaaactgaaagaggttctaataaacgtcttacttcatcaaacctcaaatgtttaagatggcttgggttacttgctgtgctgctttaaataagaatgacccgtagtctcatatttgaatgattgaccactaggaagtggaaatgtttgaaaggataataaaaaaataagtgtggcctttgtggaagagtgtgttactgggggtgagctttcaggattcaaaagcccatgccaggcccagtctccctttctaccccccagccccctaccccttggcctgtggatgtagctctcagctactgttccagctccaggtattgtcaaagcctagctttgacatccaggtaaactgaggtggaacaagaaaatggatggaccaaaagctgttagctcctggtaattcgggccctgttactcttttttggaggcagagctggtggcttctggcaattcctgctgatagcatcaggggattagaagaaaaaaaaaacttaagctcttaattaactcttaggaagccagcaaaaaacaaaagaaaagaggggaaatcctgaatacacacactaagcgggtctgaccaccagttcagtttcacaagtgtgtacactctctctctctctctctctctctgtgtatatacacacacacacacacacattcatttggtaaatggagcacggccacagcagtcacttttatttttttcttggcctttacgttacttctcagacaaaagttatctatgtaaaaaaaaaaaaatacctcatagacaaaatgttatacaagggagttacagcaggatattgttcaaagcagtgtttcattctataagttcaaagcagtagtttacatggctttgctttatcatagtgtgcacccatggcctcatccttggacctgacctagaataaatgaatatttttccttggtcattaatttgttccaagacttttttttttttttggtattgcagtggatgtgcttttagtgtatgagagctcattgtactgtatatctttctggcaaaccaactaaaaccatctcctaagactgtcaattacttgaaccaaatcaagaattctataaaatcattaactcatctaaacaaacaattcaagaaagtatatcttcatattgattctgcacagaatctcctctgtagtgtgggctagtgcccaggaatcaaccaaaacagactatacgtggaaagggtcgttgacagtcacaacctgtcggaaaagtgaggaatacagtgatgacaaacacaagaaggcacggcagcagcaagtagcactttagaatggaacatgtggggctgtacctgtccaggaatcacccatcaaagccatgcaaaactgcaggccctctccaggaaagttgcttgccttcccagcatggcatctgccagtgtatgttgcagtgtttccttccatgatagttgactaaacctctgaaacgaagcaagcctcccacctcccagtaaaatgctttcttttattaaaaaaaaaaaaaaaagacttgatcattgtttctcttcatggcaatagaacagtgtctataactcttggtaaaaagtgccagtactttgatcccaaacttctttttggatacatttcaagcagtgtggctatgcaaatataagtttcttttggttatttcaaagcctttgttgagttgaataattctcttaaaatgtctttcaatgttggctgcacataaaactttgtagctgcctttgtgttaaggggtcagccaacaacctcttccctttgccttattaaaactgcactaaagtgggcggtggtggcacacatctttaatcccagcattcaggaggcaggggtcgtcagaactttgagttggaggctggtctgatctacaaagtaagttctaggacagccaggctgcacagagaaatcctaccttaaaaacaaaacaacaagccaggcgtggtggcgcatgcctttaatcccagcactcgggaggcagaggcaggtggatttctgagttggagaccagcctggtctacaaagtgagttccagtacagccagggctacacagagaaaccctgtctcgaaaaacaaaaaaaaaaaaaaacaacaacaaaacctgcactaatactatggattcgaagtactttgtgtgtgtgtgtgagagagagagagatggaacctatgagagggtcccacaaactgtcctcccaccatcatatgctctcctttgataagcatattcctttcccacgcaatttttttttaacaaaaatttcagcctatggccatgttcttttagagatcacatgtctagtcaatgtgcctgttgaaagcctatcataacacactgatgctcttagggctgtttttgtgcttttcctagtcccaagagagacttcctttaatactgctttcaaaggaaaagccagtagtctcacagatgcactcacaaccaagcaatgagaacaatatctcacagcggatgtggggagggagcctgggatagtgtcctaggacgctagagttaaactcctggcaggcctcagaagagctcagtgcagccctctcacttgaggctcacagggctccatgggaacccatgccacatttcagactaaccagttagcttgttaagtcttgaaataatggaaaattcttcatttgctggccctctagatattagtttaaagttacaagcaagctgaacacattttgttaaacttgaagtaaattgaatgctttattaggactttagaatagccattttgttgtctaaaaattgtttttatgtgggcctatatttgaacacaaactagagtggaatgttatggataaattctgccttaaaaaaaaaaaattagccgggtgtggtggcgcacgcctttaatcccagcatttgggagacagaggcaggtgaatttctgagttcgaggccagcctggtctacagagtgagttccaggacagccagggctacccagagaaaccctgtctcaaaaaaaaaaaaaaaaaaaaaacaacaacaacaacaaaaattacctggctgggcatggtggtgcacgcctttaatcccagcacttgggaggcagagccagacgggtttctgagtttgaggccagcctggactgcaaagtgagttccaggacagccaagtctacacagagaaactgtctcgaaaaaccataaaataaagaaaaattttttttaaattacctggctgtgaagaggtctctgttaagtggattaagtgcttcaagcatgaggaccagagttcagaacccacaaaattgctggaggtagcagccctattatattccaggtctcggaagaggaagtgctaggttcaaaggagagaccctgtctcagagtatggtagagaatgatggaggaagagtcctgatctcagcgtgcttctatacacacatgtgcatactcacatgaaaaaaatgtatacgtgtatggagtgtacttacagcaagcatcgacacagccgaggagtgctgtattcctgaggaggtttgtacggtttcaaggctcattgcccttctccactgtgccaggaaaggagttccagggtgcagggctgttcctcttgagctccatttctctctgctttcttccatttgacacacgtccttttctgtcctgacactctaaatttgtatttaagccattctgtagactcaggaatagcagtggcatactgcaaactgcccttgattggcagacattccaatttcacctgcccctagtagtcactacctgggtgcaagtcctgtgtgaggcactgggttgtcagttactaccaaagttacattattggtgatgctccatgacccgaaggcagcacttgagagaaagatcagattgccaagccctttgagtgaacctgtttgtgtcgaggaccagtcgcttccctataaaagtttagaattcagttcccctcctgtttacaatgcctgtagttcttggatcagaaatctcccctggtagaccttgatggtcaaggctaagatgctagcctgtggtactattgaggtgatggaaccgttagagggcaagcctggtgggaagaagttaggtggacagggaacacggccttgaaggggacattccgaccccaggtctttcctgtcttctgtttcctggctaccactggcccaaaagtgggccaggtgaccatgactgaaacctgaaactgagtcaaaccttttttagcttgtgaagtgttgacttacccaaagtattttgtcacaacagaaagctaacaaatgcttatattctacgtgtttttatgttttatattaaaatgatcacttcctagctttgattctaaaccctgttggctcttgggcaattccctgtctgtaaaagttggtttatctggttcttaaacatggtgtttttaagatgttgcctggtgcacaatagcaaatacagttactgttatccattattcttattaggcaagaagggcaggagttgttgttgcccacatttgatagacataatgctttagcagtaatcctcttatgtttctatgaggttgccatctacagcaggtggtcactaaattatctgctgcccatagttgggaaaggctgtaaactacatatttatatcaagacatctacaagccccaggctgctcacacagcacactctgtccctttcctgactcagcctccagctctgctcccctattgaaaccaccttttcaaggaaataagagcagccctgcagagctggttcagttctgttctctagttctgttgagagcttgagcagagtaaagggtagaggcaccccttgccacgggagcacctactttaccccatacagaagctgacgagctagctgcactcagtggttaggctgttgctcccatggtgacatctttccccaggttatttctggtgccagtcagatttattaccattcacatgggtgccaaaatactatccatgacaaatgtagcactgtggttccagcaagcccatgcctccaggatacttcaggtgcctgttaccaatttacaggaccatacagaatgtggcatcctcttgtctattgtccagcagtcttgctacctggccccttccccgctttgaaccaagacatggattcggatataaatgtcatagactgagccttttcccactcctatcaacagtgttccttacttttaaagtctaaaggtaaattctacagagcagaccttttcctctagcagtgcatcccaggtaatccttgatgaaacagactcaagcctttggccttgctgttgacatggagctggcaaacataacatgtcacagagggtcattcggcacctcccacctcctccaaaatgcacatacataattttccaaggatgatttgaagttctcatgctcccttgccctcatgttgcttgggattgaagggtccagggccttgcacatgccaccacactacacctccaacccttctaagaattactgaaaagcagcattttaggatttaattaaataggtctataaaataacttactagtagttcagacactactcctgtgggccctggtgtgtctgatatgtgcttttggaactggtgcatcccccaaagccttctatttagagttccactctcactcccttgggcagcaggagctcccctttctgcaccagcatggggccagctgccagtttaggaaggtcactcatggatgtagtttggtggccctgattgtcctccttggataaaaagctaggagctgaatgaaatgggtatctatatcacgctcttgagtttcacagaagccaagggccagagcaaagtgacacttgcttcctggacagtgttggtcctggagtatcaagtgggatggaattgtcaaatgaggctttgtcctcacttggccttaaccgtgaccttgctccgtgtcccagcccctgctactcctaggtattcctaagcaataggcagagtatgacacaagaaatatccctgtgtaaaaacctcccatgggctagaaaggaccacttctaacaagccttcaggggtgggtggcatgtgtgaactgggacacatgggaaatgtacttaatgacaaagctcagtggctttccctgggtcccaaggcaggggattgattgggaagtgagttaaagggaaaaactgcttagtggagacagaaaagccccctttccccactgttccctgtctctgcctccccagaagaacccaacttgtttactctcatttacccagacctttgagcagagaagagaagcttcagtcactcctggtgacttaacacttcccctcctgagatgaagcaaattacctgcttcctgcctgcacccaggcaaccaggctccttgagaaagcctcacctctagccagaggggacccttcgtggcagaaatgttcatatccctgctccatgtacctgctgtctacagcagactccaccctccactctgtaagatctctgatccttccacccccctcactatccacagagagtcagcctttgtgagttttccctgtgtttccaaaagcttaaacccacccacttgatcctggcttcctgctgcagtggaaacagtcaagttgagaccaattccattttcaaaccatcccctcccatcttgtacaagcccacctctgcagagtcccttttgctcccccgccccctttattggattcacctagtggttctttaaagacactaccttcacacacacacaagttgtgaacatacattttttccatgtgtgtgcctttcttgatctctgctcactctgactactcaaaatagttccccagctacctggctatgctctcccaccgactcagtcctcagcatcctggcatctggcaggtgctctcctgagactggtcttgtaatggtcatctggattctgaggtcagtcatccaatagtcctcagtcgtcagcgttgacactactgaatggctgaatggccattcctttcttagtgataagatcttcagtgttttctgtgactttcgatcctgtcccgctggccacccttgcccaggcttatccttccccttgtcattcttggagctcaccagaagaagcccccaagtctgtccatacttgtagctccctaagtacttaaccgaccatcaaaatgttcatgtatttatcaaatagatatcccaaagcctccctcaatctacagaattattttagtgagtacccattataaatataccataacctactagtcaaccctgaccactgatatgtaggtagtttttaatattttaacttcatgaggaatatttgtgtaacagttcttgcatgtaactgaacaatgctaataagactagtgaggtagttcagagggtaagggtgcttaccatcaactgtgaaaatctgacttcaagccccagggttcatatggtgaggaaagaagctactgcacacacacacacacacacacacacaacacaaacacacacaaaatatgtaagcgagattttgcttttgtttttagaaagattgtctctgtaacagccctggctatcctaaaactcactttgtagaccaggctggcctggaactcagagatctgcctgcccatgcctcccaagtgctggaattaaagacaagcgccaccatgcctggctcatgcatgtaatttttaaatatgctaatattagtagttacggtcaaatcactaatttccatagggaaactagggatgtctggaatgtacacttgatcttttgaaaaataatgtgggggcaaccagagtaacattgccaagggtagtatcagaatcaaagagcatgactcatttggcccagggcaataggtctggtctttcctcttctcagtcccctgcatgagcaacaccgtggactgccaaggggttctggccaaggtacagctcactccagaagttataggccatttgtcttattcccgtcctgtgttttggcagaagagcccatctgctggagccaggtgaaacttaagtgattccagaagattctgtggctgtttgctggttaaagaaatttctgagtcggcctagatccagatggccatgggaagtgacaggccagcagagatcagtgccagtgcaggctgattgcacagatagaatggttggatgggggatgacacaatttgagatttcttcagcatctcttttctgcttagccttacttccctagtaatcttaaataggcttgggctccatgcaccatctatgcccagacaactcttgaattttgtgtttgtaatctgacttctaaactgaactcctggcttatgtatccaacagcaatgttagcatgtccatctgggcattcagcaggcctctccaatttaacatgcttaaaattaaacctttataatgctgatccacaaaaaaacctaaaaattaaaaataaataaaagccaggtgtggtggtggtgcatgcctttaatcccagcactggaaggcagaggcaggcagatctctgtaagttcaagaccagcctggtctacaaagtgagttgtaggacactcaaggctattacacacacacacacacacacacaaacctccatcttaaaaaaaacttaattaattagttgggcgtggtggtgcatgcctttaatcccagcctggtctacaaagtgagttccaggacagcctgtctcgaaacc

SEQ ID NO: 670 - DNA, 2426 bp, Mus musculus
cgggagttggaggcgaaaccgcgccgcgttgtggagggtgcagacggcggctcctgtggaacttgggggcgatcttctcggcgttcccctcagctgagccttctcctcaggcccagatgctcttcaactcggtgctccgccagccgcagctcggcgtcctgaggaacggcgctccaccttggatcgctgccgactgtgggcctccaggtctcccgcggccggagcgaatccgggcgagcgaggaccgccgaagaacatcgtgcttgggttccttccggacgcttttcaccgtaatcgagctttttagttcggaacggaggccgaagttaggacgctcagtggcgtcccgggcccctggctgcttacgtcaatatcgcgcgttaactagagagtgcacgcttgtgagagtcggggggtggtcttcacattaccctctacaatcccttctaagtggttatcagtgcaactgtaacgatgaacacacgtcttatggagaaacaggagtcccagttcctccttttggatgcaccttctgtaccgctcccagtatggagcatatattagcagttgctaatgaagaaggctttgtcagattatataatacagaatcacaaactagcaaaaagacatgcttcaagggggggagagacggcaacattatgatctgggacaccaggtgtaacaaaaaagatggattttatagacaagtgaatcaaatcagtggagctcacaatactgcagacaagcaaaccccttcaaagcccaagaagaaacaaaattcaaaaggacttgctcctgctgtggattcccagcagagtgttactgtggtcctctttcaggatgagaatacattagtctcagcaggagccgtggatggaataatcaaagtatgggatttgcgcaagaattacactgcttatcgacaagaacccatagcatccaagtctttcctgtacccaggtaccagcactcgaaagctaggatactcgagtttggttttagactctactggctctactttatttgctaactgcacagatgacaacatctatatgttcaatatgactggcttaaagacttctccggtggctgtcttcaatggacaccagaactctaccttttatgtaaaatcaagtcttagtccagatgaccagtttttaatcagtggttcaagtgatgaagctgcctacatttggaaggtttccatgccatggcatcctcctactgtgctcctgggtcattctcaagaggtcacgtctgtgtgctggtgtccatcagacttcaccaagattgcaacctgctctgatgataatacactgaaaatctggcgcttgaatagaggcctagaggagaaaccaggtgataaacattccatagtgggttggacctctcagaagaaaaaagaagtgaaagcctgcccagtaacggtaccaagtagccagagtactcctgccaaagctcccagagccaagagcagtccatccatctcctctccttcgtcagcagcttgtactccgagctgtgcaggagacctccctcttccttcaagtacccccacattctcagtcaaaaccactcctgccacgacccgttcttcagtcagcagaagaggctccatctcttctgtgtctcccaagccactctcatctttcaagatgtcgcttagaaactgggtgacccgaacaccttcctcatcaccacctgtcactccacctgcttctgagacaaagatctcatctccaagaaaagctcttattcctgtgagccagaagtcatcacaggcagatgcttgctctgaatctagaaatagagtgaagaggcgtcttgactcaagctgtctggagagtgtgaaacaaaagtgtgtgaagagttgcaactgtgtcactgagcttgacggccaagcggagagtcttcgtttggatctgtgctgcctttccggcacccaggaagtccttagccaagactccgagggtcctaccaaatcaagcaagactgaaggtgctggcacaagcatctcagaacctccttctcctgtcagtccttatgcttctgaaggctgtggaccactgcctcttcctttgagaccttgtggagaaggatctgagatggtgggcaaagagaatagctctccagagaataagaactggttgttggccatagcagccaaacgcaaggcagaaaattcatccccaagaagtccatcatctcagacacccagttccaggagacaaagtgggaagacgtcaccaggcccgtctactctagcagtctgtggtaatcacgtccagctcgtggatgcaggaatcaaggagtgcttttgtggacagtggagagtgctagtccagcacagggcccatccgtgaaggccagtctgaagacatcctctgcagaagatgccttaagcaagcgtgagcttatttgaaata

SEQ ID NO: 671 - protein, 784 aa, Mus musculus
GVGGETAPRCGGCRRRLLWNLGAIFSAFPSAEPSPQAQMLFNSVLRQPQLGVLRNGAPPWIAADCGPPGLPRPERIRASEDRRRTSCLGSFRTLFTVIELFSSRPKLGRSVASRAPGCLRQYRALTRECTLVRVGGWSSHYPLQSLLSGYQCNCNDEHTSYGETGVPVPPFGCTFCTAPSMEHILAVANEEGFVRLYNTESQTSKKTCFKGGRDGNIMIWDTRCNKKDGFYRQVNQISGAHNTADKQTPSKPKKKQNSKGLAPAVDSQQSVTVVLFQDENTLVSAGAVDGIIKVWDLRKNYTAYRQEPIASKSFLYPGTSTRKLGYSSLVLDSTGSTLFANCTDDNIYMFNMTGLKTSPVAVFNGHQNSTFYVKSSLSPDDQFLISGSSDEAAYIWKVSMPWHPPTVLLGHSQEVTSVCWCPSDFTKIATCSDDNTLKIWRLNRGLEEKPGDKHSIVGWTSQKKKEVKACPVTVPSSQSTPAKAPRAKSSPSISSPSSAACTPSCAGDLPLPSSTPTFSVKTTPATTRSSVSRRGSISSVSPKPLSSFKMSLRNWVTRTPSSSPPVTPPASETKISSPRKALIPVSQKSSQADACSESRNRVKRRLDSSCLESVKQKCVKSCNCVTELDGQAESLRLDLCCLSGTQEVLSQDSEGPTKSSKTEGAGTSISEPPSPVSPYASEGCGPLPLPLRPCGEGSEMVGKENSSPENKNWLLAIAAKRKAENSSPRSPSSQTPSSRRQSGKTSPGPSTLAVCGNHVQLVDAGIKECFCGQWRVLVQHRAHP

SEQ ID NO: 672 - DNA, 88892 bp, Homo sapiens
  misc_feature (1)...(88892): n = A,T,C or G
ttaacagcatcaatttcaaatgtctctgtttagtattttaccagtcacaaaatgctgattatgtcctcacaggaataagtatcttagaatatctctgtccagtaacctttgattattcttaaaaaaaacaacaaaggaggccaggcacagtggctcatgcctgtaatcccagcactttgggaggccgaggctggcagatcacctgaggccaggagttcaagaccagcctgggcaacatggtaaaaccccgtttaaatacaaaaattagcccagcgtgatggcaggcacctgtaatcacagctactagggaggctgaggcatgagaactgcttgaactcgggaggcggaggttgcagtgagccaatatcacgccactgcactccagcctgggtgacagagaccctgtctccaaaaaaaacaaaaagacaaaggaaatctgaaggcttttcctagttgccacaatgtttcatacaaaagacaaccacaaagtaaaactgcataggtaatttctatcatttactaatgggtgatgttccgtaatgcactcatgttagttattcagtacttagaacattatttcctcataggaaaataatagcactatcggcactcacagtactctggaacctaataaccatttataataaatgtttctatgggaaaattaattaacatttctaactgagatagaacacatccctccttcatctgctccctcctccccttcaccctcttacacacacaaagaactgcctctgaagctctagaaatccttttcctatcaaacacaacgccaaaagggataattctaagtagctggcagtgtggctcatgtagccttaacttttctaaaagcctgatatgaaaaacgggtcaagggacacacagggcagagaaggggaaagacatagctgaggatggaggtgagaaggaacagagatgtgtgcttacgtatatgtgttggcaaaggggttgaaaaaatccacagtaattggattgtttcattttcttctcactgtcagtagctgagttagatacaaaggatggtaaagttctgtttgtaatgaattaaccttggctgagatgaaaaaggcatagtaggaaacagcctatgtacaggtagtctccttgacagaatataatcatgttttatcttcccttgaaaaacagaaccaaagaccatattgatttgtttaaacatgctgatttaaaatgtaccaaagattattttgaatgaagcgagagaatgttttgatttatctaatatcatcaaacttttttctctgagataaaatagactctcattcctctgtaacaacgccacggggtaaatgaactaaagaatattaaacctcttctgtattttctgatgtaagagccctccttaggaaagaggtagtgagaattcaggctggctccgaaggacaggagctaaggtgaaaaagaaggaaaaagtgctttaaaggcctattacttagcaacagccctgggttggggtagtatggtactcatcttgcttgctctaggccaattttgtaagcactggaaaacaggagctcagcacgttccagttctagtataagaggggctagacattttatttgtattgcttgctacaggaagaatgccctggtcataagaccactaatcataagaatactactgtaagcccagagataagattaagaaggagggatgtgattgctatacctacattttattttgtattcttccaccaaaaaaaaacaaaaacaaaaacagatctctcttccttttctgtgcctggacttaaacagtgcttaactcagttgcaacatgcatgtagaccagggaaactaaaataggctgtaaaatcatttattcattcaaaattcatttggcagtagtaaagcattcattattctaacattatttcgcacttaaagtgtgcagagctttttgccaggctagtggttttcagcttggttctgcatcagcaatatctgctaagtttttgaaaaatatctatgctatgggttttactccaaacctactaaatatatggggcagagtcccaggcatctgtttaactactttgaaaaggttggcatcgagattccttttttttttcttgagacagtctcactctgccgcccaggctggagtgcagtggcgcaatctcagctcactgcaacctccgccccccgggttcaagtgattcttgtgactcagcctgccgagtagctgggattataggcgtgcaccatcacacctggctaagttttatatttttagtagagacaggatttcaccatgttggccaggccaatctcaaactcccaacctcaggtgatcctcccgcctcagcctcccaaagtactaggattccaggcgtgagccactgcgcccagccagcacctagattctcaagttaacttctgccacttgataacttatttaactagcctgcccacactgattatactggagttagaaaactactaggctgctgaatttggtcctcagaatgcttttatctggcacaatgtttttaaaggtttcgaacacactgtcaagttttacaaatcatacttcacataaaaccccaggatctctggttttagaaaagtaaaagatctaaaatcttactgaagaaggtagaagtgtctgaccaaagaaacatagtagtactgcagaaacattacagtactgcaggtccatgttgaaggtcagtgtagattcggctcccatttatgatgatagccatgtaccccactgtatgactttctgcagcaatttttgactgcctttggggatacatgagtagaatggaaccttggatgtgaatttaaagtactggtaagaaagtaaatgcagttaataaaatgaaggaccatgaaatctaagctgaacaaagaagtaaaacaggtacagaaatgtagagaggtgaaataccgaggtctgaatgaaaataaagactagccaaaatagcagttaatcataatgataatgatgatacacatgaagtgcttattctgtgccagtcactttaagcactttgcatgtattaaagtctcactaaaaatcacataaattaggtaccattattttccccatttgaaaggtgaggaaacaggcacagacaagctaagcaatttgcgtaagaaacaacaatgctgacaaatgacagagctgggattcaaattctggcaatgtagctccaaaggctatagtgctaaccactatgctaaaatgcatctctagcaagcaactagaaagaaagagattaagattcaagaatgagacatttaaattagtgattaaatggtggaattctgaggtgatgaattctagggaattaggggaataccataaattatggtaaacttggggtttgggatacacattaatcaagttttcaaaacagcacaaatctccaagtagcatctatcagcagttcttagctgcaagcaacagaagctaactctggcttatgaggcagaaaatgagtttattaaaagcttaagaaacaattttaaggctaaatttctaggaacacctaataccacactacccaaccaactggatggaagaaccctgtctttgataggaaacaccagatgcaacaattagctctgctgtcatctaggaatatcgtagccattgttgttgctgctgtaagctagaaatactgctgctgccatggcagaactgtgagtggacacttcaactcttccttcttgcatctctaacttctaaatcagacagtgtgaaggaggtgtgtctgactggcagagcctaagtcagatcctgcactcttgcaagggaaactaggaaataagtttttgcttctaccttagtaagacaaggttcatgatatgggacattccttaagcataaaaagagtgttcaaaatatattaagcaaccatcaacataactaacatccactacaaagaacaccacaaataaagcattaccaaacaaacacaatttaggacaatttgtgacatacatttgctttagctaagagatgaggatgattcaaaattgaaccataacacgaacatatcttaaaatctatacattaataaaaggtgtgtggggggacatgggtagaaacatgaacacaaacatacaacccacagcttaaaaaattgatggcaaagcccatttttatatttaaaaagcagaaatagaaacaagtaaaatgacagtgaaaactaatgatgcattaataaggcagcatccatcccccaaatttcagaaaatgtctgtaaacgtacatggcaagatgtatgcaacatcatccagtatgcacatgagaatactaatctagaattctaaacaaatttgagtttatggataccaacttctaggaatatttaataacccactttgcaaattccaagacagtaaatcttagttatatataagaatgagtctgtgggtttcagtaaaaacttgaatttttggattagttcatagcccatcaaggaattaccaaccaggctgctggtttttatgttgcattaagttgcccagagtctcaccttagcttcaattctacatgattttttgtttttttttttttgagatggagtttcattcttgtcgcccaggctggagtgcaatggcatgatctcagctcactgcaacctctgcctcctgggttcaagtgactctcctgtctcagcctcctgagcagctgggattacaggtgcctgctaccacccccggctaatttttgtatttttagtacagatgggatttcaccatcttgggcaggctggtctcgaactcctgacctcaggtgatccgcccgcctcggcctcccaaagtgctgggatgacaggtgtgagtcactgcgcccggcctaattctatatgattttataggtccgcttctcaacactctcagactaagtgtggtctggcagcagagattctcaggagaaagaatttgactcagtgtgggtcacatgcctacttctgaatcaatcagttatggtatggaattagtcacctggaacaaatctggctgctgaggcctttctcttgaggagggcctatgaagatacttccccaaaggcctcatatttgtttactgaaacaccaacaacatctgagccatatcgataatgtaaaagcaatctgtggtctttcttgacaaacttttttgatggtctgagaattcaggtattttggaatacaggtgaggtgacaccgtctaagggggaaattagagtgcagagacagttgtcctgattcacatcatttctctatttcataactaaatttttcattaagcacaccatcaaggtttttcacacagcattacattcaccagcacctctagtaacaaatctatcctctatatttcctcccttcccattgcatcagctgcaagaaagggaatgagtcactgctctcttccccattgctttcatctcatcctttccaaggtcaacattgcagaaggcagataggctgaataatatcatttaagagactcctcttttcccagggggaaggagatcttgcataagttttcccaaatcatcaggataaccttccatcagctgatctaaaaatgtttagactaagaaattatattagtgaaaaagttacactaatttttgtgagatgcatcctttatattgccaattatgtatagtaatgatcatatcatgaaatgtgtcagataaacataagctgtaatgtatttgattatgacacttaactctgcttgtgtatgctcagtcttacagaagctcaagcagcatggccatcagcctacaactttcaatgccttcccattgcactctgcacaaaatccaacttcttgtcctgactaacggcaccacatttgatctagcattgtccatctccttacatttgtatgcaatctccttaaagatgtcttgtttgccaacatagcccctagtctgagtatagagcctgagacaatgcaggtggtcagtaaatatctgttgagtaaatgaatggctatcacatgaaggatgattttcctgttactaactacatcctaaagtaatggaattgagtcagcttcaaaatagtattcacttattcctatagagatcagaaacaatcagcttactgccaatgcttgctcaaaaggctcagaataaagtacaacagttataaatatataacaggttatgaatggcagcatttcctgagtgtgtttctaaggacaccagtgccacaaaatatttctttaaaatagcgttcaaaggttacatcttatgcctaactgactaatcatctccatttggatgtctaagagacatctcaaatttaacatgacccaaactgatttgatttcagtaaacaatacatacatcctcccagtagctcataccaaaaacctctaagttttcttgaccacttactcttatatcctcatctaatccattagcaaatcttcttggctctactttgaaagtatatccagaatctcagcacttcacacattttcagtgtcaccatctcggtctaagccactattttcttttccctggattgttatagttgccttctcattggtctccctacttgggtccctgaccctccccacttcagtctattctcagcacagtagccagactgatacttttcaaaggaaagtcagatcatgtcacacacctgctgaaaatcctccatggtttcctttctcactcagaatgaaagccagtccttttgatggcttgcacggccctacctgaacgggactctggttatctttcttttttttttttcgagacagtcttgctctgttgcccagactggagtgcagtggtgtgatctcggctcactggaagccccgcctcccaggttcacgccattctcctgcctcagcctcccaagtagctggaactacaggtgcccaccaccacgcctggctaattttttgtattttgtttagtagagacagggtttcaccatgttagccaggatggtctcgatctcctgacttcgtgatccgcccgcctcagcttcccaaagtgcggggattacaggcatgaaccaccacgcccgactgactctggttatctttctatactcattgcctattactttgctccagataactgcatgcaaaggaggcttctacctcagggcctttgtacttgctgttcttccacttgattgaggaggtctttcttgcctatacttcataaaataagaaatcaactccagccccagatcagttttctccagtccctttcattgcttcattttcctttataatatgtatcactaactgtcacgtttgctatatttgcggagtgtctgcatctgctgtctagaatgtaagctctataggggcaggagttttgtctcattaactgccatgttcctagtacaaagcccgatcaaataagtcatgtgtctgagtgtgtatgctgaggtgggggagatatttcagaaacagtattccttggagtttgggaacgaaaaaaagagttggaacttgtagccttctgacctttagctcacaaaacagaaatactttaacaggtacaagatgaaatgactcaatatttaaaatactcaactatattctacacgaaactggctatttctataacttaatttcctaacagctttaaaagttactacagatgagatgaaaaagaacaagtcatctttctgagcctgagattcacctgtaaaacactcacgccaggcattgctgggaggagtgcaaatgatcacttactctgtgtctaagattgacacctgatttctttcctatagatataaaatattttcatttcaactcttctttaaaaaggaaaaattgtggtttttttcttacaactgcaaaatttgaggaattaaaccattctagactcctcttcagtgccccatctttatccctgttccacaaccactatcctattgtcagcatgagacaagctcagctgcaccagaatggtagaaaatgtccttagaactcgtagggatattagatattatcctgacctgtaactttcactgaggaataagaaagaaatgtatcagaatgaggaggaaagtgtttgaaaaacacatttaaggccgggcgcggtggctcatgcctgtaaatcccagcactttggaaggccgaggcggacggatcacctgaggtcaggagttggagaccagcctggccaacatggtgaaaccccgtctatactaaaaatacaaaaattagccgggcgtggtggcgggcgcctgtaattccagctactcgggaggctgaggcaggagaaccgtttgaactcgggaggcggaggttgcagtgagccgagatggcgccactgcactctagcctgggcaacagagcaacactctgtctccaaaaaaaaagagaaaaacacatttagtattatacttttttttttcagaggagaaaacccctaaagatttggtaagagaaggaaaagttcaacataattttcttggttgatgggggtgcactaaagatactgagactcaaccaaaggaatatcccattagggggctgtgaaatttttgtgtttatcaaaataaggtaaaagcttttttaagagcctgagaaactcttatttagactaacccactaaaaatattcacagtttaaaaaataaacagaaaaagagtcccaaaaaagttaatagacatgtccaactcagaaaactgggaagtggctcaaacccttctgagttctagtccagttctccaacattatatattggctacgattaatcaagatttaattgtataccagctgccgaaatgtttcccgtacaataaaaatcctcaatatgaaataaaggtttcatattactagtcgagttctttactaacaaatttccgaccttgcctcccatatccacatctaagaagggaggtatatctcttcagcatttactaaatgcttcttttgcataccattaagtcacttaatacaattctgccggctcaatggtactgtacccactttgcagacgacaagccgaggctagatgaagttaatcataaaatcagcggcattgaaacttaactcagtgtaaccccaaagctccctctacaccaagctgctccctgtacggcaacagaactcctggaacttgtccgcagagaatgagcagggcccttgcttttttatggtcttggccaggtttagcctgccttgtaacccgcaggtaacagagctatggaaatcaaatgaatcgctgtcaagtcggtgcaagattactattcagcacatttcatgaagacctggtctcaactgaacagactgaaaaccaatttcacaatttctttgcagtgtctcttagaaactagccactgtcactgcttagaaaatcgggggactgctccctcaagtggtcaaaacgggcctctcactagagctcgctacttgtttagccggtataaggccagtcacacaatcctgcaaatttcccgcaacctcccgaaggggtcaaagcccacgccccagcaaaagcacaggcgctccccgcccagcgaagacatgcgcatgcgcctatccgtcttctcccaaagcaaccaccacctggtggcgccacttccccccacgcctgtttcacccattcagccctctctttcgaatacctttgtccaattccataagggcagagttggcatccagttcctgttcgccatagccggcatctgccaggaaagacttagttgagtttgacgccatgacccgaatagttactcgactagcctagtcagaaagcttgcaaactctaccccaggaccgccatcttcccccgccgccttcttgctggtttttcttccgcgcgctgtcaagccctgttacgcatgcgccctggtcaccccgcggtttgtccgcgcctctgctaccccctgcgcaggcgctcaaggagctcttggactccaggttcccgcggctgggagaaaaggaggcggggatccgaagggggaaatgactctgaggcgcccggacgtcgctcggaagccaatcagagagcgtgacgtcagtttggcgcggagtttggcggccggggcttacagtggcgggagttggaggcgataacgatttgtgttgtgagaggcgcaagctgcgatttctgctgaacttggaggcatttctacgacttttctctcagctgaggcttttcctccgaccctgatgctcttcaattcggtgctccgccagccccagcttggcgtcctgagaaatggtgagtaacggtcccaaccgctgctcggagctggcggaattcatttcccccgaaacacacgccacctccgaccagggccgactccaattctgaactcagcttctgagttctcccatggcaagggtaaattagtgttagcagggactactaaagaaagctgtactttcatcccctcgggacacttgtaatcgtaatcgggcttttaaaatcgtaacgtaggcagggacgtcgaaataactgccttccaaggccccttacagcttacatctccattgcgcgttaacgggaaaatgcatgcatttgtgtgtatatgtttccttcaacggttatttgagatgctcaaaactcctaatcattgattaattcattcgtttgttgtagaatcttagtgagcccagctatgtgctataggtatataccagtgaatatgacccgctgttaaggaactcagtcaagcagagaagacaggatatctgcttctaacaggaacaaaatcttattttccccgtttactacacggtcataaaaatttaaattatagagtgaaagatgcctgtaaccacatccgccagagatgacccctgttaatagattgaagtatattattccagatgttttcgacgctagaggtaatacctattattttcagaaatcggatcaaaacgtccagttttttcactttaatggtataagttgaacgtattcccatgttaatacgtagaaatctaacttattttcttacgctaaaacattggcaataagagatttgaggttagatttggatgtcatcaacttaaactttttggtaagtttcagataagggagctaactacccagattaaccttggacagaaataaaatctcactcatgtgaaggtcgactatagccagaggttctttttccccttgaaactatgtggaaaacgaacctgagaagggaatttttatattcagcgatgagtctaggaaaataatattgagaaagagactgagaagtagtccctcaacttcctgctagcagtctgaaactttataccatccttatttatttccctcttagataatctttgtaattatacttaaatgctcctctttctgtctctcctgggaccttgtttgagtaacttctttgtcctctgtttaagagtgacagtacgcacagtggctaagaactctgtctttgaagttaaactgcctgggttttattatacttccacaccttactatatgtgtgttctgggggagctgttcagcctctattttgtgacagattttctcctaattctccatgtgtttacctttcccttccctctttcctattctcaagtactcattcgttgttacataatagtcactgaaattcattcgttattatatgaaatctatagaatcatctcctttcctcttcagtgttggtgttccatccttgaccccttttcttcttctacctactcctttggatgatcacagccacaaccagggcttcttccacttctacatacatacaaccttctgttacttatatagtaagtcctcacttaatgtctagataggctcttggaaactgtgactttagggaaaacagtgtataactaaactaactctaccataggctacttgatataaataagaattgtttcagtggcatattttggtcacacaaacaccaccgaacttctaaagaaagactcaaagtacttttaatattaaatgttgaaataattgtgtgctatacatatatttgagaaagattaataaaaacaggtgagataattatccaagttttggtgtatcagcgagtgacctcggtcatagtggtggtgggctaaatcaaggaataaatgtttgcaaagtgaaaattggaaggagcacctcctaccaccacccaggtcaaaaacaatcacaaatatggcagctcactgagccctttcataccaaatcgtttattgtcattcatttgtatgattattgtaaagtttacccatttttattttacaatgatttgtattcattcattttctgacacacttattccagctcagggctgtgggtgcccggagcctatcctggcagctcatggtacaaggtggaaaccagctctagaccagacactatttcatcacaggaagcactcacacacactcattgtctactgggaccatgtagacacaccagtgaacctaacatacacatctttggcatgtgggaggaaaccagagtacctggagaaaacccctatgaacatgggaagagcatgtacaaactccacacggccaatggcctcaaacaggaattgattttttcctcatgaacagtataacgaaatgacattgtacaaaattatgttattggaagacttcctgtacctgagattcatttctataaaagctgtgtgggttgattagcacctagacggtcaatcccacaagcatctcaaactcaaatacccaaaactgaactcagcttttcccccaaacctgcaatattaccaattttagagagtggcctcattatttaaacctgccagaaacctgagtaaattaaagacttcttcatcttcctcacagttacacattcaaaacatttcgttaaaatctcttgaatccatcctctcttctttatctgttatgattatgcatctttactgtatgctggatgtgttctatttttactattccatttccctaggttgggccctaatgccttcttgtctggattgtaagaagtctcccagatggcctcctagtttgtctgtcttcggtttattctccacattgctgctaatgatccttctaaaatggaaatctgattactcttctgtgtatttttaaattgatatctaaaagtttttattataaacttaaacaaatgcaaagaatataatttctgaccatattgggaatattgacattttaaaaataaaaatgctatatcactcctttaagtgtatctaatataatttaaatactatagtgatttgataatcacatcatccattttttagaaaaatacaaactcctctttatctgctggacattccatatagctgctttttcctcttgaatttatttccatttcatttctcctacagaatttctcctaatgtaatttaattttatgcttgaaaagctcttttactgatcactctgtcatacccttctgtgtcaaaaaatgtgtttaaattgctgttttctgtcataagcctccaagtattaaaacttctttatggattgaattttcaattcaattattagtactatatgattgattaaaacaatatagattaccaattttgataattattaaccaaaagtaaaattttattggaagtccatctttttaaagagatgaatttgggtgtttatggtccctttattgaaggaattatttaattatctcttagttaaggttccaccagtttatttgtttttatttaaaaatatttgatacccaaaagtttttattctttggatcagtgcaaggtttaagattggggcacgggaatgcctttcttttataaagtggaagaaaggaagtgatgaagggaaagggaaaaagtggtacctcaaccttctcagagacatcaggtttttcagacaggtgagttttagaaatgcgtatatagtcatccaattgcttataaatggagataacattttgagaaatgcatcattaggtgattttatcattgtgcaaacatcacagagtataaacacaaagctagatagtgtaactactacacacctaagctatatatttttcctaggctataaacctgtgtagcatattactgtattgaataccgtaggcaactgtaacacaatggtaagtatttgtgtatttaaacatagaaaaggttcagtaaaaataggatataaaagataaaaaatggtaacacctgtggagggtgcttactatgaatgggagcttgcaggactgggggttgctgtgagtgaatcagtgagtgagtagtcagtcagcacgaagacctgggacattatactactgtagactttataaacactctatacttaggctgcattaaattgattaaaaaatactttcttcaataataaattaaccttagcttactgtaacttttaaacttacaaacatcttaaattttttaactttttgacccttgtggtaacaggtagcataaagcacagacacattgtataattgtacaaaatattttatttcttcatattcttattctataagtttttttattttaaatgtttttcttttcttaacttttcaaaccttttgttaaaaactaagacacaataggaatttttaagctccattataatgttgtaagactaccattgtgtatgcggtctgtctttggccaaaatgccattacatggcatatgactgtatatcgtagttgagtacagtagtacctccttatccttgaaggatatgttccaagacccaaccctatgtatgctgtgttttttactatacagacacatacctatgattaagtttaggcacagtaagagattaacaataactaataataacatagaacaattataacgatattctgtaataaaagttatgtgaaggtggcctctcggaatatctcatggtgctatatacttgcccttctcatgatgatgtgagatgatataatacctacaacatgaagagatgaagtgagatgaatgacgtaggcaggcactgtgatataacattaggctactacttccaactatgtgacagacaaagcagcttctatgtgatataacattaggctactactcccaactatgtgacagacacagcagctaagtgactaaagagcaggtaacgtctatggcactgctactctggacacagggatgattcatatcctggacaggtcagggtaggacagtgtgaaattttcttgccactcaaaatggcacacaatttaaaacatgaattgtttatttctggaattttcagtttaatagtttcagaccgttgttgactataggcaactgaaaccacaaaaagcgaaaccacgggtgaggggtaactactgtatctggaaattgagtctctgaaaactctcatgttcttgtatactacttggaatatgtgcatgtaactccaggggcttaagttgtacaatgaggaaataatagctttttccaaatgtgttgtggaggaaagcattacagtttcatgttcataacacaataaggatccaaaagtagcttagggtggttcatcagtgaagtgtgtattgcagggattgcataagtagaggggtaggcaaggaccaatcactcaccattcattggtgtttggatgttaattataggcagtgaggcagagttaaagagtcattgtttaattgtaaaaaattgtaggttttttggagtgtatcatcttcatttcaaccaagttgttcaaaagtcccttttgagtttttattttgcagttgatttttttttttaattccaaaacgtgtatatttacataacctttgaacagaggcttttgtttttacacacttattccgtaggttaatacttgtgacctcaacataactattgcatttttggcgggggggtggggggtggggacggagtgtcgctgtgttgcccaggctggagtgcagtggcgaggtctcagctcgcggcacgctccgcctcccaggttcactctattctcctgcctcagcctccgagtagctgggactacaggcgcctgccaccacgcctggctaattttttttttatgtatttttagtagagacggggtttcaccgtgttagccaggatggtctcgatctcctgacctcgtggtccgcctgcctctgcctcccgaagtgctgggattacaggtgtgagagaccgcgcccggcctattgcattcttttagtggtctttaacagctcctttacaatgatatgtgatgctgaaattatgacgtgatggccccagaactaattaaatttggattaaatttctttggtgcccttctgttgattcattcagattatgtctatgaacatccaaatgtagatttgtctgaggttatgtcaggctaagatgtattctccacatagtacttttgatgaaaagtgaggattcagagtaccctaaaatgtgagtttgttaattatttaagatgctttcaatagattgtaaactcagtgtttcctccaatgcttattgaacatttggttttcagtaattacttgttgaatgaatgtttattttatatatttaaaatgtcttgatcacaaatcagtataataaaaacaaatctctgaagatgtctttactatgtaggagcatagtgcacattagacctctgacccaagcagaataaacttttcttctaccctgagtctcttgttctctgttctaaattcagtgaaaatttacccatctttcaagacctcctgtaaagactccctgacccactaccactagccagggctaattaaatgttttctaggggtaggtacataacacttcactttacaatttctctaatataatttaaggtactataattgctgctattgacattttagattcctacaatttcagcactaaaggaaaacagaagtaaatttggtgaatatgttactggctatagtagctgcattgacatattattttctttggctctttgaccattggattttgtatgatgttctggaataagaatttaattgaaggggatagcagttttaatggaatgcttttgtggttgtctctttggtaggagaagggggaagatctttcttaatatgcagaggcctcttgtttcttctaatctcaatgtactagtgagagtctccattttagatagtaagcccaaagctatacctccccagaagttggaagtgctctttcattttttccttaggactccttaatgaaataacagaaatggtgtcttccatagatattaatagtaagtggatctatgttaatatctaaagtttcttaaggacaaatatttacctctgaatttgttaaaaatgctgaaatgtgatgctgtattggaattctataaggaattatcttgttttaggatggtcttcacaataccctcttcaatcccttctgactggttatcagtgcagtggtaatgatgaacacacttcttatggagaaacaggagtcccagttcctccttttggatgtaccttctcttctggtaagagaattactatctaggcaaggcttggacagaaatgatctatttcacacttatagggaaaatatactagagtatttccctttcaaagaaaagtaaattaggtggatgttagagtttttgtaaaaactgttatcttctgatttataaaatagacttttcttaatctctatacatcattagcataactatatttcctctaaagcataggactattatagcactatttttaaaaaatcaatataaggaaggggttgcaaaggttcagctactatgaaaactgttttatccagtagatacataccctttgatctggttgaatgtatctttctgtgactcattggggaatatatgaacagaaatagaagtacttcagccaggctcagtggctcacacctaaaatcccagcactttaggacgccaaggtaggtctgggcacagtggctcacacttgtaatccccgaactttgggaggccaaggcgggtggatcacttgaggtcaggagttcaaggcagcctggccaacatggtgaaatcccatctctactaaaattgcaaaaaatcagctgggcgtggtggcgcacccctgtaatcccagctacttgggatgctgagacaagagactcacttgaacctgagaggcagaggttgcagtgagccaagatcgtgccattgcattctagcctgggtgacagtgagacttcatctccaaaaaaaaaaaaaaaaaagaaatagaagtatttgtctccacccataatagtttgagaggaaagaaaaagttgtgacaaggaaatttaaaactaatagactccttataaaaattagccgggcatggtggtgcatgcctgtagtcccagctactggggaggctgatgcaagagaatcgcttgaacctgggaggcggaagttgcagtgagctgagatcacgccactgcattcctgcctaggtgacatagcgagactgtctctcaaaaactaatagactattacatagtcatgattgtggtaaaaataagtaaataaaaatatggttaaaaaaactaatagactcagcctgctggcagcctacatcatcatatgcctttgtttgccattggccagtaccactcttgttttaagtactaccctcgatttagcccttctctaaataagagattatctgaagaaaattttggtggttttgagtaagcttaaaaatttttgtagctaggcatggtggctcacgcctgtaatcccagcactttgggaggctgaggtgggtggatcacttgaggtcaggagttcgagagcagcctgaccagcatggtgaaaccccatctctagtaaaaatacaaaattagctgggcgtggtggcgcatgcctgtaatcccacctacttgggatgctgaggcaggagaatcacttgaacccaggaggtggaggttgcagtgagccaaactgcactattgcactccagtctgggtgacagagcaagactccgtctgaaaaaaaaaaaaaaaattgtgttactctttatatatttttttctttatttctgctttagctcccaatatggaacatgtactagcagttgccaatgaagaaggctttgttcgattgtataacacagaatcacaaagtttcagaaagaagtgcttcaaaggtaagtctaggtctacaatttttgttttaacatttaaaaaactttacacatcctcaagtatattattatttgaacacattctgttttagtctgtcttctgttgctataaaggaataactgagactgggtagtttatatagaaaaagtttacttggtgtgtgattctgctggctagaatagtagacatctggtgaaggcctcaggctgcccccactcctggcagaaggcaaagaggagcccatgaatacagaggtcacatggcaagagaagggtgtactaccaagctcttttttaacaatcagctctccagggaactaatagagtgagaactcactcatcttttcacctcttagggagggcgttaatctgttcatgagggatccacccccatgacccaaatgcctcccattaggtcccacttccaactttggggattaaattataacatgagatttgggaagggacaaacatctgtagtatatataacacattcccaatgatattaacttctgattaagtctttttagggaccagattagatgtgaatggtggactgcctatctgtcaataactgttaactgtgacaatgcctttactcaaagttaagaaaaatactttttaggattaaaaacaattcttaaaaaagttaaatctttaacacttaatgtgattagagaagtgttgctttaaaatacttatattaatcaagcatttttcatgtttaaagcaaagttctaaccttaagaagctgataatttggaacccataagtcaagtgttgaaataactgaaagaaaacaaagactataaatgatgtagaagtagaaagtaaaacacactggtgtcaaagagaaagctctcatgtagtaaagaaggctaggaaaacttacgaagcatggggcatttgagttggattatggtatttagaccagtggaaatggaagggggcactccaggtgacgggaaaagcattagcaaaggtctagagatagaaaagcataggatataataggaagtgaccaatttgtttggaataaggtatcgagaacagtgagagatgaggcttgcaaccaagataaagactaaagaatgcaaaatgttgaatgtcaaactaaagtattttacattccattcagagagcatcatgaagttctttttgtttttggttttgttgttgttgttgttgttgttgttgtatttttggtagagatggggtttcaccacattagccaggctggttaactcctggcctcaagtgatctgcctgtcttggcctcccaaagtgctgggattacaggtgttagccactgtgcccagccagtatcatgaagatttttgaactggaatatatttcagaaagattccattgtagagaatatattactagtgaactcatggaaaggaatttgacatcagatggtagtagttctcatgtggtaattaagggaatgtgtaatttctgtgagtccacaaattctctttgctcatgccaaagggtgctgactactgattttttatgtgtgcatctttatttttattattttaagttccagggtacatgtgcaggacatgcaggtttgttacgtaggtaaacatgtgccgtggtggtttgctgcacataccaacccatcacctaggtattaagcccagcatgcattagctatttttcctgatgttctccctctccatgctccccctcaagaggccccagtgtgtgttgttcccctccctgtgtccatgtgttctcgttgttcagctcccacttatgagtgagaacatacggtgtttggttttctgtttgtgcattagtttgctgaggataatgacttccagctccatccatgtccctgcaaaggacatgatctcattcctcttatggctgcattgtattccacagtgtatatgtaccacattttctttatccaatctatcattgatgggcatttgggttgattccatgtctttgccattgtgaataatgctgcagtgaacatatgcatgcatgtatctttataatagaatgatttatgttcctttgggtatatacccagtaatgggattgctgggtcaaatggtatttctggttctaggtctttgaggaagcgccacactgtcttccacaacggttgaattaatttacattcccaccaacagtgtaaaactgttgctatctctccgcagccttgccagcatctgttgtttcttgactttttaaataattgccattctgactgacgtgaaatgatatctcattgtggttttgatttgcatttctctaatgatcaactactgatctttttactactacagctttccaggcatttaaagttatattaatatgggtaccacagaatacaatttagacatttcacatttaccattttctttgtttagaatggatggctcactggaatgccgtctttgacctggcctgggttcctggtgaacttaaacttgtaagtgactttatttcattaggatctgggtaaatactgataagggagtgctttattaaattgtgtttaccttatttttgaaaggttacagcagcaggtgatcaaacagccaaattttgggacgtaaaagctggtgagctgattggaacatgcaaaggtcatcaatgcagcctcaagtcagttgccttttctaagtttgagaaaggtaggtttgtgcttatcttctttcatctccttaaccttctttgcagttgggagataagaacctgtaattgtttctaccctttcccctgtcaaagttactgctttacctacatagatgattaagattctttttttggagacagtttcgttctgttgcccaggctggagtgcagtggcgccatctcggctcactgctacctccgctgcctcccaggttcaagtgattctcctgcgtcagcctccggagtagctgggactacaggcgcacatcaccatgcccagctaatttttgtatttttagtagagacggggtttcaccatgttggccaggctggtctagaactcctgagctcaggcaatccacctgcctcagcctcccaaagtgctaggatcacaggcgtgagccgctgcacccagccaggtgattaagattctaacatgactgaaaaccttaataaaattaaattggttttaggcccactcttctggacattatctctagcttgtccctgaaagtcaagagtctttgataagtttttctgtaatcttgcacataaggtaaagatttataaacagctacaataccattgttcaaccttgattgttcattgaagttaaaaccttgtactgggcactcattaactatttgtaaaacagagttactttaactctgcttgtaaaatctaaatgagctataaggctgataaacaacataatttttttctacctaaaaatttatcatgtatttggtttaaatggcctgttttttgttttttgtttgtttgtttgttttttgagacggagtctctgtcacccaggctggagtgcagaggctcgatctcagctcactgcagcctccatcccccgggttcaagcaatcctctccctcagcgtcccaagtacctgggagggattacaggagcctgccaccacgcccagctaattttgtgtttttagtagatctggggtttccccatcttggcgaggatgatcttgaacccctgacctcgtgatccacctgcctcggcctcacaaagtgctgggattacaggcatgagccaccacacccggccaaatggcccaattttctattatgttttcaactattacttaaaattgattttcctatgtttatattgttataatggacaaggaagatttaagagttatataacacagcacagtactgtagcagctagggaaaaacttatcagtggtgtctgaataagctcttcatttctgtttttgtttgtttgttttctccttccatttgtttctcactaaataattttttttaaatggaccaacaaacatttctctcaaaggagtctctgaagtaatctgactttaatctctgaataatagtgacagacattacaatctcctttatcactaaaaaaaaaaaaagtactctgttttaaaaatcaaatgttttcatttattcacctgagccatttaggaggttaagctggtttggactggttttttgtttgtttgtttgtttgtttgtttgtttgttttttgagacaaagtctcactctgttgcccaggctggaatgcagtggcgtgatcttggctcactgcaacctccacctcccaggttcaagcaattctcatgcctcaacttcccaagtaactgggattacaggcgtgtaccaccacgcccagctaatttttgtatttttagtagagacagggtttcgccatgtcggccaggttggtctcgaactcctaacctcaagtgatctgcccgcattggcttcccaaagtgctgagattacaggcatgagccaccatgcccagcctggcttggacttttaagaaagtcggttttaatttactgtggttgcagttgaaactggaaccttgaaggggaaatatggcatgatttttcttatttctgcataactttattaacatatttaagtagttaggtatgcttgtgttctagttttctacactcttgtgtcatagttcactctgagtttgtaaacataattttaagataatgaaaatttacctaactaaagagtagtggaaaacatatcttttggtccttttgcttaatttttacaactctgcatgtgaatcagcctgtgacaatgagctgtagaagaaaaggcactgagttagagattggggcaggtggcttttttcatgattttcagtagttcataggtactctagtgtaaattagtctgatcggatactgctcccaagccctgtggtttgttttgttaaaacagaatagataatagctccactcactccatcagccataagccctcttgcagggcaaacctttgcaactaaacatggaagccctctgttttattctggcctcctgggcaaagtgattttaacctccttgggccttcattttctaattttatgagataaacacctagtttatttaggtcacaaaaatattgtagacataaaagtgaggtgaaatatgaatacttttttttttttaatctgagctcattatggtggctcatccctataatcccagcaacttgggaggctgagaaggattgcttgaggccaggagttcacgaccagcctgggtaacatagtgagaccctatatctaagaaaacagaaaattagcttggtacagtggtatgcacctatagtccgagctacttgggaggctgaggtgggaggatcgcttgagcccaggagtttgcagctgtagtgagctgtgattgtgccatcatactctagcctgggcaatagagtgagacccagtctcaaaataaattaattaaatcaatcgatctatctataatcaatcagaggaccatataaatacttagtgttttgtgggggtttttgtaggtagtatggtagaaaacatctttggtccagttccttccaccctacataggtaggatacaaataatcctaactggacatagtcacactaatggaatttgccttccctaagtatctaccaactaaaagcaaagaaaatggactcagataagtgctttgtgtggcaaaagggcaggtattagaacttctagtggataattaaaattgattataaatttatttcctctcctacaaacttacctatatttacaccttctttctcattcttcattctcaagttttaattaaatgagaatctcttgcaagtgggccaggcatttattttttcaaagttcctcaagggatttcaatgtgtagctaaaattgagaaacattcttgatccttcccaagaccttccaccatcacatgtatccccactaccctgtatcttcaagttctccctctctattggctgtttctccttaggagaagatatttggcctattttcccaaatatcttaaccctgtgttctcttttagttgttactgtttcatattttccatctcctttaatttggtttaatctattttccacatctagccctcttcctgaaatcactcttgctaaggttattaattatctaattatcagaaagcacgaaacttttcaggtcttttcttctgcttgtataatatgttacacttttggtcttttatagaatttcaataaaagtctttgcttagaatctgtgatatcccactccctctggtactccttctgtccttctctttattctttcatagttgcttttacctaggttgaagtgttagcaaggcccaggatttggtgtttagcctttttttgctttcaacctataccttcttggacagtttcatctgtaccagttttgttttgtttttcatcctacttgtgttgacccagatctatattcctagccttaacctttctgcaagtacttcagattcaacatatcaaaaagtgaacccacaattcctccctgaactcatgatttctccctggcaatgccatctttttcctctcctctgatatcatttccttgaacaacgtatttaacttttcttatagtgtgagtctgatggtaataatttaccttagtttttctttacctgaaaatgtccttatttcatcatcattctcgaaggacatttttgttggatatgaaattcttttttttttttttttttttttttttttttttttttttttataagcccagaggtcctttattttttttttttaacacctattatgccatgaattcatagggaataggttccagcagctcaggctccttcccattggttctcacaaagtgtgcttctctgggtggagcaggctggcgctttagttgaacccaggtacctttctctttggcttctttctttttctgatcattttccttcacacgtttcaggaagctatctcggctcttagaatgcttaatgtgctcaatacgcacattaattctcttggcaagaatcttgcccttaacttgtttgtttacaacaatgccaacagcatgctgggtaacattgtagactcttccagttttgccatggtaacacttgtggggcattcctttttgaacagtacccgttcccttgatgtctacaatatcacctttcttatagattcgcatatatgtggccaaaggaacaactccatgttttctaaaaggcctagagaacatatatcgggtgcctctcctctttccctttgtgttcgtcattttggcgaattactggaagatggcggttccggccgaaaagaagctggatatgaaattctgggtcaacagcttttttttcctttcattgctaaagttgttccactatcatctctgctttcattgagaactctgtggttgttaaaatcatttccctgtatataatatgctgtttttcctgactattttcaggattttttgtctttggtttctagcagtttgactgtggtatgtctagtcatggttcccttcacagttttcctgtttgaggcttgttttagctttttgtatttgtaaattcctttttactgaataggaatttttctatcatttcttgaaatactttttctgggccaggtgtggtggctcaggcctgtaatccaagcactttgagaggctgaggcaggcagatcacctgaagtcaggagttcaagaccagctaggccaacatgatgaaatcccatctttactaaaaatacaaaaattagccaggcgttgtggtgggcacctgtaatcccagctactcaggaggttgaggcaggagaatcgcttgaacctgggaggcggaggttgcagttagctgagatcgcaccactgcactccacactccagcctgggcaacagagcgagactctgcctcaaaaaaaaaaaaaaaagaaatattttttctgcctaatttattcatattctctctcctccctgcttcttctgttaccttaattacccatatatatattttttttttcaattactcatgtatttgacttttctaaattatcccatgcatccttgaggttttgttttttttcagttatcctaaacttaagataaaatgaacaagccataaaattcatccatttaaagtacacggtttagtggtttttagtttattcactaagtcgtgcagctatcaccacaatctaaatttagaatcttttcatcagtccaaaaagaaacttgaacgcattagcagtactttcacccattccttccaaccttatacaaccactatagtaatttcggtctctatagatttgcccattatacacatgcatacaaatggaatgatacaatatgtggtcttctgtgactggcttctttaatttagcctaatgttcagttctatttttctctctcttcttcaaattgaatgatttctattaatttgtcctaaagttcactttctctattttctccagcctgttcttaggcctatccagtgatttttttttttaatttcagatactggttttcagttctaaaattttcttatgttttttttaagacagggtctggcactgttgcccagattagagggcagtagcatgatcataggcacatgccaccatgcctggctaatttctttttgtattttttgtagagatggggtttcacccatggttggtcttgaacttctgggcccaagggatctgtcaaccccagcctcccaaaatgctgggattacaggcatgagccacagtggctgaccttcatttgtttgtttgtttgtttgtttcctgctgagatttatcatctttttattgattacaagtgtatatatttttttcttcctttttttgttttttgttgttgttgttgtttgagacagggtctcactctgtcacccagtttggagtgcagtggcgaaatctgctcactgcaacctctgcctcccgggctcaagtgatcctcccacctcagcctcccaagtagctgaggctataggtgcatgccaccacacccagctaatttttgtattttttgtagagatggggtttcgccatgttgcccaggctaagtgtacgtttctttaactcatttaacatggttatgtatcctttacaaccttatctgataaatcaatatctggattatcttgggattggcttccattgatttattttcccttgagaattattcgttttcctggctctttgtaagtcaagtaatttaagattatattcaggacattgcgagtggtatgttggattctagattctgttatattgcttagaaaagagttggtgttccttttttaacaggcaattcacttgtttggatccaaattgaagactgtcacacctacaggagggcagtggatcttatctcaattattttctttagtttaagcctcagctgcaaactgctttcagtttctcttgcccatatggtacaggggtcagccagagacttggactgagtttaaacacggaatcatgggttccctttctctagctgtctccaggttttccccatcccctcactctctgactgttcttgttgctcccagtctccttttccttgttcttctggcttgaaagatggcagattttttaatttgcattttagctgcctggtattaatgctgcaactttggctgtcctcaaggtaaaaccacacacacaaaaaaaaaaaaaacaccaaaaaacccagtaacttaatctcaggccaatcatttgctaaagatgttgactctcctccaaaaattgcatgtttaagaggaaagtgggccaggcacggtggctcatgcctgtaatcccagcactttgcaaggctgaggtgggctgatcacctgaggtcaggagttcgagaccagcctggccaagatggtgaaaccctgtctctaccaaaaatataaaaaattagccgggtgtggtgacacatgcctgtaatcccagctactcgggaggctgaggcgggagaagcgcttgaacctgggagacagaggttgcagtgagccaaaatcgtgccactgcactccagcctgggtgacaacgagacaccacctcaaaaaaaaaaaaaaaaaaaaaggaggaaagtggtaacttaaagggaggagtaaattttatccccaaacaacagtttctattttaggcggagtaaattccaacaaaaggggaaaaatgaacccgagtgacattctgtacaaccaaagctgttaaaaggaatgaatagtgcctgacacttaaaaagtgctgaattagatgaatggtttcaacatggctgactagatgcatctggtactcacctctttcacagagtggaaccaaaatagtgagatattatagtgacagtgagatcgtagataatcacccttcaaatagatcatctaagagagaacactgggattcaacagagaagtgataagaagctccggaagcaaggaaggagagaaaagtaaagcagcctgtttggctgggatcagctaggaatctggagaggcttcctatgcagggacagagtaagtgggagacccccagcagcccaaatacccactgtgaaccctaataatagccatgggagaccccttgatgctcacggaccctgagactaacatagggagctgcctggagacttcatgaaggcattgctccagagagatatcatactgggtcccacaaaccctcaagtcctaagcagctgtaacactgattttcagagcccagcccccaccagactgtgtcctgccctgccacccaggctgaattgggagccacacacagcgacctcattcccctgagtggaggggcagctgcacattttcacactccccaaggacaaattccacttcctgcaaccaccaccactctgggctgctgcagggcagaggtgtaagcaaaactcagtcgtttaactgcctgcctatgggtactcccagggaaagcaaccccactctgcatgtcagtactgcagcatagctgctgctgccccttacctgagcattccactggaagcctggggatcaccccacccctgccttccatagccagcacctgcatgcaccaccagggtcactgagggcagttccacctagcctggcttcatacacgccactacccaagcacaccctctgggaggcctgaggattgcccagttcagttcatcaccagtggtgcctgagcactcctcctagagtctaaacttgggcctactcaatctgctgctaccaccatagctggcaccaacctgtacatgcaacctgcaagtctagggactggcctgcccaacctgtcacagccaccgccaacactagtacggaacacttgggttccaggggattttttcatcactgctactgtcatcatccacaccactccacacctcctgcccaggggctcaagaatttgcccacccacctggcccactgctgccatttccaatacctgagtaagtcatctgaaggcccaagaatctacctgcctggatccattaacaccagtgccagcgtatgctgccttggggccaaaggacacacaggctcagaccactgctgccaccactggggcctgaagactggcccacctggtatttcaatttctggcaaaacttaaccagtctgcactaaaaaccacactctaatctaccaacgaaaccagataccaatgactctatggccaaaagaaatgatagagactatgctactgcttgcatccagaaccaaagccaagtgtcctctccaaccatcaccatagatacatcttcaggaaaatgttctccactacaaaccaaattcaaaaaattggaaaaagcaactgttacaccaggtgcacaaatatcaacataaaaacacagagaaatcaaaaagcaaggatatgtgacacatccaaaggaacacagtaattcttcagcaacaaatcccaatcaaaaaggaattctcaaaatcctggaaaaatgatccaacatactgatactaaggaagctcagtgagagaaaagagaattctgaaagacaatacaaagaaacagaaaaataattgaggaaatgaatgaggaatctaccaaagagataggtatcataaaatagagctaaattctggaactacagaattcatttaatgaaatacaaaatacctttgaaagcttcaacaatagactagatcaagcagaagaatcccagaacttgaagatgttttgaagatcttttaaaataacctactcagacaaaaatagagaaaaaataataaacatgaatgactaaagctttcatggcatatgggacactataaagtggccaaatatatgaattttcagtgtcccagaaggcaaagataaaatgaaagggttagaaagcctatttaacaaaataataggtgaaaacttcccaagtctagcaagggatttatatatccacatacaggaggctccaagatccccacatggatataattcaaaaaggttttttttccatggcacattgtagtcaaactcaaaagtcaaagacaaagtgaaaattctaaaagcagagaaaaaacatctagtcacctataaaagaaaccccatcagacctaacagcagatttctcagcagaaatcttatagttcaggagagaatgagatgatatattcaacatgcttaaagaaaaaaaaaaaaacctgccacccaagaatactacacccagtaaaattatccttcataaataaaagagaaataaagtctttcccaaacaagcaaaagctgaggaaattaatcaccagtagatgggccgtacagaaaatactaaaaggagtcttataccgggaagtgaagagcaatatttactgtcatgaaaacacaagaaaatataaaaactactggtaagcaaacacacaaacaagaaagaggaaaggctgaaatgttaccactaccgaataccatgaaaccataatgataaaaagtaccagagaaaggaaggaacaaaggatatacagaacaaccagaagtcaatcaataaagttaggaataagccttcacatatcaataacgttgaatgtaaacatgttaaactttccatttgaaaagtacagactgggcaaatagacaaatgtgacctaattatatgctgcctacaagaaacgcatctcacctgtgaagacaagtataaactgaaaataaaggaatgtaaaaagatactacatgcaaatggaaaccaaaagcaagcaagaatagctatacttacatcagataaaacagactttatgtcaaaagcagtaagaagaaacgaaggttattctatgatgataaatcagttcagccaaaggatatatcaattgtaaacatgtatatacctaacactggagcacacagatatataaagccaatactattagatctaaagggagagactccagtgcaataacagttgaggacttcagccaccccactcagcgttagacagatatctagaaagaaaattggatttaaactgcacattagaccaaatggacctaagagatatttacagaacatttcatccaacagctacagaatacacattcttctcatcagcaaacagaatattctccaagctagaccacatgttaagacacaaaacaagtctcaacacatttttaaaagttgaaataatatcaggaatcttctcagaccacaatggaataaaactagaaatcaacaacaaaaggaagtttggaaactacaaatacgtggaaattaggcagtatgattatgaatgacttgggtaaaggaagaaattaaggaaatttttacaattcttgaaacaaatgaaaattgaaacccaacataccaaaacccatgggatacaataaaagcagtactaagaggaaagtttatagcaatacacacctataccaaaaaagtagaaagactttaaaagaatctaacaatgtacctcaaggaactagaaaagcaagaacaaaccaaaccccaaattaatagagggaaataataaatagcagagcctaactaaatagagacttaaaaaaacaagaaaaagggtcaacaaaacaaaaggttggtttttggaaaagataaacaaaatcaataaggtacttgctagactaaccacgaaaaaaaagaaagatggtcttaaataaaatcagaaatgaaaaaggaaacattgcaactgataatacagaaatacaaaagatcatcagaaactattgtgtacaactatacactaactagaaaacctagaggaaatggatagattacaggacacatgcaacctaccaagactgaatcagaaagaactaggaaacctgatcaaatcaatagtaacaagatcaaagcaataataaaaagtcttccaacaaagaaaagttcaggaccagatggcttcactgctgaattctaccaaacttttaaagaactaacaccagttctcaaactattccaaaaattgaaaaggatgggaattctccctaactcattctacaaggccagcattattctgataccaaaaccagacaaggacaaggacacacacaaaaaaactacagaacatacggacatagatgcaaaaatcctcaacagaatactagcaaactgaattcaacagcacattaaaaaaaaaaaatacaccatgatcaagtgggatttatcccaggaatgcaagaatagctcaatatagacaaatcaataaacatgatacatacgtcatcaacagaatgaaggacaaaaaccatatgatcattttagtagatacagaaaaataattcgataaaattcagcatctcctccgaattaaaaaactcaaccaactaggcatggaaggaacatatctcaacataaaaaggctgtatatgacagactcacagttaacaccacactgaatcgaaaaaagctgggaagcctttcccttgagaactggaacaagacaaggnnnnnnnnnnnnnnnnnnnnnnnnnnnnnnnnnnnnnnnnnnnnnnnnnnnnnnnnnnnnnnnnnnnnnnnnnnnnnnnnnnnnnnnnnnnnnnnnnnnnnnnnnnnnnnnnnnnnnnnnnnnnnnnnnnnnnnnnnnnnnnnnnnnnnnnnnnnnnnnnnnnnnnnnnnnnnnnnnnnnnnnnnnnnnnnnnnnnnnnnnnnnnnnnnnnnnnnnnnnnnnnnnnnnnnnnnnnnnnnnntatccaaactggaaaagaagttgtattttccttggctgatgttatgatcttatatctagaaaaacttaaagactcatacaaaaaaaaaaaaaaaacctcagttctgataaattcattaaaagttgcagaatacaaaatcaacatacaaaaaaaatagcatttctatacatcaataatgaattagctgagagagaaatcaggaaggcaatcccatttacaatagctacaaaaaaataaaacacttaggaataaatttagccaaagaggtgaaagacctctataaggaaaagtatgaaaccgatcaaagaaattgaagaggagacaaatggaaagagacctcatgctcatggatgggaaaaaattattatttttaaaatggccatactaccccaagcaatctacagattcagtgcaatccccatcaaaataccaacatcatttttcacagaagtagaaagaacaatcttaaaatttatgtggagccaaaaagaacccaaatgccaaagcaatcctaagcaaaaagaatatagctaatataataactaaaacagcatggcataaaaacagacacagagaccaatggaacagaatagagaattcagaaataaatccatatatttacagccaattgattttcaataaaggtgccaagaacctacaataaacggtgctgggaaaactgggtatccacatgcagaagaatgaaactgtacctctatctcactatattaaagaaaatcaagataggccagacatggggctcatgcctgtaatcctagcactttgggaggccaaggcaggtggattgcctgagctcaggagttcaagaccagcctgggcaacatggcaaaaccccacctctactaaaatacaaaaaattagcttgacgtggtaggcgcacctgtagtcccagctgcttggaaggctgaggcatgagaatcgcttgagcacaggaggcagaaattgcaatgagccaagatagcaccactgcactccaccctggttgacacagtgagactcagtctcaaaaaaaaaaaaaaaaaatcaagatggtgtataaagacttaaatgtaagacctgaaacaatagaactactagaagaaaacatagggaaaacacttcaggatattggtttaggcaaagattttatggctggccaagaactcaaaagcacagacaacaagaacaaatagataaactagactatactaaactaaaaagcttctgcatgccaaaactttttgaatgggaagtatttgcaaactatttatctgataagggaataatatgtagaatgtatacaaggaactcgaacaactcaacagtagaaaagacaaaatattaaaaagtaggcaaacacagactgggcaatgtgccaaaactgtctctacaaagaaatacaaaaaaattaactgggcatggtggtgtactactgtagtcccagctacttggtggggctgagatgagaggatcactgagccctgagcggtgattacatcactgtactccagcctgagtgatagagtgagatcctgtctcaaaaaaaaaaaaaaagtaggcaaagaccatgaatagacatttcgcgaaagaagacatacaaatggccaacaggtatgtgaaaaactgctcaacatgactaataaccacagtgagatatcatcttaacccagttagaatggctattattaaacaaaacatgctggcaaggatgtggagaaaagagaactcttgtacactgttggtggaaatgtaaattagtccagtcactatggaaaacagtaagatttctcaaaaaaaaaaaaaacaaatagaattaccattgatctagcagtctcattattgggtattgattcaaagacaaacagtatatcaaaggaataactgcagtcacattgttgcagcactattcacaatagccaagatatggaatcaacctgtctattaacgaacaaatagagtttttaaaaatgtagtatatacacaattgaatactatttggccataaggaaatgtcattcacatcaacattatgttaaacaagccaggcacaaaagataaatttcacatgttcccatttatatgtgggtgctaaaacagtatcatggaggtagagagtagaatgataaataaccggaggctggaaagtgagtgggtgtgaggggggaatgaagaaaggttgcttgatggatacaagcataaagttagatagaaggtgtaagttccattgttcgatacctgactattgtcaccttacaaattattgtatatttcaagcagctagaagagagaacttaaaatgttcccagcacatagaaatgatgaatacaaggtgatggataccccagataccctgacttgatcataacacattctatgcaggcatcaaaatatcacatataccccataaatatgtaaaatactatgtatcagtaagaaaaattgcatgttttcattcagtttccacagcagccctcaggtagctgtttttgtgttttatcccatgtacaactaatgcaagtggattagtttaagtgctcactctttcacacaggaagcagggtttttttctggcttaattttaaagaataaaacattacagataaattgaagttctcctatagtgccttttccaatcccattgcatcccaggcaacctctttaacaaacttcatatggatctggtccatatttttatactgagccaatacagtttagagtttggagtgtaagctctggattcatactgccaggaatacctttacaagttacttatcctctctgtgcctctcttggtacttacctaataaggttgatagcaaggattgagataatttttataaaacacgcgggatagtagctaacatttagaataagaagcactctgtattttgactcttgattgttattcttattacaactgtactatatattttatatgggttttaaaaaatttacagaggggtgattctatgaagttttggttcaacattagcatctcaagctcttcataatcctttttcctatttgttattgagccatatatttttaaatgtttgatctccagtgacagatacagtacctagcacataatagatagtctannnnnnnnnnnnnnnnnnnnnnnnnnnnnnnnnnnnnnnnnnnnnnnnnnnnnnnnnnnnnnnnnnnnnnnnnnnnnnnnnnnnnnnnnnnnnnnnnnnnnnnnnnnnnnnnnnnnnnnnnnnnnnnnnnnnnnnnnnnnnnnnnnnnnnnnnnnnnnnnnnnnnnnnnnnnnnnnnnnnnnnnnnnnnnnnnnnnnnnnnnnnnnnnnnnnnnnnnnnnnnnnnnnnnnnnnnnnnnnnnnnnnnnnnnnnnnnnnnnnnnnnnnnnnnnnnnnnnnnnnnnnnnnnnnnnnnnnnnnnnnnnnnnnnnnnnnnnnnnnnnnnnnnnnnnnnnnnnnnnnnnnnnnnnnnnnnnnnnnnnnnnnnnnnnnnnnnnnnnnnnnnnnnnnnnnnnnnnnnnnnnnnnnnnnnnnnnnnnnnnnnnnnnnnnnnnnnnnnnnnnnnnnnnnnnnnnnnnnnnnnnnnnnnnnnnnnnnnnnnnnnnnnnnnnnnnnnnnnnnnnnnnnnnnnnnnnnnnnnnnnnnnnnnnnnnnnnnnnnnnnnnnnnnnnnnnnnnnnnnnnnnnnnnnnnnnnnnnnnnnnnnnnnnnnnnnnnnnnnnnnnnnnnnnnnnnnnnnnnnnnnnnnnnnnnnnnnnnnnnnnnnnnnnnnnnnnnnnnnnnnnnnnnnnnnnnnnnnnnnnnnnnnnnnnnnnnnnnnnnnnnnnnnnnnnnnnnnnnnnnnnnnnnnnnnnnnnnnnnnnnnnnnnnnnnnnnnnnnnnnnnnnnnnnnnnnnnnnnnnnnnnnnnnnnnnnnnnnnnnnnnnnnnnnnnnnnnnnnnnnnnnnnnnnnnnnnnnnnnnnnnnnnnnnnnnnnnnnnnnnnnnnnnnnnnnnnnnnnnnnnnnnnnnnnnnnnnnnnnnnnnnnnnnnnnnnnnnnnnnnnnnnnnnnnnnnnnnnnnnnnnnnnnnnnnnnnnnnnnnnnnnnnnnnnnnnnnnnnnnnnnnnnnnnnnnnnnnnnnnnnnnnnnnnnnnnnnnnnnnnnnnnnnnnnnnnnnnnnnnnnnnnnnnnnnnnnnnnnnnnnnnnnnnnnnnnnnnnnnnnnnnnnnnnnnnnnnnnnnnnnnnnnnnnnnnnnnnnnnnnnnnnnnnnnnnnnnnnnnnnnnnnnnnnnnnnnnnnnnnnnnnnnnnnnnnnnnnnnnnnnnnnnnnnnnnnnnnnnnnnnnnnnnnnnnnnnnnnnnnnnnnnnnnnnnnnnnnnnnnnnnnnnnnnnnnnnnnnnnnnnnnnnnnnnnnnnnnnnnnnnnnnnnnnnnnnnnnnnnnnnnnnnnnnnnnnnnnnnnnnnnnnnnnnnnnnnnnnnnnnnnnnnnnnnnnnnnnnnnnnnnnnnnnnnnnnnnnnnnnnnnnnnnnnnnnnnnnnnnnnnnnnnnnnnnnnnnnnnnnnnnnnnnnnnnnnnnnnnnnnnnnnnnnnnnnnnnnnnnnnnnnnnnnnnnnnnnnnnnnnnnnnnnnnnnnnnnnnnnnnnnnnnnnnnnnnnnnnnnnnnnnnnnnnnnnnnnnnnnnnnnnnnnnnnnnnnnnnnnnnnnnnnnnnnnnnnnnnnnnnnnnnnnnnnnnnnnnnnnnnnnnnnnnnnnnnnnnnnnnnnnnnnnnnnnnnnnnnnnnnnnnnnnnnnnnnnnnnnnnnnnnnnnnnnnnnnnnnnnnnnnnnnnnnnnnnnnnnnnnnnnnnnnnnnnnnnnnnnnnnnnnnnnnnnnnnnnnnnnnnnnnnnnnnnnnnnnnnnnnnnnnnnnnnnnnnnnnnnnnnnnnnnnnnnnnnnnnnnnnnnnnnnnnnnnnnnnnnnnnnnnnnnnnnnnnnnnnnnnnnnnnnnnnnnnnnnnnnnnnnnnnnnnnnnnnnnnnnnnnnnnnnnnnnnnnnnnnnnnnnnnnnnnnnnnnnnnnnnnnnnnnnnnnnnnnnnnnnnnnnnnnnnnnnnnnnnnnnnnnnnnnnnnnnnnnnnnnnnnnnnnnttgtggttctcaaattttaatttttggttcttctgaattataatgccatttacctatattattgatggaattaaaatatatgtagcctcgttgataaatatctttaaatttattttggttttaaagaattagattgaattaaacataagatgttgtctcatgccattaagcagaaagtgatttttttttttacaatttcaatatctacattttaaaaaattgataacataattttacatattttggggggtacactatgtataatgatcaaatcagggtaattgagatagccatcacttcaaatactgtgtgcatcagagttgcctgaggcacatgttgaaaattcaccttactcatccctaaaaatctctctacacacacagacacaaacacacacacacaaacacacccctatagtatagtggaattcattaggaaaagtgggggaggagtagtttgaagaagcatattaagtactgtgatgcagttttctaaggggaaagaatacctgttgttttcgtaatacaaactacagaaaaatatgttttttgttttgagacagagtctcgctctgtcacccaggctggagtgcagtggcgcaatcttggctcactgcaagcaccgcctcccaggttcacgccattctcctgcctcagcctcccaagtagctgggactacaggtgcccaccaccacgcccagctaattttttgtttttttagtagagacggggtttcaccgtgttagccaggatagcctcaatctcctgacctcgtgagcctcccaaagtgctgggattaccgatgtgagccaccacgcctggccagcttatttttaagcatttgacaaaatattgttaaatatattgagaaacacatgggtagaacatagtaccactctaataacttacagtcagagctcaaacaatgcccataatatatcctttttctttaaaaaattgccctttttctcactttaatgtaatttttttttcatattcctggtgtgtagggtacaagttaatattttgggggaagtatgactgctaagacattaagacttaaaactatacaccgtgaacaggacacaagcatgaatggaagcagatagtagaggccatatgaagttaaaacgagtagcatttcagacatttaatctggttctgagccaagataacttgttaagtaatagcaattaggaggtacgactccactgggcctctttttcagggcatgaaataatcttttattcataattcttttgatactcctatatgataatctaggtagacagcaacattttagagattaaactggcacaagaaagttaaataagtttcctaaggatacacacagcatattagtagggctgagtctaagtagatgcagtaggctcagacgagcaaaatcttttagtcaccagtttgttttttgagtataagttgaaatattaacactgtatactaaaacttaatgatccttgctaaaattacctcttggtcagcatatatatctgatcgagatcattagacaagacttcatctaagtcagtctggggagaaaagtcgttttttagcaccttgttcccttgatggtaaagattatgatgcccaagatagaatcttcttcttttcttgtgctatcaggatttccagcaaagtgttactgtggtcctctttcaagacgagaataccttagtctcagcaggagctgtggatgggtaagagtctatttcttttttcttccgacgagatcttttttatgagattgtgatgaggcagtcacatagtctcattataattgaatgtgtgtgctttcaactgtcaacatagcaagtaccccaactgaggaaaggagctatagatcacattggaaaatacctagttgaaggactcttgctggataattaaatgaaagaatacatgtgtcacgcttagcacattgtctagcacataagagcagtggtagctgctgttgctatcttagaaaagaagctggctgggtagcttgcttgccttatgcaatataatttagtcactaattctcattttgaagagtaaaatttctgttactttgggttttgtctttttcaggtttaagaatatcctaaaagaagaaatctgattctggggatgtaattgacatttctgggagtaatctaactagattgatgatagtaaggtctaatgactttcacatacctgtcatccatgattagtctgaattcttggcttccaaataagtctgctctgtgatgcttgttgattgtgttgtagaatattaattctatgcaaatggagactctttctttttaagtttccttcctattatatctctcaaggcatccttctcttaaaatttttaatttaaaagatgatggcttaccaaactaggatttccattgtgtcctctgggcactaaaaccctctgaaccaaattctcaggcaggaatgaaggattatctaaaggttattagttctgcttgtgaatgactgtgaaagcttgctctgtttgtttccaagaatactgtcatttcatagcaggtctgtgttttcaagttacctttatactagaagtagaggattaagacaattatctcaatagatgaaatgaaaaaatactttatttcacagaacaatttgtttagattatttaaagagttatgtatggagatataaccacagggacagaacttgctacttatgatatcaaaaatatatgcagaatattaaaggcttaggaagtgtattttctaaaaacaatggaacaattactatcggcactcaaccttcatcttccttttccgttctcttagagtaaactccagtaacccatcactgggtcaaatcacatctgtttccgttctgtcagaattataagcctgatattggagacaacagtataagatactttaatttgtttcccaatgaaatatccttactgtacctagttaatgtgccagaggagttagattaaaagtcatttcacatttagtgtagttgaagttgtttggggttggaagaaggtctacaaaatatttatttgccttggtttttaggataatcaaagtatgggatttacgtaagaattatactgcttatcgacaagaacccatagcatccaagtctttcctgtacccaggtagcagcactcgaaaacttggtaagcctttaataggtcttttgggggagataagagtttttgtttaaaaaaaaaaaaaaaggctaatttccagtaacattgatatgaaaaattctaatatgtgaagttcaaaagataaaaactcagaagaatgtttttggtttgtgtatattttggggacaaagaattctgatgatgattcttatgaaatgatctatttttgtctctacattttaacctcagatctactcaccatcatcaggacgtgctaacttaagtttcctttttccaggatattcaagtctgattttggattccactggctctactttatttgctaattgcacagacgataacatctacatgtttaatatgactgggttgaagacttctccaggtaagatattagtcattcaaattctcttaccaggaaagcattatgggctttttttggtaatgataatttaatgggctttcttctaaactgaacttattaagccatatgaggactttggcatctttgattacatccagtgataatttcataagtgtacattccttgtgatgatttcataagttagctgaattgtgctttacatggtgactttattttaatagagagtatctcctgaaattatgccctttggcctatatttagaattctctcaattttttatttaataagctgtggagtagataaagtgcttctgctcagcttttttcctctttaggggctgctggttaaaattagggggctgaaattttcatacccccaaaatagtttcagcctatctcagccttctccttaatgttagaggcccttttatttctagatgttttccccagcctcaccttttttttttcctcaaaactttaaaaatagaatctgatacttaaaactaataaataaatgatagttttaaaaagaaaacccaagtttctcaagcatgctttcctcttttttttaatcctctcccctccctcttccaaatcaccagcctcaggcatgctttaagagagttatttgggttacattatttttaagaacatcaatttcttaagcaacatcttagtagcctggttattcctcatctatagatctttcaaaaacactttgaattccataaccaatcctcagagttacccagtttccactaaagtaaaaagtgctgataaacaagaaatctcaagtacagaacttgttttattttatttatagatagatgtagatatagatataaatttttttttttttttgagacggagtttcactctgttgcccaggctggagtgcagtggttcgatctcggctcactgcaccctccgcctcctgggttcaagcaattctcctgcctcagcctcccaagtagctgggattacaggcgcccgccaccatgcctggctaatttttgtatttttagtaaaggcagggtttcaccttgttggtcaggctggtctcgaactcctgacctcatgatccacccacctcagcctcccaaagtgctgggattacaggcgtgagccaccatgcccggcccagaacttgtcattttagctgagatcttacagaattttccaaagatcaccccaagcaatcttattaggactttagtatcggtggcagcatcatagtctgcatttctgatactttgcactgggtctagttttctctaaacaggagcaatagtatttagaaaagggaagaggtgtttcttttgctattttccttaatggaatctgagcttggagagctgctaatttagttagtcaaataaaatagacttttcaacatctttccttgaaagataaagcgtgatcctgattatattatcagatgtacaagagctctttctatataatttttgctacagtgtggcactgaaaaggtccttgagtttagtgtcctgctgtccaacacttcgctaataatttagtaaaccttttctgtgcttctatttaatttcatttgcgcagatggatagataggtagataggttaatagatcgatttattccttaaaaattgaatgacagctggccatggtggctcacacctataaacccaagccgaggctggcagatcacttgagcccaggagttcgagaccagcctgggcaacatggtgaaacctcatcttgacaaaaagatgcaaaaaattagctggatgtggtggcatgcacctgtagtcctgctacttggaaggctgaggtaggaggattgtttgagcctgggaggtttgagtcttcagtgagccatgatcttgccactgcactccagcctgggtgacagagtaagaccctgtctcaaaaaaaaaaaactgaatgacaactgtgtgtgtgtgtgtgtgtaacgtcttgtaattacttgtccttttcaaaacttctgaatcgatcttggattcgatacttgatctaccatgctttgtattatggtgtttatatgttcataaggatgacttggttggaagtacttgaaaagcccagatcaccaaagcaagattaaattgagctcattaaagccaacatacattttaggaggatttttagcaaggtttaaacatttacagtgcatatcataccagcctttcttagaccagcagagggcaataaatacttacaggtgtagtgggaaattcaggctagagttttccattcatagttgagagttgaggaagattaaaaattacagttttagaacaatgttcagaataaaggagcttgtttattttgcagtgataataggtgtatacaaattgattcatatcctgcctcactttcacagtaaaaatgtctgatgtgaggagtatttgctatgcctgcatagctttttcctttaaagctataaatacaaagttcttttccagctttattctagaaaatggaagagattcctgtgagcacttatgggaagctgttaagtcccctactaatacttttctctctggagtgtgattgttttttcctgcctaaaggtatccttaaattctccaataattgagatttttctcttgtatttcctagtagtgttctgatgtcagaggcctcaggttttgaccttcttaggatagaagaacctgttaagaacatatgctagattgggttacctgcccttttgccattgagagtgagaaggctaaacctaatctagtgccttacatataaacagtttactccactagctcttccaccattcagtctactcaaagtgctggattaaaatgattctcacatcccacataagctattagtaagttttaaccagaactcaaatgatacttttcactgattttttttttccttttcatggaacaaatgtttgaggatctactctgttcaaagcactataaagtctagtgaggaaaaagtaagatataaaatttatcctcaagaggcctgaagtctaaggggaaattagatgaatatattatgcagtggaaaaaatcctaccctgggctggagagagagggtcttataaaggcattttactgcaagttggacattggctggattctttttttaaggaatgttttccctccaatttttttctcttgatattgccattttcgtaccaagtactcagactgagttcatgagattggatctaatataaagcttccttctagggttttgtttttctgccaatgtctagttcccttgtatttgatggataaagctagatcatctgcttcaataggcaatacagtgataaaacttgttagaatatatatgctgtctatatccatttgaccactagaaataacaagagccaagtaatttggtttttttcctctggcagtggctattttcaatggacaccagaactctaccttttatgtaaaatccagccttagtccagatgaccagtttttagtcagtggctcaagtgatgaagctgcctacatatggaaggtaagttgctaaacttcacccacaagtgttagactgaagtattcttgcaaatatttgttctgtccaatatgagataagtttaatgtaaccacgtgctatactattcctgcatcagatatttagtaaaggttgctcttggctcttaatatagctgaaaccttactctactacagaatgtatgacactttcagggccatagcttgtcagaaattgacaatttgtatcctctgtttcaaaaattattaggaaattgagaattcagagggtgataagaaccttaactactttgtcctgcatcctggaaaacatgctatactgactttctgccctatgttttcaaactctcgttcagaatacagtattttgatccctaggatcctgtgcttgaatcacccatggagccttgcacaaaacagaaactcaaaaatatttttatgattaatttattctttattctctccttacaagtagctgatcttcaggccactaaagtagatatggctgctttatcagatttttatatatttaatagcattatttactaatcttttttttttttttttttattgagatggagtctcactctgtcgcacaggctggagtgcagtggcacgatcttggctcactgcaagctccgcctcccaggttcacgccattctcctgcctcagcctcccgaataactgggactacaggtgcctgccaccacgcccggctaatttcttttgtatttttagtagagacggggtttcaccatgttagccaggatggtctcgatctcctgacctcgtgatccgcccaacttggcctcccaaagtgctgggattacaggcatgagccaccatgcctggccaataatcttttaaataacttttttaataacagtagttctaaagtgtctactgtaagctaagaaatttaaagctgtccatttgaagtccagtggagaaaataaaaatgttagacaacaggtagcacttgcttattactgaaaaatgtctcttgaaggaataattaattatggaaatgttctgggaattcagagaatgatcattaaggcattgtttacccatgactaagaattaattatcttctagatttccctgtaacttcataaatgtctttgacattggtgaattgaatgattagagttcacatattttgggttttaaagtcataatgtctaaaacttcatagatcccatagttccgatagtatcaaatcccttctcaagagaaagttatatcattttttatcctgccaagctctagaaagtaatattgctaattttttttaggacaggggtaaaacctgtttagtatgaagcataattcttcagcttaatttcttccaatcctgagggaagtacaaaagaaaagtgatttctatataactggagttgcgaaaatgcaacactactttattaaaattttactaacaatatcctaaatagtcacagggtggaaatattgctctatccaagatgcttctatgttgggcctgcctttttctacaagcatatttctttcttttgttatatttttaaatgcctataaagtatatacttgactccatcacaagatggagtttcctctttataatattcttcttacttgagattttaagtttaacaatgttatgtcgctggcactaatgctctgtcttatatttaaaattttcagtttcaaatttggtcttaatgcttattttgctacctttttcctttcttctttgctcactgtcttgcctatgtttccttctccactttggctcccaacttaactagaggattttattcctaccacaggtctgtatcttttaaggtttgtttcttgttaaaaaaaaaatttttttttccaacatcacaaaaagcatataagaataattcaaaaaatacttatgtattgatcattcttgttaaattattaagttttaattataggtacataattatgtatacaattacatgtgtgttgtatagtttcttgatagtttttaaattcttaataaatttttaaattatatatatacataattatgtgtataattatatattatgtgtatcttgtgtaaagttttcttgacaattgttaaagttccttcctcttctctagtgcaaaggcctttttaaaattttgtttcagggaatgaaggttgtgggaatacttgcctttaaagatatacactaaatatagttggccattgtttctaagccattttcagacaaccaatcagtgtctaccacatacaagggttacccttttttaattcctaggctgggtcacatgtcagtgttgaatgacgtggttcagacgtgatgttcttctgcctgtccacacataactcggtgtacaggctctgatatttgagatcctggcaagcttgcacctcctaaatttgaatttgcctagtgaggtggctcagtttctcttttccatgattaaaaaaaggaggagtggtattttaagagcaattccattcaagctgagtatccaggctgttagattgctcttctacgtgttcaaaaagtcagaattctcttaagtattagaattttttctatgctaaaaagccaaaagcccatgggcacaagaaaacaaaatagaagggagttttgtatcttaagacagaagagaatggcctcttaatcctcactactgcccagcaaagaggaaatataatatattcgggctgatattgaggcccaagacttaaaaagatttaatattataccttttctttttaatttcctaactattgtctcacccccaccccatcctcttttctctggtttgtttctgatatagccactgaatagcatcgaagtggttataaataaactgatttggcatagtcattctaccactgactggtgaaacgttgagcctgacactttaggaagtgtaaatgatctcatggcagaaataaagattagacttggtttccaactgggcagagaagagattttgtgaggaaaagtgctgatattctttgtatgtttcagtacacaaaataactttatgacatctgtaagttagagccacttacttctagaggtaccttcttagttctaggagatttaactttgggattccttgtgccttgaattaaagtctttattttacaaaaagtagaatatgtaagagaggacagtcttctgtgtctgagcatctccaaaatgcatggatataaatgtctcttagacttaatagtcgccttcctacttaaaagggaaaggaagctttaaaaaatgaagttacgtaattatgatagtgttcttataataatgtagggacaataaataaaaatttatttgaataaaaatgaaggatttaaaagccacctgaatctcattagaaggaatgaatctttcttgaagtagtcatactataccctaggatagtcctaaactatcaaagcataaaagttcataaaaacgtgttagacattagtttctcattttaacccataacacgcccttcctcccatttttccttattcagatagaattcatataacatataattcaccattttagtcattttaaagtttacaatggagtagttactattgtaatcacagtgttgtaccaacatcaccactatctaattcccaaacatcatcacaccagaaaaaaacccgtgtcctttaacagtcactctctaatcccctcttcctccccaacacctgctaaactacattcagtctctatggatttgctattctagacatttcatataaatggaatcatacaaaatcagcattttgtgtgtgacgtcttttacttagcataatatcgaggttcatccatgttatagcatgtgtcagtacttactcctttttatgactgaataatatgccattgtgtggatagaccacattttgtttattcattcatcagttgatggacatttgagctgtttccattttttgacatgaataaagctgctgtgaacatttgtgtataagttcttgtttaacataggtttttaattctcctgggagtgtaggaacagaattcgattcctaagaatagaattgctgggtcatataattgtttaactttctgaggaaacttccccccacttttaatgctatgtaaagtgcctggcttagacttttactgtcgtcattgataccttgttaacgtattccaaaatgtttttctaatgggtctctttcttttttctctgaaaccctatagataaatgcaaaaatgtgcatatattctattggtgggtatttagggggttttttgaaacttattttaacccttggtgtacacatttaggttctcctaggtattataatacagaaactgagaaaggaccaatatcatgaaattaaaagctataggcaataagcagggtgaatcaatggaagacaataatgtatttctaccagggatgctcagtaggacttgaggatttcctctcccttctaatttgctgctaccagacctgtttggaccttgggtgaagagaaacttaatcgactggggccatcccaaacagaggaggaaaggaaaatttctgtgactactgggatagttagagacgatcttcaaagtcttttctaaaatatgttacattgtgaaagaatgaattatctctgtgccattgtaggagtaggcagtaagtgagattcctgtagatgtggaaaaagcttcctttctgataaattttaattaactctgcaagacaagttagactctgctctttgtcttcttttgcttttttaattattgcatatgtaccatttaagccaagagaggagtattaatgattgagttgaataaccttatcagtcagtgtgtcagatctcttaaccataatctgggggaatctattaagtttacttagtcattctcacaaataatcattccagagtcacctccactttcttcatacaaatgagccatgattcagagcctcaggaaaatgaaaagagaataacttctctcagccccaacctccttgctcttttgaaacacacatgctaataatagttatgtgtgtttgtactcgttattgtgctgattaattcccatggcctatgaaagagattgacatctcttgaatgagtcagctgtatgatgctgtcaaatgtacataactggtggcatctgatgatggaaaaatatgattcttagtcacatgtacaggacagtacaatgtgacccttctttctgcattaaaatatattaaaatgcgagtgacacttacttgaaaattcaaaacttctctcagaaaattaactgaaatatagttttagaggaaaaaaatgtttttcagaaaggataccaaagtgccatgtaaaatatagtttataccccttcagaatgaaggttatccaactcaaaatgaaggagtataactttgggttttgtaaaagttagtgaccagctctgttgggacaagaggacggtcttcttttggaaggaagaccatcatcttgtccgaagagagctggtagcatgtttcagaaatcttcaggtttcacagttaatttagtgttcctagaagtagctgactagggatctgaagatgtatatgctgtgtaaaaacaggactgagttgtcgagttgactacttaaggatggataacatccttccagaaagtttaccacctaaggaataagggacaatgccagtcttgaattttagtcaaaatatatatggctaggttgtcctgatatgaaataaggactatccttgtgtgtaagctcatgttatttacttattttgactgttttcattgtgttttctcagattagtaacagaaatatttcattgcccattggaaatctgttgtttttttttcctaactatagctaggcaggtctagtggcctttggtaacaatcctaaagctctctaagacacacttctgaattcaaaggcctctatctgggaaatctaatattgctttgctgacttgtttgtttttgattggactaggtctccacaccctggcaacctcctactgtgctcctgggtcattctcaagaggtcacgtctgtgtgctggtgtccatctgacttcacaaaggtttgtaaatgaatctctatagttggtttaaaatgtagatcacaggtttgtaggtttttctaaggtttgttttgagaatgatataaatttttatgtttaagttgagattttaaagacctaaaggccatccaggatctatattcacattactcaggcatattctgcttttctctacccataccataatggtattatgccctgtgaaataaggatagatttctggttccctacagttatttctttcctaaatgtaggattaagttgttaacttaattaaaattttctattaaaatctaagataaaaatacaatctaaggtgagaactagtcttttttactttttagatattatcaatgtagtatattaaaggtaacatcttgacagcccaatttgggttttcacatatggctaacaaaatggtaactgtgaagtcttaacatgttaggttatctattgcttaaactatgtaagtaggtctgaaatgttttagatactccagaaagaagacaatatgcccaccttttaatttttttatagtgacactttaagaaacaaaaaaaccctaaaatgtagaaaggccagaaacattaaaaactatgtatctattggaattgcatataatagtagctcaagttccagtcattctcccaaaccccattgcctctggtctttgagttattctgggttctacaggaaatcttatttctgtggaggtctcccctttcacgtatgacgttttgaggttttgttgcctattgttcccatctgttttttatcttccagaaacttctcatggtctggtctatttgtggcatccctgctagcttccagtattgctgtggatttctccttagtgttaccatttgtgtgctcaacttcatggcagaccttttctttttttttaagtcattactttaatcacccaaaattacatattaatgatattttttcctcatgagattccatgtaatttcttttaacatggagggttgcatcttcatggcacttactaagttgaatgatttttgaattattcagttaattatgttatctttttttcaattgtcatatattatccttacccctatgcatctcaaacatcatatattaattatccttatttcctgtgctcaaaggaaatagcagggctgtttacctatactaatttattggctacttttttaagtcttaaaaataatttcatcccaagcctagaattaggaaagtaaaatatggtttgtgttgtttttgtgtttttaatgtctggcatttggaataggagaaagctgggtttaaattctagctcttccatttgattgtggttactttgggcaaataactttattcccattttgcatatgagattatttgagtacaaagcttttagagtgtgagaattaaataagataaagaatgtaaactaccagacacatagtaggtgctctgcaaataactattgttaataaactatagaagaactgtgagattccaaacatttcatattgaacagttaaatatgtgtatcttcttttggcctcccagtaaggaaaggaaaaagctgccagtctcttgggggccaagacttaagagaacatgtattctttttttctttctctttagtgactgaaatagagaaattatataaacaaatgctggggaacagctctggtaccagtggccatttgccacaagctcttcaagctggactttctctgccataaaaggcttgggaccaagatctagaatagtcagatatttttaaagggacaaaggttattttttaacttctttcagcctagggaacttgttgttttcccagattgctcctctacctatctgaaaaagaatctcaaaaggaatggtttccttctacttgtcacagcctactagagtcatgggccaagtctgatcttgcaaatggtgccattactttagcaatgtggcacaacatgcagaattcagaagaaagttgtagaaattgaatgttggtaacatatactgattgatcatttaacagaagagtaaaaagagtgtcttaactacatattttgtatttatacagaagatgataaagagccagaactttagattagataagaaatgaccagtaacaaaagacatactagtagaatgtatatgaagaataaactaaagagtcagctttgttggaaatctggaatgattcctgaaagcaagaaatggatgtacatgatctttaagatattattttctatatcctgtttattagacaaaataattatccagtcacaaggccttaagacacacctgttttttaatgtattttgaatcttgattgaaatttcttaattcccttcttggtactccctcttagattgctacctgttctgatgacaatacactaaaaatctggcgcttgaatagaggcttagaggagaaaccaggaggtgataaactttccacggtgggttgggcctctcagaagaaaaaagagtcaagacctggcctaggtaaggatatcatatactttccaagttttttatggtttgactagtttagtccgacagtacagagtaataagctagatttgatcttgctttggtatgtttttaaagaaaagcactatcttcttgccattcattctttttgataagtatttccgaagcactactatgtttatcatttacacaaggtactacagtggtggatttattcaacaaatatttcttgaacacccagtatgtgctgggccctgttcttagttgctagggattcagcaatgaacaaaagaataaaaaatcctgaagatgtaaatagagctaacatattagtgtgagaggcaataaacaagataaaaaagtaaaatatatactgtgtcaaataacaataagggcttaggaataaaggaaataggaaagggagaagggcaagggtgaaatatgctatcaaaattttatattaggtgaccaggggggcctcaatgaaaagatggcatttgagtaaagaaagtgaagtagtaagccatatagatattttaaagaagaatattccaggcagataaaagtacacaggccctaaagcaggagcatgcttggcatattttctcttcctcagagaggctagcatggctggcccctagggctgcagcaggcaaaggaaagggagggaatagtagtagaaaatgaaattctgtgagactttggcttttattttgatagacaaaagtccaccagagggtttggagcagaagagtatcataatttgacttttaacttgatcattcttgctcctgtgttgaggataaattgtaagggggtcagggtaaaagcaaaaagctacttttaaaaagccattgagataatccaggaagtgatgatggtgacttagaccagagtagtagcagaagctatggtgagaagtcatccaattttggatatatttacaagacagagccaacagaatatgttgagggatcagatgtggggctatatgggagagttatcaaggataacttcagagattttgcttaagaagctgaaaagatggagtgtcattaacctagataaatatccctgcaggaagagcaagtttgggagggaacagctggagttccatttggacatgttgtttgatatgattattaaacacccaaatggacatgtcagggaggcatttagatgtttaattctgcagttcagggttgaagttgcagatgtgaggttcattatcacacagggtgaagatagctatagatagaaaaaaataggcctggtgtcttggggtaccccgatgtttagaggttgaggaggtgacaaataccattaaagcctactgagcagccacaaccagagaagtaagagaaaaactgggagagtgttacatcctggaagccaagtaaataagaggagagagggatgaacttgatttgatgtttctggtataccaaataaggtgaggcctaaaaactgaccaatggattaggcaatcataggggttatttggtgaccttaatgagtgttgttttggtggtatgatggtggcctgattggtgtcattcatgtatatgacttggggactacaagtatagacagttctttcaaggagttttgttataaaggaaagaagagaagtgaagtggtagctggagaaagaagcagggttgaagtttgctggggtttttttaaataggaatataacatttcacagtgattggcaggatcgtatagagagggggagattgatgcaggggaatttgctggagcaatgttaagcatgaggggatactatctgatacacagtaggagggtaggcctttgccaggaacatggatagttgacccatagtaattggagaaaaggtggaatatataagcatggtgcaggtaggctactgagagatggtggggagagaggtggagagatgagatggccataacttacagaagcttccttctgttctgatgttaaaacatgaatcagggttattaactgcgaatgaggataagggagaaagggagtagagattttagaagagataagaaagtctgaaattgtcactgagagaatagaggaataaatggacaggaaaatatgattgttgggcttcaagagtcaacttgaggctagcaataattaattgaaagtgagcactccacatggttgtgtgtttgctatgcaagtacaagtatactataggtagagagctagatttaaccagggatgtggtttagcaatgcaagtgaagaaggaagttgacagtggatgcaaagaggatgattatgactataagatataaccttggtaaggaggcatattagtccattttcacactgctgataaagacatgtacaagacttggcaatttacaaaagaaagaggtttaatgacttacagttccacatgactggaaaggcctcacaatcatggcagaaggcaaggaggagcaagtcacattttacatggatggcggcaggcaaagagagagattgggcagagaaactcccccttataatattgtcagatctcatgagacttatttgctgtcacgagaacagcatgggaaagacctgcccccattattcaattacctcccaccaggtccctcccacaacacatgggaattcaagatgagattcaggtggggacacagccaaaccatatcaggagggaagtaaggacataatggggccaagggatagtgtaaatgtggtactagcagtggattgaggataaaagattgttggaattgaaatactaaagggagatgggaaaataagtggtgatgagtgggatgattgaaattaagataatggaagatttccaggtattggtaataataaggtaaagaataagtggcttaggagagtgaaaggacaagattatagaagaaggaggtcaaaaaactgagaaaccaaggtattggaaagatcatgtacatagattttttaatcaccataaattgacagataatgttgaagagagtaacaatgaaccaagagcaaaaatcttcaagcaatgagccacccacagtgtggatcctcagggtatcattagatgtgctgtatacttgtacttacatggtaaacacacaaccttgtggaatgctcactttcaattaattactgctagcctcaagttgactcttactggccaacaatcatatttccctgtccatttactcttatattctctcagtgactgtttcaaactgtcttatctttaagcttgagttttaagcttaaagattcattttacttcagccatcaaggcctaaggttaatggggaattgaaggtgagaaagggaaaatatacaggttcatttttctaaggacttatttagttgcttataagatgcagaactagacttcagaggagtcttttgctctaagtctggtttctgtagtctttgatggtgctgccttatttgtttttgctctttgctttttttaatttctttttttcttttctttttttttttttgagacaaagtctcactcttgtcgctgagcctggagtgcagtggcatgatctcagctcacttattcaagcaattctcctgcctcagcctcctgagtagctggaattacaggcgtgtgccaccatgcccagctaatttttgtatttttagtagagatggggtttcaccatgttggtcaggctggtctcgaactcctgacctcaggtgatccacccgcctcagcctcccaaagtgctgggattacaggcgtgagccaccgtgcccagccctaaaaattttttttcattaatttagtattacagtttaataagtcagctagttctacaacagtgaataagataaatagcagtccacagaccctctgcctcatagtttccctttcccagaggcaacctctttcaaatccttttgctgattctttgatatgtatgtctagacctctaaatagttttgtgcatttctatttattttctgcaattttcagctttattaacttctttcctttgtaacatgaggatttaactccctttcctgtgtcccaccactatcaaaccttcatactcctcatcctcctaacacagggtcatgattttggttaaatcaagatacagctcagttccttttagtatgcagttgtccctcaggatccatgggggattggatccaggaacccccaacagataccaaagtccacagaagctcagattcattatctatgatgtagtatttgcctataacctatgtacattttcccatatacttttatcatctctagattacttaaaatacctggtacagtataaatggtatattaatagttgttgtactatatcatttagggaataatgacaggaaagaaaagtctgcacatgtttagtacagacacaaccatcttttttcgtgtttttgttttaatattttcaatttgtagtcaactgaatgcatggctgtggaacccagtatacagaactcaagatatagagagtcaactatatttagagttatgtagtcattaatacaatctaattctagaatatcttcaacacctaaaatgagggttccaatttctcttatgttcttgtcaacatttgttattgtccatctttttcattatacccatcctagcaggtgtgaattagtgtcccattgtggttttgatttatattttcctgatggccagtgatgctgaacatcttttcatgtgcttattggccatttatatattttccttggtgaaatgtctatgcagatcttctgcccatattctaattgggttatttgtctttttattgttgagttgtaagcattctttatatattctggacataagtcccttatcatgtaatgatttgcaatgatttattctgtgggttgtgtttttactttcttgatggtgtctcttgacacatgtaactttataattttgatgaagttcagtttatctgttttttcctttgtcacttatgcttttgatgttaaatcaaagaaactattgcctcttctgaggtaacaaggatttactccaatgctttcttctagttttttagtttaggcctgtgattcgttttgagtttatttttgtgttatggtgtgagttaggcattcaaattttttacatatggatatttaactttctcaccatcacttgttaaagagactattctttagcccattgaatcgtcatggcacccttggtaaaaatctgccaaaaatcaattgaccataaatgtgagggtttatttctgacttctcaattccattgatctatgtatctgtccttattatggttctgcattgtcttcattactgtagctttgtagtaggttttgaaatcctacttctgttttcttcttttatttcaagattgtctcgactgttctgggtctcttttatacaaattttagtttcagcttgtcattgtttgcaaaatagccagctaggattttgataggaattgcagtgactgtgtagatcagttatggaagtattgacatcgtaataatgttaaatcttctggtccatgaacttggatgtctttctattgcctgtcgttatatgtacttttctctctctcattttagaaaatataaaagaaaagaatcatatgaggccattagagaatactgattttaaaaaaaagtcatcagtattccctccactttgacataattttaaatgacatttccagttattttttgaggtttttcccttatacatagagattctttttaacagaaccatagttgtactgaatacgcatttgatttctctcaagccatcctaccacttcagcctcccaatagctgggactacaggcatgcaccaccacgcctggataatttttgtattttttgtagagatggggtttcgccatgttgcccaggctgggctcaactatgagctcaagcaatccacccacctcagtctcccaaagtgctgggattacaggcatgagccactgcacccagccttaagtactttctatgttatcttttttgcaacactatttcaaatactacacttgagtaaatgttccataatttacctagctattctactgtagtttaaacatttgtttcaaatattttaaaacttggggttttttcctccctgaatttagggtcccccttcccattaaaataagattcccaaaggtggaattcttgtgttaatgactataccatttcttaaaatttgtgatgaaaagtatcttgcttttaactatgtacttttagtgtgccattaattatccttagtattagaagccaagtcaccaaaaaagttacatattgaccaaatgtgagttgtaataataacaacgtttagccactattgactcctagcataattattctaaggacctacttggattatctcatttaattatgaaaacaactgaaactgaaggtcaaggaagttagacttgcttaaaatctcatagctatgaagttgtagaaccagagtctataattgaacccttgcagtctgattctagaacacatgctcagaaccactctgcagcactgccttctttagaacctaacagagcaggctgggtgcggtggctcacgcctgtaatcccagcactttgggaggccgagtgggtggatcacgaggtcaggagatcgagaccatcctggctaacatggtgaaaccccgtctctactaaaaatacaaaaaaaattagccgggcatggtggcacacgcctgtagtcccagctactcgggaggctgaggcaggagaatggcgtgaacccgggaggcggagcttgcagtgagtggagatcacgccactgcactccagcctgagcgacagatcaaaactctgtctcaaaaaaaaaaaagaacctagcagagcaaggcaaaagttcaggttaagatcagagtaagagttatgcctagattactccatttctgggtgatgctagggttactctgaagagcactacgaagcaacaacctgacacgggttttcaaaggctggcacactgaccattcgactctctaagccagcttccagccacagatttgctgcttctaatcacattgccatcttgaaaatcatgttcccctgctttcccaagcttctaattgccacgccaacctttcattgctgtcctgggctgcttatcttcacttctggccctggcttgtaaaccccctcagttaacacattaattggaagggtttaagtgctaagacatagcctctttttctcctgccctacttttcccagccggcacctgcttcattgcttaccactctttccctatgttttagccagagatctcatagcactgttgaaaccaatagtcctcaatcttggctatgcatcatagctacttggggagcttttcaagtccgtgtatccccagtgattgattcaatgggactggacctgtatttttacaaagctccaaggaggtctgttatgtagcgaggattgagaacctctggtttaggcattattgagtgataaagttgattatccttatcctaaagagaaggaaaccctacctattctgcctcagttgcttgctgcagtctcacaagtcagcaggataattatagagtcaattttctgatccctagaacctcacctgtatccttgtcagcagtaatgaaacttaacgaacattgtttaataattccttactacgcactataggggcactgggcctaaagatgagtaaaccattattagctgccctcgaggctcacagtctagtctaggaggcagattcaaaaactatagcacacagccattagctgtgtaaacaaggggctctgagaacctacttcccctgtgagaggagagctctgtgggagaagaggaaagaagttgtgaattcttcacagtggagttaacattgtcatcagagccttgaaacatgagaagaatttctgcctggcaaaggaggagctgacttggcaagaaaaccacatgaacaaagaaatgtgacagtacacagcttgttcaggaagcaactagtagtgtcctgtaacgtgatcctagaatagcaaagtacatgataagactgaaaaggcaggctgaggccagatggcaaactcatatagaaagaagctggctgggcacggtggctcacgcctgtaatcccaatactttgggaggccgaggcaggcgcatcacctgaggtcaggagttcgggactagtcttgccaacatggcaaaaccccatctctactaaaaatacaaaattagctaggcatggtggcacacgcctgtaatcccagctactcgggaggctgaggcaggagaattgtttgaatccaggaggcaaaggttgcagtgagccgagatcatgccactgcactccagcctgggcgacaagacaagactccgtctcaaaaaacaaagaaagaagctgcaaactgttagtagactccgtataattcttcgaaggaactgactttaggaagcatttagggcaataactcagtctatgctaccatgtcatcaaatctcatatattgcttaaggtcaataaggagttagtccacttaagtagatgaagtactaaagaaaatggcatgccatatttaaatgtgtaggcccatataatggcatgctatgcacctgttaaaaataatgcaatgcatctatgtgtacttacatgaagagacgtaaaaataaaagagcaaatggcagaacatgtacagatatatatatagtataatccatttgtattttggggttttttaaggtctgatacatatatacctttgtatgtgctaaataggcacagagaaaattgcggaatgcacaagaatgtaaaagtgaaatgaaaaagttgaaaagaggatcctgtttccaccctcttcccctctgtactggttgaatttttttaccattaactttcatactgttataatgtagttactgtttaaaaaacatatacacacacttaaatttgacccagcatttgctaaccttcaaagctaacaaaatttctttgacccccatggaccacttcctctttcaccatgacatcctgaaggaagaggaaatgccccaactttccaacacatcaatttcataccagccttatcagtaaatactccagtgtgtgccatgcaagtttcagaaacctagatacctggtttgtccctgtcccagctcttccttcttccccaatcctgccttgttaatcggcatattataggactcataaaattttaggactttctgccctaaatgtacactttgacccacttaaatggaacagatgactgtggcagctgtgcagtgactattaacctgcaccgaggagtgcagcaaatgaaaacttccttttctgctgaaaaaaatagctgttatcaagctctagagcgttagtgtgagaaccataaccagaggtttcatgaataggtccctgttactaagtccttttcatggcatcttatgacaaaatggggtttttcagtaattatccttattaaaagagcagtatcattttggctggttctaaacatatggttgatgagaaaagtttaggcaaaagtcaatttgtagaatttctctctctcaaggcaagactgctttaggagtgaaaaacacagggtaaaaaaaggacaggataattaactgactaaagtgagtacttgccaatctttatttatgctaaaagagagattgcatttttatatcagcccatcctaaattcagctggatataaatgcaattaggtaattaaactgaattaaaaattatagttaacaattcaaaggctttgtgactgagaaataaataaatacccttgttatttgaagacaggaatgctatttcagcaatctagaaagctcagaaggaaattgagaaagtgttgtctgtggtagggcccgagagggaagaagcatgaagttcataaaaatttgcctgaagtacttgccattgtatgtaaacaaagggacaggtacacatacagaagtcctatttactaagtttgatttgatttacagagagcaagcactgagattctgaatgttttttgccttgtggaaaatagtagtcatttgtaaaataaagtgggaagccatgtgaggcctgataaccttaacaaataattgattgaatggcttcttgtgaaaagaaaaactatctcctttaacagatatagaatctgagtccaaagagataaagggttatgcccaagtcacatagtaagtgattgtgccaggttttagatctgtgcattcctgtttgagagcccctgtgcagtgcctttctgccctagcattgctcaacagtttatataagaatgctaatggcagcgttaaatgtgttgtagaatacctataccttagaatacattgtagctattaaaaatgataaatctgtattaatgtgggaaatgttcacaatatattaagaagcaggttattcctaattttaaaatggacaaagggcctgaatagacatttctcaaaagaagacatacaaatgcccaacaggtatatgaaaaactgctcagcatcaccaatcatcagggaaatgtaaatcaaaaccacaatgagatatcccctcacacctgttaggatagcttttatcaaaaagacaaaatgtaacaagtattggtaaggatgtggagaaaagggaacccttgtacactggtgggaatgtaaattagtatagccattaaggaaaacagaatggcagtttctcaaaaaattgaaaatagaactaccatatgatccagcaatttcacttttgggtatatatcaaaaaaagtgatcgcagtatgtggaagcgatacctgcactccaatgttcactgcagcactattcacgatagccaagatatggaatcacctaagtattcatcagataaagacaatatgatgtatatacacaatggactactattcagccttgaaaaagaagaaagttaatgtcatttgcaacaacagggatgaacctgaaagacattatgctaggagaaataagccagacagagaaagacaaatactgcatgatctcacttgtggaatcttaaaaagttgaactcataggagcagagagtagaataacgtactatgtacttgaaaattgctgagtagattttaaatgttcttaccacaaaaatatatgaagtgatgttagttggcttgatttaatcattctacaatgtatgcatgtatcaaaacatcacattatagcctatatacacaataaaaataaatttgcttgagataaaatattacgaaatagtatatatatagtgatctctccttttttaaaaaatttcaatagttttgggggaaccagtgatgtttgattacatggataggtactttagtggtgatttctgaaatttggtgcacccatcacccaagtggtgtacactgtaaccaatgtgtagtcttttatcccttacctccctcccaccttgagtccccaaagtccattgtatcattcttatgcctttgcgtcctcatagcttagctcccacttataagtgagaacatacgatgtttggttccattcttgagctacttcacttagaataatggtctccaggccaggcgcagtggctcatgcctgtaatcctagcactttgggaggccaaggcaggtggatcacctgaggtcaggaattcaagaccagcctggccaacatagtaaaacccccctctactaaaaatacaaaacttaggtgtggtggtgcatgcctgtagtcccagctacttgggaggctgagtcaggagaattgcttgaacctgggagatggaggttgaggttgtagcaagccaagatcgtgccactgcactccagcctgggtgacagagcgagactccgtctaaaaaaaaaaaaagataatggtctccaactccatcctggttcctgcaaatgccattatttcaattccattttatggctaagtagtattccctggtatatatatacaccacgttttctttatccacttgttgattgaagggcatttgggctggttccacatttttgcagttgcaaattatgttgctataaacatgcatgggcaagtgtttttttcatataataactttttttcctctgggtagatacccagtagtgggattgctggatcaaatggtagatctacttttagttctttacagaatctctgtactgttttccatagtggttgtactagtttacattcccaccagcagtgtaaaagtgttccctttccaccacatccaccccaatgatggccattcttgcaggagtaaggtggtattgcattgtggtttttatttacatttccctgattattagtgatgttgagcattttttcataagtttgatggccctgtgtatatcttttttttgagaattgtctattcatgtccttagcccactttttgatgggattatttggttttttttccttgctgattttaaaactggaaaagttcccttgtcccccttgcagggcgtgcgatgagggtgtggcttccttcttcaatgccccggtgctcagacctctacgggagcatacagatgggcaggctgtagggctccgaccccacagcagtgtctgggggtgaatgtttatagctcctgaagccccagtgggcgtgtgttacagtgtgctcttttagttttgctgtctataggcggcttgtgttaaccagctctattagacccctgccttatcgcaaggacagagggctttctgtatcccggggttcttgccttggtgtaccagaagactcggatcacatgtgggcttggagaatttgagtgcaaggttccactgagcagaagtagctttccgcggatgggggagccagaagggaaatggctttcccctggagttgggcccttggcggccccagttctcctccgactgccccgaccaaactgcatcattccaccggttgatgccctgctggcctgccggcctgcctatgcctgtcagtgtgctcttctgccagcgtgcttctcaacgtctgcttgacgaccagccacttgtgtctttctctgcccatgtgttcctcacaacatccagccaccatgtgttcctgctagggtcttgggggtttttataggcacaggatgggggcgtggcaggccaaggtggtcttgggaaatgcaacatttgggcaggaaatgcctgtcctcacctaggtctgtggggatggagccctagccagggatcacaccttcttctgcccaacacttcccttcccccattccgtatcatttaaagggaccatgctcttcccttcccagcactcccgtatcaatttttttgagttccttgtagattctggataatagtcctttgttggttgcatagattgtgaagactttctcccactctgtgggttctttgtttactttgctgattatttcttttgctgtgcagaagctttttcgtttaattaagtcccatctatttatctttgtttttcttgcatttgcttttgggttctttgtcatgaactctttgcctaggccatgtctagatgagtttttcccatgttatcttctagagtttttatggtttcaggtcttagatgtaagtctttggtccatctggagttgatttttgtataaggtgagagatgaggatccagtttcattctcctacatgaggcttgccagttatcccagcaccatgtgttgaatagggtgtcctttccccacctcatgtttttgtttgctttgttgaagattatttgtctgtaagctatttagttttatttctgggttctctgttctattgcattggtctatgtgcctatttttatacgagtaccgtgctatttgagtgactatagccttgtagtgtagtttgaagtcaggtaatgtgatgcctgcagatttgttctttttgcttagtcttgctttggctatgtgggctgttttttggttccatatgacttttcagattgttttttctagttctgtgaagaacgatgatggtattttgatgggaattgcattgaatttgtagattgcttttagcagtatagttattttcacagcattgattctacccatccttgagcgtaggttgtgtttttccatttgtttgtgtcatctgatttcttttagcagtgttttgtagttttccttgtagaggtcttttacttccttagttaggtatattcctaggttttgcagctattgtaaaaggggttgagttgttgatttgatttgcagcttgtttgctgttgctgtatagcagtactactgatttatgtacattgattttgtatcctgaaacctaacagaattcatttatcagatctaggagctttttggatgagtttttagggttttctaggtatacaatcatatcatttactaacagtgacaggttgacttcctctttaccaatttggatgccttttaatttctcttttctgactgactgtggctggctagggcttccactactatgttgaatagaagtggtgaaagtgggcatccttgtctttttccagttctcatggggaatgctttcaacttttccccgttcagtataacgttggctgtgggtttgtcatggatggcttttattaccttcaagtatgttccttctatgctgattttgctgagtgttttcatcataaagggatgctggattttgtcagatgttttttctgcttctattgaagtgatcatgtgttttcgtttgtttttctcttagagtttcgctcttgttgcccaggctggggtgcagtggtaccatctcagctcactgcaacctccaccacccaggttcaagggattctcctgcctcagcctcccaagtagctgagataccacatctggctaatttttgtatttttagatggggtttcaccatgttggccaggctggtctcaaactcctgacctcaagtgatctgccctcctcggcctcccaaagtgctgggattacaggcatgagccaccgcacccggcctgatttttgtttttaattctgtttatatggtgtatcacatgtattgacttgtgtatattaaactttccctgcatccctggtttgaaatccatttgatcatggtagattatctttttgatatactgttggatttggttagctagtattttgttgaggatttttgcatctatgttcatcagggatattggtctgtagttttcttttttgtcatgtcctttcctggttttggtattagagtgatactggcttcataggatgatttagggagtattccctctttctcttttggaatggtttcagtaagattggtaccagttcttctttgaatgtctgatagaattcagcagtgaatccatctggtcctggactttttcttcttggcaatttttttattaccatttcaatctaagtgcttgttattggtctgttcagagttcttatttcttcctggtttaatctaggagggttgtatatttccaggaatttatccatctcctctaggttttctagtttgtgagcacaaatgtgttcatagtagccttgaatgatcttttgtatttctgtggtattcgttgttaatatttcctgtttcatttctaattgaacttatttggatcttctctcttcttttcttggttaatctcactaatgggctatcaattttgtttatcttttcaaagaaccagctttttgtttcatttatcttttgtattgttgttgttgtttcatttttattaagttctactctggtctttgttatatctttcctcctcctgggtttgggtttggtttgttcttatttctctagttcttgaggtgtgaccttagattgtcaatttgtgctctttcagactttttgatgtaggcacttaatgctgtgaactttcctcttagcactgcttttgctgtatcttagaggttttgttaggttgtgtcacttttttcattcagttcaaagaatttttttaatttccagcttgattttgatttcattattgacccaaagatcattcaggagcggattatttaatgttgcatggttctaagaattccctttggagttgacttccaattttattccactatggtctgagagagtacttgatataattttgattttcttaaatttattgagacttgttttgtggcctatcatatggtctctatcttggagaatgttccatgaatgttctgatgaatagaatgtatattctgcagttgttgggtagaatattctgtaaatacctgttaagtccatttgttctagggtataagtccattgtttctatgttgacttactgtattgaagtcccccactatgagatgagattctatttttgtgtatttcaaggttttgctctaagatttagaactccttttagcagtttttgtaaactatgctggcttggtagtggcaaattctctcagcgtttgaaaaagactttcatcttttcttcatttatgaagcttagtttcactggatacaaaattcttggctgataattattttgtcagctaataattatttaataaggctaaagataagacctttatcccctctagcttgtagagtatctgctgttaatctgataggtttttcctttacaggttacctgatgcttttgcctcccagctcttaagattttttccttcatcttgactttagatagcctgatgactgtgtgtctaggtgatgatctttttgtgatgaatttcctgggtgttctttgagcttcttgtatttggatgtctagatctcgagcaaggccagagaagtttttattcttttgcctttgtctttgttgaattgggttaattcaagagccttgtctttgagctccaaaattctttcttctacttgtttggttctattgttaaaactttccagtgtattttgcatttctctaaatgtgtctttcatttccagaagtcatgattgttttttatttatgatatctatttctctggagatttttttcgtctacatcctgttttgttttatttttaaatttaagttggttttcatctttctctggtgcttccttgagtagcttaataattgaccttctaaattcttttctggcaattcaaagatttattattggtttggatccattgctggtaagctagtataatcttttaggggtggttatagaaccttgttttgtcatattacctgaattgtttttctggttccttctcgtttgggtggactatgtcagaagaaagatctgggactcaatgtgtgctgtttaaattcttttgtcccacagagtgatcccttggtgtggtgctctcccccttccctaggggtggggctttctgagagctggactgcagtgattgttattgctcttctgggtcgagccacccagcagagctactgggttctaggctggtactggagagtgtctgctaagagtcctgtgatgtgatctgtcttcaggtctgtatgccatggatactagcacctgctctaatggaggtggtaggaaaggagtgaagtggactgtgtgagagtacttggttgtagttttatttagtgtactggttgtcttgaatgctagttatactagcactgaagttattacatggacagactcaggacctctggttggccaagatgttacaggcagtagaattagctgttattttctgctttcttggagcagggttgttctgttgaattgctgtaatggcttgaattggttggcctccagccaggaggtggcactttcaagagagtatcaactgcagtagtatagcgggggatataagcttgccttacggtttcctggataggttttcgggcttctcaggcaatgagcagggccccacgagtttttgtcttttgtttacggctaccagggcggttagagaaagaccatctggtgggggcagggatagtgtgtctgagctcagactccttgggcagggcttgctgtggcctctgggcgatgggagtggtggttaacaggccaatggagttacgttctaagggagattatggctgcctctgctgcttcatacacatcaccagggaaataggggaaagccggcagtgacagaccacagccagcaaggccagtctcactcctgcagtgcttccccaacagccaacagaaccaaatttatatccatgcctccagtgcacagggtggagatcttgccctagactacaaaactccccgccgagaaagcaagcagggctgttaggccttgtccatctgcctgccacagcttctgtgctcatatctgcacttcctatttgtcccatccccctgcagattctgcccaggaaaattcacgctcagttgaaatcattacaaagttcagctgaaagtctccttctccctatggtccttccccaattccattggctgccctctccaaagacccctgtgagatagtcagaaatggtttccctggggaccaggagtgcctacagggctcttcctgctgctgcttctacttttatattttgtttggctctctaaattcatttcagttctccttctcccatgatctggatcctcagtgaggatgtgtgcagaagtggactttacccctctcacactgttttttgtttgtttgtttgtttgtttgtttgttttgaaacggagtctcgctgtcaggcaggctggagtgcagtgcatgcgatcttggctcactgcaacttccacctcccaggttcaagcaactcttctgcctcagcctcctgagtagctgggactacaggtgcacaccaccatgcctggctaatttttgtatttttagtagagacagggtttcaccatgttggccaggctagtcttgaactcctgacctcaagtgatccacccacctcggcctcccatagtgctgggattacaggcatgagccaccacacccagccaccctctcacactttggaccttgagagcttgtttggaggttctagcaggggagcacatttactcgtatacccttgactgaagaccgattctcctcttatcaggaatggttgtcctcttcgaccaagcacacagcttcgggagccctctcacactttgggcactcaatttttctgctgtcttgtggattttgcagcagcaagccacttctttcaaaggatctgttaattcttttgttttttctggtatgttcctgcgatagttcttggagccaaagttcactatgtgagtctccacatgctgttctgtctgtctgagtggcaaattagtcctgcctcctatctgccactttccccttaaatcagtctcatttttgtaaagaaaaaagttgagatgtatagtatgtatcacatgcacaaatatagaaagtatgctaaacatggtttacgtaagtgctttaaattttttctctttatgtttttcggtattttgtcgatttttacaagtatatattttataatgggatagttgggaggttggtgacttggaaaagagaaaggaaaatgataaaagggtgtggttggaatcaagtgatgtatacctacttactggcaaattgacccttagatgattaggttagctatgatttttcttgatgagaatttagggactttgtatggctttcacttctgatcttcatgatcctctcctctttttcagtaacagtaacgagtagccagagtactcctgccaaagcccccagggtaaagtgcaatccatccaattcttccccgtcatccgcagcttgtgccccaagctgtgctggagacctccctcttccttcaaatactcctacgttctctattaaaacctctcctgccaaggcccggtctcccatcaacagaagaggctctgtctcctccgtctctcccaagccaccttcatctttcaagatgtcgattagaaactgggtgacccgaacaccttcctcatcaccacccatcactccacctgcttcggagaccaagatcatgtctccgagaaaagcccttattcctgtgagccagaagtcatcccaagcagaggcttgctctgagtctagaaatagagtaaagaggaggctagactcaagctgtctggagagtgtgaaacaaaagtgtgtgaagagttgtaactgtgtgactgagcttgatggccaagttgaaaatcttcatttggatctgtgctgccttgctggtaaccaggaagaccttagtaaggactctctaggtcctaccaaatcaagcaaaattgaaggagctggtaccagtatctcagagcctccgtctcctatcagtccgtatgcttcagaaagctgtggaacgctacctcttcctttgagaccttgtggagaagggtctgaaatggtaggcaaagagaatagttccccagagaataaaaactggttgttggccatggcagccaaacggaaggctgagaatccatctccacgaagtccgtcatcccagacacccaattccaggagacagagcggaaagaaattgccaagcccggtaagtcagcagtggtgggaagatacatttcctaacttaaaaggggccagacacccagatgtctcaagtcaggatgcttttttttttttttaaagaaagaaatctatttattcctagtgctgccaaattcagcacataaatacaaaacaaattttgcatgggccatatttttagtaaaaatgttttatgctaagaaactatttttgtttgtctgaaattcaaatgtaactgaatgtgctgtattttatctggcaactctacttactcccattaaaatccctcctgtcagggtccatactcctcagccctgttgcctgattgaccaaagccttcatcatgctccaggatatcaattcaaaaatatctcccctctcctgttagacagtatgccatcctctttttatagataaagctgttgttcatgggaaagttgccaacatccataagtagatttccagtttgtaattccattttgtgattatttaaaatacagtgaaacttagatacttacaaaacaatttgagtgcaaaatctttctagatttttatgacttctccacaatcttttataatcattttgccacaccacagtaatacttttgacacctatatctattctttttaacattcagtgtagtgtcacttatctttttaggactcatttcattgactgacttaatatttaaattagataatatcagtcatcagtgattgatggcagaaataggtttgtgaaccttgaaaaacaagattcattacagtggtggaggcagaagtagctgagtgcattgggtgagctatgggcaccagtcagagagaataaaaagcttctgttgtttgcatgtgaaggggagatgggttaaggaagtttccactgtacttcacagtagctcttgtggtggcgggatgattgaaatagaatccagaatcatgatcagcatcatctgccattttaaagggcagaagctagataaccaaccttaggccagttttagtttaaaaagtgttcataaccccgacctgctctcatgaagacctatcccataattttagaaaaataaactgatagattttaaagacaacttagtacacaaactgcaatcaagaccttgctgtagaaagtggagaaaaaagacagttataaggaatctttccttctctcaaaattatgactgctctttatccctagccaaaatttctattttttttttcaagggagctggtctcagctatgtgttagcagaaaagtagtttcaatgaaaaactattttcactgatacataaatcttaaaatctttaaaaagtagaaacagtgtgctggtcttgtaatttatttgaagctaacatttcttaaaaattttttacctttatatgatgataatgtcaaccttcagaagagagtaacatcttccatttgaatacctatcttgtttataaattgggggggctgatttattcatttatttcaaaaaggatagtaattgtaacttatttgtttcttattaggagacttagctagtaaatgttttctattcacataagaagtctatgccttctttccctacatatcatctgttaagtttttactatagtcagtacaaatcagccaaaagagacattgccattgaaagtatttggagctgaaagcaggctaaacaatgaaatttctggcagcctaatttaaggtatgccttagtaataacttagtaacagttgaacttcaaggaaatctctgaaatctaaactttcttcttctaggtcaccatcacgcccagctccatgaggaaaatctgcacatacttccatagaaagtcccaggaggacttctgtggtcctgaacactcaacagaattatagattctaatctgagtgagttactgagctttggtccactaaaacaagctgagctttggtccactaaaacaagatgaaaaatacaagagtgactctataactctggtctttaagaaagctgccttttcatttttagacaaaatcttttcaacgctgaaatgtacctaatctggttctactaccataatgtatatgcagcttcccgaggatgaatgctgtgtttaaatttcataaagtaaatttgtcactctagcattttgaatgaatagtcttcactttttaaattattcatcttctctataataatgacatcccagttcatggaggcaaaaaacaagtttcttgttatcctgaaactttctatgctcagtggaaagtatctgccagccacagcatgaggcctgtgaaggctgactgagaaatcctctgctgaagacccctggttctgttctgcctccaacatgtataattttatttgaaatacataatcttttcactatgcttttgtggggttttttttaagtatgtgtaaaaatgtgatgctcagataagtacatttatatcagttcagtgttaaaatgcagtctcttgagttaaagtcatctttattttaaatgcagtgataaatgtcaactcttcggagaaactaggagaacaacaacagaaagctgtgtttgtcttttttctctcaaatatatctcccgtatgagatttcaggtccccatgttttcaccaagcaatctgctatgtcagccaacccaacatcactttctacaggaggttatgatttttgccatttactagaggaagatgttttatgaaatcaatttggggtttgaattcaggtgcagtcatcagttctttaggggctgcaatgttttaaaaaaaataagtcatcagattttaagaaaaaagtgatgatttcttattgatatttttgtaacagaatatagctcttaactgaaaatccagaaccagaaacataaatcttgagtttcttttcatgtacataaaaagcaatagccttttagtatagatagccctgagccaaaaagtaatagaattttctctagatatttaatacagagagtgtatagactgactctaagttaataatgtgcaaaatatcttaaacatccctccccttattcaacaattatgtatcagtgatcttgaaccattgttttatatttttcacctttgtaacctcatggaaagaggctttacatactttctatgtactatttacttagaagggagcccccttccagtcatgaaacttcatttgttttatccatatccctgaggactgtgtagactttatgtcagtttttgtcattatttgaaaatctattctgacaactttttaattcctttgatcttataagttaaagctgtaacaactgaaattgcatggatcaagtaagcatagttttatccagggagaaaaataaaaggaagccatagaattgctctggtcaaaaccaagcacaccatagccttaactgaatatttaggaaatctgcctaatctgcttatatttggtgtttgttttttgactgttgggctttgggaagatgttatttatgaccaatatctgccagtaacgctgtttatctcacttgctttgaaagccaatgggggaaaaaaatccatgaaaaaaaaaagattgataaagtagatgattttgtttgtatccctacccatctcctggcagccctactgagtgaaattgggatacatttggctgtcagaaattataccgagtctactgggtataacatgtctcacttggaaagctagtacttttaaatgggtgccaaaggtcaactgtaatgagataattatccctgcctgtgtccatgtcagactttgagctgatcctgaataataaagccttttaccttatctgatgtccttttctgagctttttgcattacctagaagcagtctacaaaaaagaactatagtagtcaagaatcccttctacttgttcattaaaatgtttattcccaaagttataatctatttcaagctgaaagagcttttaataaaaaacatcttgcttggatcagactttgagcatttaagatggcttggattacttgataaagcagggtggagtgatgtagttctttttctaaacaagtatttccagcacaaacttttccatttgaatacattccaagcactattgctaggatcccgtattagagtttgcttttggctgtttcaacacgggcccttaattaaattttgtgaggatgactgattagtgtcttcaaatgtctcttcatctggactgcacatttaactgatgttggatcaagaccatgtgtagctactcttgtgttgagggtcagcccattatccccatccccagccctaacagcttaaaacagctttaactcccatcttgaaattagcctatggccatgttcataacataggtagtgtgtgggttcaacaaatgctttttgagagcctgtcatagccaacacactactgctcttaagtctgtttttctgcttttcctagtccctagttccttttacattgctcttaaagcaaaggccaagtagtctaacagagaaaaataaattccacaactaagatagtgtgggcaacattttacaaatgtgtgtcagaagacagactgagtgaaaacattgtactagaaaaactgagttaatttcctccctatggcaattcaacacaagtggtttctgcttcataattccataaagggctaaatgtaggcccagttgagctcttgcattagatctcattgcttctcacacaggtcttcacagggaattctttgcctgccctaggtttggatcatgccacattaccaattaacccattactcataaaattctcagggattatggtaaaaaaattggattatgcatcagttctttagatattggttggaagttataggcaggctgaacacattttgttggacttgagttaagtttaatgctttgatgcctggaatacgaccccagcttgttataagttaaccattttgttccctaaagtggtagcaaaacctgttttatttctgagctgtgtttgagtgcaagctaaaaagtgtaggggttgttaagaaatgatataagataaattcagcctttaaaaaagaaatcacctgagcatattaagcagcttgtttatattggtatgcctgcagcaagcatatacatcacaaatgagagatattgtgttattaaagaataggcttacttgatccccaaagttcatcccttgctaagccaggaaagaggatttttagggtatgcaaccaggttcttcactttgaatgtaaaaggtttaatattccatttgtactccatttctctttaatttccttaacttgccacatgcccctttgttttgacattctgaatagtttatattcaagccattttgtgaaatatgaatagcacatttcaaaatgcctttgattggaaggcgtttaagtcagccaacatttacatatcacctgggtgccaagccctgtgtgtgaggcacctggtctgcaaagagttcctttctttattttcagttgccaaaggagtcactttaatacttcagtaggccagagtcagcatttgagagaaacagcaaagatcagatttcaagtcctttgagtaaagttgtttgtaatcagctattatgtagcaagtactgtctagaagcctacttttcctccaggaacttaattcagcagctgcttagaacttttaacttctcaaagtaaaatactttttggatacatgtttttattatattccttataaggttataaataatggttgaaaacatgatccctagtgccacactgtctagctttaaatccaagccctaactgtgtccgtggacaagttacttaacccttctgtgaatgagtttcctaccttaaaatggaattatgtggggccggacacagtggcttatgcctgtaatcccagcactttgggaggccgaggcgggcagatcacaaggtcaggcaattgagaccaccctggccaacatggtgaaaccccatctctactaaaaatacaaaaattagctgggcttggtggttcacgcctgtaatcccagccactcgggaggctgaggcaggagaatcgcttgaaccagggagtcaagtggttgcagtgagccgagattgtgccactgcactccagcctgatgacagagcgagactccgtctaaaaaaaaaaaaaaaaaaaaggatttttgtggttattacatgtaaagctcttaggacagtgcctggcacataatacctaatgttttattaaacagttgctgttagctgttaagtatggagggcaagagttattatctatattcgatacatggacataaaagttcagctcattcctgttccctttccactaacagctgcagtctgcaaaggtcttcacaaatcagaatcaactggtaattaaaaaaaaaacaacaaaagcatgaatgttgcctggacctcccagtcccagcacttttcaaaaggagcaagtaggtctgtggggaaaaatcaagtttgaaattcatgactttgtctcgccaggtacacatgaaaattacggagattatttcatatgtggcctgtagccactgttcaaagagaccataatcttcaaatctatatcctgaactcttaaacaaaccaaagcctttgctcacacaaagcccaccctcccatttcctgactgctgcccccagctctgctacattgtttaagatgtgatcacctttagagaggaagctgcagctgctggtctttagagccaagagccaactcgtacttgcttgttgggctattgtgctctcttgcttatgagcagacaaataaaataggtaaagttcaaaacaagccatgttgctgtctgttagtagtaggatacaaaagaagattcaaacatttcattgaagtataatgaagactctagattctttgctctcacttgatgagattcttccccaggctactctgtttttgatgccaataaaacttgtcattctcacatcagtgtgaaaataccagccctgaaagttagcttgatatttgggtgtataaatccaacattggggtttcagctgtcatctaagcattgaatttatgctgccactgatgctattagggaccctagtttccaatttacaggaacttaaggaatgtggtatgcttttattagaagctggtatctgctcctgcaaatagtcctgccaccttgtatccccttcatgggtttgtgccagttatcaattcaaatgaatatgttaagagctgggttgtttttttcttgataacaaccttgcttacttctgaagtcaaggtctaaaagtaattatacaaatcaaccctttatcaatctattaccacatgatatatgttactgaaacaaaactaagccatctggccttgctatgttgacatggagttagcaaatattgttataccacgtcacttgataatcattcaggatgactgttaatttctctttcacctttcccccatcttctgcaatatattcaaacacaattttccaagaattatttgaaaagaagcataaggaggatttattaaatgtaactgaaataacttattagtggttcaggaactgagaagttaaaatccagtgggcattgttgcctctataagaggcaacattcagcccaaccgttaatgtcaagttggaaatgctgcttcctcaaaagccgttttggatttagacagttttatatgggagtaagagactcagagtccaaaaatcaatgtcttcacaaagaggaagacaagttaaaacgaacattaagatcttgagcgtgattatgataaacacttcccaactccctaattaggtaatgaggtattggccttggagtgctgcacctgtaattaagtatctggctttggaaaactctcctaaaaccaagaagtgtaagtgacagagtctgaagttatacacggaaagcctgcaggataaggaaaattataatgattaggaatagtttctgttccagtcaactctcctgtacaataaattgcacaaagagaggatgctgtttagagcagcttgttaatttgagttatcctgttgtgtcctcttgccttcctgtttacgttgacagcatttctaagcccatttatattctccctttttatgtcattttggccactggactcatttgagtagtgcatgaagccaggattgtgggtttcattcctaaatgggccaattcatttcactgtgtattctgtggccacaggcagcatctcacatgcctgcgctagccagccactccacaaagaggagtggacagagtttagacttagtataaacactagatggaaactcatagtaggtatcctcactacacaacctgaaggcattctcaatgctgcctgtctttcctcttcctgcctgaagaccaaatgtataaacctcttataatcaaagttgtagattgtttcatttagtgcacactcctatacccacttgtaaccctataaatgggtataattattatccccatttttttttcagataaggaaactaaaacacaagttaaataacttgcccaaggatatgtagcaagtggcagcttgtggatttggtctgactcaaagcccacagtcttaattcccatcctagagtgtctgtcccctggccctccccatcaatcaaatatgtgctttacattgtcagtatatttaaaagagaagaactctcaaaatacatttcctactagagtaatatatgaaaaaaatactattccttagaagaaaccattcttaactatagaaggaaggggatatgcaggactagaagctagaatcagtactgagagtgttagaggagcacaggaagaagactgatgaacacagtgataggaaaacaggaacaaaagcacagaagttaaaattagaaaaagtgaagaaaggctttcccccaaatatgacggcagagaatgaagataaagatacacatgccctatgacccaacgattccacccttctacccgagagaagctcacatgcactgggacacgtataaagatgtttgtggcagcatcgtttatgctagtgaaagactggaaataatccaaatgtccgcagtagaatggataaactatgagatactcataacaacagtatataacaatgagatggaaaagaatgaactagctacacaacaatgccaatgaatggttagaatgttgagcaaaagaagcaagaaagaggaatgtatacatacagtatgattgcatttagatcaagtgttaacagaagacaggaaatactagtattgagatatacacatgggtggtaaacagcaaaacaaaatcatgatttgattattataatgaaacagtagttccctctggagggtcgtgcttgggaagtaacatgaaggacttcctaggttatggcaaggttctgtctcttgccctggttagtgattatatgggtgtttgctctataattatatcttgcacttatgttttatacatttttctatgtatgttttatgattcatgatgtttttaaagggttttttttaaaaggaatgaagatcagatagttctctagagaagatagacaagaggtgggcattggggaggcctagatagacttgctaacagttcaaagggaataagctactggagtgagactgtgggtcttcttgatactttctaaggaaaacaggagaatcctctgttccctcaaagcagaaggataaactaagttgcctctccatgtactgtcaggattcagtatattcattcagtttaaaagaaaagaattgtccgttcagcaaagtgtgctgtggctcaagcatggggtttgggattttcatagctgggactgagccagaagacagcaaggggtggccaacagagggaggtcctgcagcgttgccagcactgcagcatttggcagcctgttaaagttccacatcatatgcatttcctcctttctccttcttccccagtcttgtattttctttctctcctcaaggtccaccatcaaatcaatgcagaaatggggcatagaaatcaaattcttattttaaagatacagagggtcgcaaagctagatagtggcagaatccgtgctggtatcctacagtttttgtacccagtcctcttgatctattagccattatcctcaatactttgctattctggtattttgaatattttgaatacctgaatactttgctattcaaaatgtttcctctgcctggaatagttttcccaccttatgactacctttaagcccccatttttaaagatccagttcaatccctccaccacttcctgtaggaattcttcacagattttcctaatatagcttccttccactcagccccatagtgtctggtttcaacactctgacagtgcttagcactttgtcttagaattatttctatatttcctccactagactagtctcctccatatccaactggtcttactcatctctctatacccagtattgtgctggaactggcttatactcatgacagccaattattaaatattcagggattttgtgagctgttaaagtgttagtagcctgatactcagtagtaaatactcagtcatggcaagagtatttacactatggaaggtacaaatcagggtcttttttatttttttgtggagagctagcttaccagcacatcactgcacataccctatcaccacctgcctgcccctgtgcttgctgtagtgcttggcatagtggttgtaagatgcatgaagaagaaaggcaaccagtgaaagtgcagatcaaaaggaaagagaattcaaatagcgtcagctcaggagcccagggaagagaagtttctgagaagtgggtgttcactgctgcagagaggttgatgaagataacttaaataaggctaaattaagcacatctttgtccttctcaagagctacttcagtaggatgatagatatgaaagatggctgggaatgaaaaaaatacaggtggctaggaaatgagcagtagatataaactcctttcaagacaagagaaggagtcttgttaaacagctatttgctgaacatctactatgtgtcaggcattgcattaaacaaagacaatacatgggcccatcctcatcttgctcctggactcacagggcagacaaacacaagaacacaatgataagtgctctgaaggcatgatctgggggctgttggagcacgttaaaatgagcctggggatcccaggaagtttgcatacagaagccaactctgagcttaactctggagaaaaacaaattttccagatatttaagtgaagaattatcctagcaaaggaaatcgcacaatagcatgaacagaggtttgaggacatgagaaagaatgtcctgtctggggaactctaagttattccagtttccctggtggctgcagcagagagaacatgtaaagaacagcaggagatgagactgtggaggcaagcaggggtagggcacaaaggcctggcattgccaccatactgagtttgggctttatcttgaggcactagacaactactgaatgaccaagcaggggacaagcacaatcagatttttattttagaaaagtggttctgtagtaatgtaaagggtagattgcaaaggaaccagacattaggcaggcaacccagttaggagatgtattagtctgttctcacactgctaataaagacatacccgagactgggtaatttataaaggaaagaggttcaattgactcacggttccacatgactgaggaggcctcacaatcatggcagaaggcaaatgaggagcaaggtcacgccttacatggcggcaggcaagacagcatatgcaagggaactcccctttataaaaccatcagatctcgtgagacttattaattatcacgagaacagcacaggaaagacccacccccatgattcatttacctcccactgggtctctcccacgtcatgtgggaattatgggagctacaattcaagatgagatttgcgtggggtcacagccaaaccatatcaggaggtgattgtagtgatccatgcagtaaggaaggtgggcctgaaacagaataatggtgcacatgagaggatgttactgatttgagagatgctcctgaaatggcaaactaaagtcttcttaggtggttatatgagagaggaacctgaaatgagtcccaggatcctggcaccagttagtgggtagatggtgtcctttggaggaatgggatatattaatagtagaaatgaccagattatgggaggaaattatttcccttgtagacacctgtgggacagccagtggagatgccctttaggtagttgtatgtacaggactagaactcaggagaggggtctggggtgggaagaatttaggagtattaggtgtgaaaagaatagttaaagtggagtttatagagaagattgtccagggagattgtagcacagcagttctcaaacttgagcaaacaccccaccagttttttgttttttgtttttatctggaggtctgtgctggggcctgaaaatgtgcatttctaacaagttcccaagcggtgctgatgctgctggtctagggaccacacttcggaaccattagtgtggagaaaggccagcatttaagggtgattagagaaagagctgacaggtgactgagaagctattttagggggagagagtccaggacagagtttcaaggagtaaaacagtaaagtcaagcaggatgaagcacaaataatgtcagttgcttttgatgatctggaaggtaagactggagccaagtggcagtgtcagggaatgggagagagcaagtgcagtttacatttccagagagtttggctgagaagtgagaagaacagacactgagagggtatggaggggttcatggtcaagaaaggacttgggtatgggaaacattagatcagttcatgggctaggagaaagcaggcgagaaaggaaggttttaaagacccagataacaatgaggggttaacaagggaagcaggaaggaaagggactttgccttaagcaggaggaggagccccacctgtgaggccagaggggccgctgaggatgccaggaaaggccagaagaatctaggagggtttggaagaataggtaccctgcaccaagtttataatgtttgtaggcagaagggaaggagccagccagaggcagggcccatgctatgggagaggtgaagcagtagttcagggtcccagaaatggaggcttgggagggatggcatcaggaacagagattggcaaagagatattttagagagtgcccaaaaacgcagttggagttatcacagtgttatgtataatcttggaaatatagacacagtttatgtgtttgtgttccccacagagacagtgccccaaaaagggtatctttccgtgtttggtgctacagaccctatacacaaccccaagagtgcatctctcacagtgcgggttttattcaatggccatggaatttaagaagtgggagtttgactcataaaacaatttatcagtttgtgagagctggaaagtcacagatacaggttatatatatatatatatagatataaattttttttttttttttttttcttgagacagagtctcgctctgtctcccaggctggagtgcagtggtgcaatctcggctcaccgcaagctccgcctcccaggttcatgccattctcctgcctcaacctcccaagtagctgggactacaggtgcccgccagcaagcccagctaattttttttatatattttttttagtagagacagggtttcactgcattagccagggtggtctcgatctcctgacctcatgatctgcctgcctcgacctcccaaagtgctgggattacaggcatgagcc

SEQ ID NO: 673 - DNA, 4083 bp, Homo sapiens
cgtcagtttggcgcggagtttggcggccggggcttacagtggcgggagttggaggcgataacgatttgtgttgtgagaggcgcaagctgcgatttctgctgaacttggaggcatttctacgacttttctctcagctgaggcttttcctccgaccctgatgctcttcaattcggtgctccgccagccccagcttggcgtcctgagaaatggatggtcttcacaataccctcttcaatcccttctgactggttatcagtgcagtggtaatgatgaacacacttcttatggagaaacaggagtcccagttcctccttttggatgtaccttctcttctgctcccaatatggaacatgtactagcagttgccaatgaagaaggctttgttcgattgtataacacagaatcacaaagtttcagaaagaagtgcttcaaagaatggatggctcactggaatgccgtctttgacctggcctgggttcctggtgaacttaaacttgttacagcagcaggtgatcaaacagccaaattttgggacgtaaaagctggtgagctgattggaacatgcaaaggtcatcaatgcagcctcaagtcagttgccttttctaagtttgagaaaggctatcaggatttccagcaaagtgttactgtggtcctctttcaagacgagaataccttagtctcagcaggagctgtggatgggataatcaaagtatgggatttacgtaagaattatactgcttatcgacaagaacccatagcatccaagtctttcctgtacccaggtagcagcactcgaaaacttggatattcaagtctgattttggattccactggctctactttatttgctaattgcacagacgataacatctacatgtttaatatgactgggttgaagacttctccagtggctattttcaatggacaccagaactctaccttttatgtaaaatccagccttagtccagatgaccagtttttagtcagtggctcaagtgatgaagctgcctacatatggaaggtctccacaccctggcaacctcctactgtgctcctgggtcattctcaagaggtcacgtctgtgtgctggtgtccatctgacttcacaaagattgctacctgttctgatgacaatacactaaaaatctggcgcttgaatagaggcttagaggagaaaccaggaggtgataaactttccacggtgggttgggcctctcagaagaaaaaagagtcaagacctggcctagtaacagtaacgagtagccagagtactcctgccaaagcccccagggtaaagtgcaatccatccaattcttccccgtcatccgcagcttgtgccccaagctgtgctggagacctccctcttccttcaaatactcctacgttctctattaaaacctctcctgccaaggcccggtctcccatcaacagaagaggctctgtctcctccgtctctcccaagccaccttcatctttcaagatgtcgattagaaactgggtgacccgaacaccttcctcatcaccacccatcactccacctgcttcggagaccaagatcatgtctccgagaaaagcccttattcctgtgagccagaagtcatcccaagcagaggcttgctctgagtctagaaatagagtaaagaggaggctagactcaagctgtctggagagtgtgaaacaaaagtgtgtgaagagttgtaactgtgtgactgagcttgatggccaagttgaaaatcttcatttggatctgtgctgccttgctggtaaccaggaagaccttagtaaggactctctaggtcctaccaaatcaagcaaaattgaaggagctggtaccagtatctcagagcctccgtctcctatcagtccgtatgcttcagaaagctgtggaacgctacctcttcctttgagaccttgtggagaagggtctgaaatggtaggcaaagagaatagttccccagagaataaaaactggttgttggccatggcagccaaacggaaggctgagaatccatctccacgaagtccgtcatcccagacacccaattccaggagacagagcggaaagaaattgccaagcccggtcaccatcacgcccagctccatgaggaaaatctgcacatacttccatagaaagtcccaggaggacttctgtggtcctgaacactcaacagaattatagattctaatctgagtgagttactgagctttggtccactaaaacaagctgagctttggtccactaaaacaagatgaaaaatacaagagtgactctataactctggtctttaagaaagctgccttttcatttttagacaaaatcttttcaacgctgaaatgtacctaatctggttctactaccataatgtatatgcagcttcccgaggatgaatgctgtgtttaaatttcataaagtaaatttgtcactctagcattttgaatgaatagtcttcactttttaaattattcatcttctctataataatgacatcccagttcatggaggcaaaaaacaagtttcttgttatcctgaaactttctatgctcagtggaaagtatctgccagccacagcatgaggcctgtgaaggctgactgagaaatcctctgctgaagacccctggttctgttctgcctccaacatgtataattttatttgaaatacataatcttttcactatgcttttgtggggttttttttaagtatgtgtaaaaatgtgatgctcagataagtacatttatatcagttcagtgttaaaatgcagtctcttgagttaaagtcatctttattttaaatgcagtgataaatgtcaactcttcggagaaactaggagaacaacaacagaaagctgtgtttgtcttttttctctcaaatatatctcccgtatgagatttcaggtccccatgttttcaccaagcaatctgctatgtcagccaacccaacatcactttctacaggaggttatgatttttgccatttactagaggaagatgttttatgaaatcaatttggggtttgaattcaggtgcagtcatcagttctttaggggctgcaatgttttaaaaaaaataagtcatcagattttaagaaaaaagtgatgatttcttattgatatttttgtaacagaatatagctcttaactgaaaatccagaaccagaaacataaatcttgagtttcttttcatgtacataaaaagcaatagccttttagtatagatagccctgagccaaaaagtaatagaattttctctagatatttaatacagagagtgtatagactgactctaagttaataatgtgcaaaatatcttaaacatccctccccttattcaacaattatgtatcagtgatcttgaaccattgttttatatttttcacctttgtaacctcatggaaagaggctttacatactttctatgtactatttacttagaagggagcccccttccagtcatgaaacttcatttgttttatccatatccctgaggactgtgtagactttatgtcagtttttgtcattatttgaaaatctattctgacaactttttaattcctttgatcttataagttaaagctgtaacaactgaaattgcatggatcaagtaagcatagttttatccagggagaaaaataaaaggaagccatagaattgctctggtcaaaaccaagcacaccatagccttaactgaatatttaggaaatctgcctaatctgcttatatttggtgtttgttttttgactgttgggctttgggaagatgttatttatgaccaatatctgccagtaacgctgtttatctcacttgctttgaaagccaatgggggaaaaaaatccatgaaaaaaaaaagattgataaagtagatgattttgtttgtatccctacccatctcctggcagccctactgagtgaaattgggatacatttggctgtcagaaattataccgagtctactgggtataacatgtctcacttggaaagctagtacttttaaatgggtgccaaaggtcaactgtaatgagataattatccctgcctgtgtccatgtcagactttgagctgatcctgaataataaagccttttacctt

SEQ ID NO: 674 - protein, 673 aa, Homo sapiens
MLFNSVLRQPQLGVLRNGWSSQYPLQSLLTGYQCSGNDEHTSYGETGVPVPPFGCTFSSAPNMEHVLAVANEEGFVRLYNTESQSFRKKCFKEWMAHWNAVFDLAWVPGELKLVTAAGDQTAKFWDVKAGELIGTCKGHQCSLKSVAFSKFEKGYQDFQQSVTVVLFQDENTLVSAGAVDGIIKVWDLRKNYTAYRQEPIASKSFLYPGSSTRKLGYSSLILDSTGSTLFANCTDDNIYMFNMTGLKTSPVAIFNGHQNSTFYVKSSLSPDDQFLVSGSSDEAAYIWKVSTPWQPPTVLLGHSQEVTSVCWCPSDFTKIATCSDDNTLKIWRLNRGLEEKPGGDKLSTVGWASQKKKESRPGLVTVTSSQSTPAKAPRVKCNPSNSSPSSAACAPSCAGDLPLPSNTPTFSIKTSPAKARSPINRRGSVSSVSPKPPSSFKMSIRNWVTRTPSSSPPITPPASETKIMSPRKALIPVSQKSSQAEACSESRNRVKRRLDSSCLESVKQKCVKSCNCVTELDGQVENLHLDLCCLAGNQEDLSKDSLGPTKSSKIEGAGTSISEPPSPISPYASESCGTLPLPLRPCGEGSEMVGKENSSPENKNWLLAMAAKRKAENPSPRSPSSQTPNSRRQSGKKLPSPVTITPSSMRKICTYFHRKSQEDFCGPEHSTEL

SEQ ID NO: 675 - DNA, 745 bp, Homo sapiens
ggcttacagtggcgggagttggaggcgataacgatttgtgttgtgagaggcgcaagctgcgatttctgctgaacttggaggcatttctacgacttttctctcagctgaggcttttcctccgaccctgatgctcatccaattcttccccgtcatccgcagcttgtgccccaagctgtgctggagacctccctcttccttcaaatactcctacgttctctattaaaacctctcctgccaaggcccggtctcccatcaacagaagaggctctgtctcctccgtctctcccaagccaccttcatctttcaagatgtcgattagaaactgggtgacccgaacaccttcctcatcaccacccatcactccacctgcttcggagaccaagatcatgtctccgagaaaagcccttattcctgtgagccagaagtcatcccaagcagaggcttgctctgagtctagaaatagagtaaagaggaggctagactcaagctgtctggagagtgtgaaacaaaagtgtgtgaagagttgtaactgtgtgactgagcttgatggccaagttgaaaatcttcatttggatctgtgctgccttgctggtaaccaggaagaccttagtaaggactctctaggtcctaccaaatcaagcaaaattgaaggagctggtaccagtatctcagagcctccgtctcctatcagtccgtatgcttcagaaagctgtggaacgctacctcttcctttgagaccttgtgg

SEQ ID NO: 676 - protein, 146 aa, Homo sapiens
  VARIANT (1)...(146): Xaa = Any Amino Acid
MSIRNWVTRTPSSSPPITPPASETKIMSPRKALIPVSQKSSQAEACSESRNRVKRRLDSSCLESVKQKCVKSCNCVTELDGQVENLHLDLCCLAGNQEDLSKDSLGPTKSSKIEGAGTSISEPPSPISPYASESCGTLPLPLRPCX

SEQ ID NO: 677 - DNA, 86804 bp, Mus musculus
  misc_feature (1)...(86804): n = A,T,C or G
agagagagagcaacaatgagtctgtgtagggaaaacagtagcttggcatggttgcctaagtagatgctggcctgtgataggaaagttttgtcttgaagtttgtgtggcaaagagactatctggggtatacctaataaacgggttctagggcaagaagggaagtcccactggtaagccatctcttaaaggatctcccagcaagttgagaataaacaaatcttagtgaaacacaagttatccagcacttgggaggcagaggcaggcagatctttgtgagttgcaggccagcctggtctattgaacaagttccaggacaaccagggctatgaagagaaaccctgtctcaacaacaacaacaacaacaacaacaacaaccaaccaacaacaaccaagcaaccagacaaccaaaccaaacaccaaccacaatagcagaagttgtttttcacagcgctacattcttctggttctgtgagtgaactctaattgctgactcatttattgaaagtttatagacatctccaggtttcctgtttcaccctggacatgtgcagccaagctctttctctccttcatgtcaagaccaagtgagtcgtagtttttctgtgtgctttttcctggctttgagtatctgtagctgtttccttccttttcatttctgtttctttttaaaagcttgttctctgtatgtagatttgttttgtctctgcttctctgtctctcattattttggacagaaatgtatcaagtctctagatctcttacagaaagagacactgcctataatagcttactgtttcttccttacatgaacttgtgtatgaatggtgttgataacaaatggcttctccacttgtgaggaaactcgagctgagtaaagcaggtgtgtgcatccctgtggctgcaatcactttcagctgtttgtttagaagaggaaggtcctgggacaggctgcaagctgaggacaaggcagcatgtcctgagcactggtggcaaatgtctgggatgaacctgcatgagtgaccctggattagactctggcccttatcgttccttctaatttgtgttcctccaagcacgatccagtgaatgcagacattagctagagctctgtttcatattatagttggttagagcaaacaggagaatgttatcagtgggaaaggactttaaaagtccagtaatcattagcagtttaaatgtgggagacatgcttctctaagcagagttaataagaaaaccttctctggcaagatttcacattctctgaagtttggactttgctagtaaacttcaagtagatcaaacagttttgctccccaaccaagtctgttggcaaaactactactgtggaacgttttgttcatatgaagagtcacttattgggtccagaggcgaatgaaggacacagtgagttaagtgccagtcacctggtggcagagctgaaaccagaaaaaacaaatctctgtaggtttgtttatttatttatattcacgtgtatgtgtgtgaattctgtgtgtgtacgtgctgttggaaactaggagagggagttcgacctcctggagctggagttacaggcagccgtgagcatgcaacatgagtgctgggaactgagtgagcaagcactcctaatggctgggcccagagttcctgcctgaactcatctccctagtcctggtctagcttccatttcctcactccatggacttgcttgattatacaaacccaaggtagatgaagaaagatggcaatgaactagttattagctatccagacattctgagggatattcctgcctatggaaatgtttttacaacaaatgtcaagaggaagaaaaaacaaactggaacagatcatagaaactcctcagtcgactgtggtatgaacgtcctctgagctagtcctgtgaaacaagaattacagagggatgaacgtcactgttcagatggagaaacagttgaattatctgttaatctctactgttagctctcttaatgtttttacaggataagccattgagcaccacccccacctttcttccttccttccttcctttctctctctctctctctctctctctctcttttctttctttctttctttctttctttctttctttctttctttctttctttctttctttctttctttctttcagagattattcattttaaacacacaggaagacctcaagaaacccttcttttctggttttagattcatgtaaagaaaaagatgtgaaactcagatctttgcaccatttggcaattgtttatatggctaacagctgtttctcttgattctttgtgatagctacaaatcagaaccaggattatacagagacccttgcttttaaaactccaaacagtatagaacatatgtcttttaaaaaggaaataaaatgttttaagaaatacgtagagtaaattttttgaaattagttcttcagctctctaaaaaccatggcattttcagtcagtttatgggatgtagctcaggcaagaagtttgtgaagtgctctgtagtgggtgagttctactgggagaatatttatttttattatcattaaccatgagcatattttgttaatatactactagcatatttaatggaatatttgtattcctttgctcataagtgctcatttggtgtataggatataagataactcatatatgccatttcatcccttctgaattagttacttgttttcttgttgtgacaaagcatccgacaaaaacaattcaaataaggaagggcttattttgtctcacagtcagatcaaaccatccatggtgatggggaaagcatgcagcaggagcttggggcagctcctgcatccatagtcaggaatcagagagcaatcagtgtcactgtttggctggtttacttcttcttcctcagccatagaatggtaacacccacatctagaatggatcctcccacctcaattaatctaacctagaaaatcccccccccccttttagaaggcatgggtccactgtctttgcataaaaagccacagaacttttcccaaaatattccacaagtgagttctataaatgaagtcccagggtgatagactattgggttacggttatataataactgtgtcaaacaggcaatcaaaataagcagaacatactgtattcacgtcactctgctatttaagtgataaaattggggtgacatattcttaactttgtttttcttttcccatttttctgtattgaggtcaccagggctcagtgaacactactacatgtccaactgtggagtctgggtgactgaatagaaatatgtctaaccaattatcaccatcacaagcattctgagtccttggatttctggtctacctgagtaactgctgaactctttgcaggatacatccccagggctcctttctttaaggtctttacttaaagcagaacacttgatgttatttattttctgtgcctgtggcggtcaaatggcgacatgtaggaggcgcttctttcttcctttccaccatttgggttctaaggataaaactcaggttgttgggcttggcattaaacacctttaccaaccgacccaacttgctgatccaagttctagaaattctatggagactgtctttctgcctctgtaccagtctacccatgtgcataattgtatggatggaattctaaagtatcctcaaaaattgctgacctataaagcacccatatctttctcaatttcttctaccataaactatgccctgtcgtgtattagtcagttttgcattaccataatggaatatctaaaacaggataattttatgaaaaaacaaacaaacaagtttcatttacttcaggggtttatcagctaaaagtgcaggatcaattgggctcagtttgatttctgtcagagctgatgctaactaaatgtcatcaaaacctgggctatgtgtgggaggaagagatcacatcttgaaacaggaagtcagagaggctgacctcacagaatctcttctgaaggcaggctcccaatgacttactgacctcccatgaggctccatctcttagtggtcctcagtctcccactgccacacttccaacacattagctttttgggaagatacagctcaaatcattttcaaaccatttcatcttgtgatggaattttgaagtttcagggaaggcctcatattgattggttgtaagacacggagatgatctgacctttcactagaggctaaaatggaagccattgattagaaatgctgcagaatttggcaagtcactactagattactggtggaaagggccatgcactgaagcatgtgggaagatctgaggagctttgaatggctctgattgacaaccggcaaaacccccacgaactttagtgctgcaagcacaggcagaaaattctgccgtcgatccaaatgagcttagaagaagaccttaggctccatgactgggagagtgaccacaaaccctgtcaatatcttgaattttctttgtgattttttttttttcagagaaactagttagggtggatctgagctgagggatatatgagtggtattctaaaccacttagtctccagtactttgctttacaattttggtatttttaaaaaaaaattattattatatctaagtacactgtagctgtcttcagatgcaccagaagaggatgtcagatctcattacggatgattgctagccgccatgtggttcctgggatttgaactcaggaccttcagaagagcagtcagcattcttatccacggagccatctctccagccccacaatgttggtatttaatatgctatagaatgaactttagatacctactggcttacaacccaatcaatcttatgtcttgtctaaagcctttcttctttagctcctttctcattgttattaaagaagagacaaatatatagaaatttaatatttttgttggtctatcagtttaggacataagaccaacaataaattatcagacctaccaaacctatcttgtgggtttaatgtacaatgattttgggctgtttattaattagcatacatctctggagactattcccctcgattgtcctattgattagtttttgtcaagttgacataaactagagtcatttgggaagattggtcctcagttgagtattgcctccatccgattactacacaaaggcatctatagctagagaagagcttgggattgcaatgtatattccaaagtagtatgggaagaaagactctgccactagtgatgagttagatgatcatgctgaggacctagtgaacagggttagtgaccaagctgacagtgttagccagcttctggcattcaaggctactcagggcaaaccaatccctggatgccctccaatgacagagccaaacagaggctacacggaacaggatggagacatcacagctgagccgtgtctacgttgtcacagcactgtgagcaaattactcatctttatgttaagacccaaggtttgacataattgttacaatgcattaagtaatgaatgtagacattagaaaatatgatatgggtaaaagtcatggcttccacataggatttcaaaatgaaaattgtatttggttttttttttttttgagtgaattattaactcacatgagacatagtaaagatttctacatatgcaaggattaacttcttttagggcacaattatgcttctttcttcagagccccctcacatgatggttaggatacaaagtatgggctgcatgatgatgcataatgaaaatgacaaaaaaaaaaaggacaaaacccagcatgtcttaatccaaattgattttgctttactttatgcccccaaatgcccaaatgcttatttttatctttctttagttttctttggggaatcaatttgaggttcctccctcatatcacagtaagtgcacaagactaatgccaagttcacaagtgaccttatggatgagtgctaagttgcaggtgactacatacgttttccagtaatggaagatgagaggatctgtcatcatggtgggttaggtgactcagaacaccctgtagaggagttttccttttgtgcttcatctggtgatagccagtctaccaaggccccccatggagtgggtactctaggatgtccagctgttctcagaagttccaggttcacctgggcaacaagcactgatcaccactaactgtgatgccggcactgtgatggatgttgtgaagctgtgaacataaatgattctaactttaaagccctatttccatggtctgcccacaatggctctagggataaccaaattaaattagtttacttgagcttacctggatcagaaccctgtggttcccccagggttgtgaggcatttggcttcctaaagtggatttcatacaaggctgttgtctactgtcaattgaatttaaaaaagaaatcaaagtaaatattttctctcattcttatttgttttggggttaaagaagatgtggtacccaataccacagggcaggctttgaaggcattttttatctcagatggccaaacaaaccatatgtttccatttctctgagagggcagggaaggttcacttatcatgttcaggcagtctacccaatggcttggcatcatggacgctggtccagtttgttttggagggacaagtcaggtgcactggtaggatagcgtcttaccaaagtgagagtccaaagaatgcttcttaggtcatttgatcaggcagccacacaagaataccacagactgagaggtatatgaatataaggccctttactttattttgatgcagttgtgggggttggaatgtaagagtcacgaagccagaaagatcgttttctggtaaggcctctggtttcctgaatggctgtcttctgctttgtgtccttgtgtctgtgtgtccatttgtccgggtatccgtttatgtgtgtgtgtgtgtgtgtgtgtgtgtgtgtgtgtgtgtgtgtgtcagagagagagagaacgagagagagagagagagagagagagagagagagagagagagagagagattgggaggagaagggagcttgtcactttccttcctataagattgtcttgatggttaatagtggctgtaaggtttacagggtctagagtcaccagagacaagccttgaggtatatctgtgaggatgttataaaggttaggttaattgagcgagaagccccacctgaaatgtggctgatgctgttccgtaggctgtggtctaggaccacattaaagggaggaagagctgagtaccagcgttcatctctctctgcttctggatggttggcacagtgtgaacagccacctcacacccctgttacatgcctttcctatagaggtatttatgtccccttgaactatgtgtcaaaaatgaatacattcttcctgaaattgctccttccaggtatcctgcttcagcaacagggagagtcactaataataaacttatgatcccatttactgaaattacttctatctagggactattggcaaactgctccattgggataggggtagtcaggatttcaatttgtatatcaaggagagaatacaatctaggccctagcacttcttatatggcacatgctaaattaagcccaaggatgtatagataagcttatatgtcaggcgcaaaatgctctcagggagtgcatattaacagtgatgtgataattacaatgctgtgctcaggtcagatgggaagaatgaacccattcagttagagcaggtcagggaaggcttttcagaggagccttagactcagcgagacttttggatgctgggagtggttagaagtattccaggcagaggcagaatcccactgtcagtggtcacagagcagcagcacagtggctgagcagagccccaggtgcttaggggtgtaggaagagcatgggaccatggtcaaggtggtttcagggaagggtactttcctttggaggactgcactaagcagcttgaacttcaccttgtagcaggaattgggaacctgttacacattagacattggatctataatgctcctaagaggttcatgctttcagtgtgtgttctaagccagtggtggtgcttggggggctacggtattttcagggtgtagattgctagcagtgggcttttgaaaatgataactggcagcttattctactcttattcttgtctgcttctggacactcatttgtaaagtcaccattggatacaccagccaccgggaaggacacaagcttgtgaaactgtgagcccaagtaaaccctccttcccctgtttctatcaggtgttttgtcaaaatggcaggaaaaatagctaaaacaatagatattgtagcagcagcagcagcagcacctgctgcagcaacagcagtggtggatcagttttgatttaaaagttcacccagaaagcagctgggaccctgacacaatggtggctaggaccagttagaacaccattaccatactgtggtcacagagcccagaggcaagtgtggtgggcactaccggagatggggaggggatagctgctcatcctattcagaacttaggagttgatgtcagtgtgggtaggggtaggagtctaggcaggatccctctgcttggagactagggagccatcagggggagaggaaactccatgcatgggggtgaatggcagaagactgcgagtgaagcacagcagagagcccctgggactgggaaggctctgaggaaattattgttggcttacctctatgagaaagcggcaaaggaatattgcaaagttatcactattacgtgctgtattttagactaatgtgaagtaatgtgaatcctggggtgagtgtgtctattgctcctggattgggaggatgcccaggagctggctaagaggactctgtaagactgaaacatttggaataggtaatttgctcattgaaatccactgacagcatttttccccctgtgcaaatatgacctaagctctttgagtcagaaaagtttcctaataaataaatccttagtcatctgttgccaagaaaatgaaaaggctttggtatggaatccatcaacctgctggccttgttctcaccctgagacagggcctgcttttgaactcgtgattcatgtaaatggctgaactcgtgattcatgtaaatggcacccttggaattttgggtagggcagggaaacaattcaggagagctagagaatgaaattagatttttttttttttaaagatcagatcagtccttccttgatctaaattctccatctgccctttggtgagggtggagaggaaagcccaggtcagtgggttctgagccttcagttgactgtgactttatgtaattataacaaactccttttttgattttcttccaaaaaaaatatttggcagggtttcaacagaccgaagagaaaggggtgggggagaacaaaaaggagagagaacacagagatacaataagagatacacagtaacatagagacatagacacacagtaagagagctacagatacataaagacataagacacagagagacagaaaggacaaacagaaagagaaacagagagagcaagagaaggacaaacagagagacagagcatgagagggacagacagagagaaacacatatacaaaggagagacagaaagatgagaaataaactcaaaagcagatgcataatgaattttaaattgtgggccccgtgaacttgcagctgacaccttccattagacaggtgacaacttttccttccaccttcctggtcctttcctgggcacccaagcaaaggaaagtaaacccgcacaacagaggcccctgccacatgaccaaggatccagagctctcatctgagtccactagggcaaagcaaggctgaaagctcggggggcgtggtcggccgttcgggggcgtggcctaggagttgggcgtgacttagtgatgactcagcggccccgccccgtccccggcccgccccgccacttaattctgacgcgcgaggccgccgggtgcgagagccgccccgagccggacgggcttcttactccggcgttgcaaccgccgtcggaaccgccctctcgccacctcggtggctaaggtgccgggtaccaacgccagcagcggagcgcgccagggagcagcgcgcctttgtgcgaggtaggctggccccacacttacttctcacacaaagacgaggggcttgcaaggcggccgcccgccgggagaaagcgacgggtgtctgaccccggcctgggggaccctgtcgttggcctgcagggcgggctggggtatgcggtccctcgggcgtaggcgagcagcggggagcctggtggccctgcgctgcttggggaggtctagggtgcagggcccgggcggcggcccggatcgaggggcgccggggcggaggggccccctggagaggggggaatccaggctgctgcttggttggttcattgttgcatcctcggccctgcagacccagaccttaagacccaggctgcagtggctgcgcgccccgggccagatgcccgccttgcctgtcccggcagcaggacagggtcagcgtcccgaagccggctcctacccggcagacaaaggcggggtcgtgctgctttgaaaggtggtagtgacactgtttcctgtctgcaagtaacttttctatgttggactctgctgtgcctcttggagtccggtcaagccagggggtttgggtgatgtcagcgcagaagtccccacatttttgggggactcagtgattgcctcctgaaacatttctggatgactgggaggtaatctggtgtataagagccaagttttgacatgtgtgctggaagtgaagcgtccccagctctctttgaaatgtagagagttcctgttgagaggatgaagtgcacacaccagccatcccaatcccttctcagatttttgtccaggactgctaagtgaggttacttagtcagaatggggggtgatactggaggcgccaacaggggaacagaaggagccctgtttggcttgactttctgaatttgagcctccctgctaacaggtacactttctctaggcatgctacctcactagcatttggacatgttaaagttgctctaaatcctgtcagagatgcctgtctagggacggttccttagtgtttggagtttcaggctttacaactttgaattaataatcatatatatttgtgataaattaaaaaccagaagataggtcactcatgtggccaccacccacacataccctgaggatgaaggtgtatttgctttataggtggcagggaagtttgtgtgtgtgtgtgtgtgtatgtgtgtgtgtgagagagagagagagagagagagagagagtctaaatgaacacattgttaattcctaacctttatacttgtctaaagcatgacatttaataatgataactttgcaatgttccttttactgctttcacagaggattatactaacaacttgttttggaatatattttctcagagctttgccagtaactatttattcagaagggagaggcgggaagatgaagggaaagtaatgtgctttgcacttcactggagataacacaaaagactttatcatgtatatatatatttgtatgggtatatctaaatctatatctgtatacacacacatatatccatatatggatatagatagatatatatcaggagtagcttgggaccgtttaaaaggtaaataaatgtttttactgtgaaaagttctgagaatcctgagaaatccaggatggaaagagctgcctgtagaaagactagccgtgttttccatgtgcctcatgcacatctcagaaagtttgtgttgagaaagtaaaatatgttttcattacagtgaagagtttcgagtgtctaaaaggccattcagctacgtacttggccggtggacatctttgtcattacttatattttccccttgtaaaaattttggtctttgagttctttagtatgcaaagcagaaagaagcctttgagacagccctttagaggcagggtgctcaagagatgatgaagtattctgcagtcatttctgaagcaggagacaccataggaggaggttgggacagtgtgctgtcaggtcccatttgcagtttttcatctgctttgggttccttaatatgcatgcacacttggagtagttgcagggttgtcccctaggtggtgggcagaatattttgccctccgtagtgatttctgttgcttttctagtcatgtacttcctaacagcatcgagtgggatggaaggtccaggaggaaacagccgtgtgcccagtctcatttcctacccctctgagggctttgggctgtgtgagcagtacaggcagcttgggcctcagctcagactttaggagtcccatgtagggctagagctgttgctggagagcccgctcctgaagtacataaaagacttgtactctagagacacacccagagcaatcgagttcttgcccagaaggaaggcaggtgctcttactaattgactaattgctccgagttttgtttaaaatgctgcaagcaaaggaagaaggatttttcatttttcagttttgtttttttcttctgtgagactgagggatagaaaactttttcttccactgaaaggggggacacagactgaatactgtggcttagttggggttattgatgtctaaaagccccttccctctggaacacgctgtgcaggagtggtttgagaactcagacttgggagtttggttcagtgagatctggattttaagatgtttgtggaagtccatatataccttggtgagtctagaagtactggggagagaaactggccagctttggggttcactggttccatactgggaaagctactgtagagtgaagatctatgtatagctggtcccacgggaactactcatagccttgtgtcttccccggtctaatcttttcctcttcttgcttttcctgtttaaagcaatctcttattttctcttttcctttctgtggagaagtgctgggccttttccatctgaacttttcctcacagtgagtacttactgagtgcacttaaagggatgaatgcttttatccatcggtgcctcacccctgaaagaatacatttatttgggaaactgacttgggttacctttggaaatggtaaatcaatgggggctgtttctgaggttgctggaggaggccagacactgagtttgttgtagttaacaagatgaacttggtccttgtggcagagtatgtgaggatgatattttaagaattgtacaaagtgacccccacgttatttaatagctgagactttcagagctgtgaataggaattagcactgtttgatttaagctcctttaggaagaatgagagaaaccacagggaaacatggggaatacgttcctaatcctgtaaggcagatacttgggataccctgggaacatgagttgcccagggctagctgggcatagttgaactaactgatgaggtagactgctgtgttttgtctagaatttggctgggatattgggacagtttctagtgcagcttcattgtccccactgaaggggtcagtagggccatcagggagtcaattgttgtagtgatgtggtgtcctgacttagagattctgagaaatgagtgttggtgtcacacagagatcagcagactacagctgtgtttccctccatttctggaaattctattacagatgaagagacagctagaggagcttgtgggaaaatagatactggcttgagagtgttcccaaactcagctggaatacaggaaggaagaggggatagggctgcatttaaagcagaggaatgccggacagttctagcaaagatgtcactcaaagtggagtatcaggcgacgagcagctgtacagctgggcctgtggttggcctgccgtatgtagtggtgtgtgtgtgtgtgtatgtgtgacttatgtgagatcacaaaggacatgtgcactggcattgatgacagtaatactcactccacactccacaggcatggagcagcaatagagcttgctgcaggggttaaggaggccctcctcagcccccctccttgggctgctgttgattaagcctttgctggtcatgagacacagaaagctttagttagggaatttgcggggcctctgtaagcttcctaagaatgagttattaagacttctctctaacaggagagaatacagcttacagtttgatgacctctaagtaagtcacatagcccctgtgaacttttctaatttgtgaggctaatgtgaacttggtaatactgacctcctatgatgcggtaggtaaagaccatcctgaggcagtggcattccaaggcatggtccctgagacttggccaatcaccaagttgttgatgctttcctgtcagtgtctgtggccttgtaaaagtgcacttaaaagtttgtcatgatagggcgctgagagatggctcagttggtaaagcatttccttcacaaacatgagaacctgagaacggcttgccagcacccatgtacagagcccctgggcaggggatgattgtaatctaggttcagggaggcagacaaaggagagtacctgggtcgtgtgtgttactgctaaccacaggcttggttctgagcagctactctctaaaagtgatagcttgactgaaactttacggctgttgactggaagtccccttttcttctctcctcagcctctttcagctgtcattcttccctttgagtctgtgagcttgactcttggatacttcatagaaatgtgactgtgcacccctggctcctgtgcaatgggcttccttccctcagtatgacaccttcaagattaaggttgtagcatactgtaggctgagtagcattctattgtaagtgtatactatattgatccaaaacctgcaacctgttggtagatagataggtgttcccacaagacttctagaagagaacaggaagcctctatgctattggccttaggggtgatctcgtggctgtgacacccagaacacagcaaaaaacagagtgaatggaccccgtcgaagcagcgcagcaaagctgtgagcagaaaggaaggacaatctgcagagttagttatggttccccagccatttagctaaagagggctcttctccaagtctgtcaagaacttcagtagtgaaaaaacccaattaagggcttcggagcagagtcggcattgcgcgcagccttgtaactgagcgttttagtaaggcagcatgccatgggcgccatagggatgcttgaagagggcagggctccatccctctcttcaccttgcttttcttcttgtcatgttcgctggagcattttaaagattacctggctgtgatgttaggatgtccatgttgtcttctcttcttgcactcaggttttggcctccttcctgaagtgtcataatgaggtctgtaagagtgaaggctattgtttatgggacggatccccaggttgggcagtctctggatggtccttccttcagtctcagctctgaactttgtctctgtaactccttccatgggtattttgttcccccttctaagaaggatccaagtatccacactttggtcttccttcttgagtttcatgtggtttgcaaattgtatctttggtattccgaacttctgggctaatatccacttatcagtgagtgcatatcatgtgttctttgtgattgggttacctcactcaggataatatcctccagacccatccatttgcctaagaatttcataaattcattgtttttaatagctacgtagtactccattgtgtaaatgtactacattttctgtatccattcctctgttgagggacatctgggttctactgcggatgccaacaagagcttgctgacagaagactgatagagctgtctcccgagaggctctgtcagtgcctgacaaatacagaatggatgctcacagccatccattggacagagcacagggtccccaatgaaggagctagagaaaggacccaaggagctgaaggggtttgcagccccaaaagaggaacaacaatatgaactaaccactatctccagagctccctgggactaaaccaccaaccaaagaaaacacatgatgagactcttggctctagctgtatatgtagcagaagatggcctagtcagtcatctatgggaggagaggccctttgtcctgtgaaggttctatgccccagtatggggaaatgccagggccaggaagtggaagtgggtgggttggtgagcagggggaggggagaagggatagggggttttcggaggggaaaccaggaaaggagataacatttgaaatgtaaataaagaaaatacctaattaaaaaaaaaaagaaaaaaaaataagagtgaaggccgtggaagcctgacaccaatgttcctaaggtgtgcactcttgagagggaagggaaaagtcaggtctctaagctgcctgatatatgctaatgagacttaaagacttgcatactcaccggataaaatcccatagtcttcagcgagtacaggttatttatgagtttccaaggtagagagatgaaaattcctatgtcctggacaaagttaagaatgccatcgtggacatctctatgtagatgcataatgtgcctcccctacaataattgatgtcatttgaaataggtatcactgtgggcacaagtgtgaccaaagttcatccgcagtctctccctccctcctcctttcctctgtcctgtccactctcctccacactctttcttcttctctcttcttcagtggttgcacagagcagtatagcatgcctgaaagagagaagcctagactacagcccagcttcctgggagttagtgcatggtttgagacaggctgttgagctttctcctttgttagctgagttcattctatctctctgcctatgttacccccatgtcctttataactaacgatgcatcctatgcgggtcagtggctgcagaagagcatgccctgggtggggagtgtctcagagcatgggctacgccttaggagatggtgtaaggagacagggcctggacagataaggagaacacaatacatttcctataggtcctgctgtggtgaccagttcagctactctgtgttcatggaacctgaaatgttatacactaaagtttgacatgggccgttagggatcctatattcttatctgtgaaatacagtgatagcaacatagttactaccaactcaaaggttttgatcgtgtcctgtgtagtagagtgaaccttgttcattcagtatttaggaatgctgatgtgttctagtccatatggcagtccctaggatctggggctagaacagacttctttggagttagcatgctagtgttgatagacagtaaatgaatacacagaccaggtagctctttcattgtgctgccagggaaacaagcccagctcagggctgcaacctgctggagaggaagtgatgcttttaattgggtgagggtcctatttgagttttgaacaaatgcaacaagtctgtgcaacccactccagtctctctgagtagagcaaaggggctaagatccatgggtgcttgctatagaaggaaccacaagaaggctaatgtggatggagccaggtgggtggtcaggagcaaggcttccagatgaggccctctggtgaggaaacttgctgatacagaccccatgggagggtcctgtgaaggggctggaagagtcaggccttgcctgtctgtggctctggagtgagtcgtggtgcctgagcatccggcacaggcataggaaggttggtagaagtagatgctccagtagctggatcgtatattttgaagatagggccacaatgacttgctaattatttggagttgatattggctagcagaagaatcatgagtgacacatggtcccagacaccaggcaaacgatgatgtcattttctggatgagaacgaatggctgagaattgtctctataatacactgtgctctctgagattagtactgctttactcttgtatcagagatggggaaaccaaggagcagagaaggtgagaggctgtgctgggagaggctgggaagtggagatgggacacacctgagaccctccgccttttcatctcacgttggctccactgtctgcctctgaacgaggatggcagatgggtgtggtttcatgtgaatatatgtctttttcacagcacaccttggttgaaattggatttacatttcattgaatgtacccattatcaatgtatagttccatattttttcataatttgtaggcttggcagccaccatcctgattcagttttagattccacagtcagctcccattcccattctcagctttcggcaaccagggctcactttctgtctccacagagttttccatttcagaaattttggacaaacggagtcatacagtataccattgggttgactttgttcagctagttagtgttttttgagacccactcattgttttatatgttttataagtcatatgcttttaaggggcattcttggcctttcttagaaggatgtactctgctgatgggaaaagcatccttaggatgtaccttaagatgacattaataaaaatagtactcaccgatgcacggctctgtaaacattgttatctttcgtgttcttctaagtgattccatgagggtgcgtctgtggttggtgcttgatcagggaggggcctgaagtgctgagggactaaagagcctgtccagggcgagaggctgaggtaaggtccaggctttggctcttcccatcccatcctgctggactctactgactgcgtatttaaagcttgcacagctcagcttcagagagggctgagaacataggcttgcagataaatcttaatttgtaactttaagaaaagtgtttgttgtggattttcagtttggctttgccccatggagatgatggcatcttaaagcgatccttctatggggcagttttcttaggcataacatcagagtggcaccagattaaaagcacataattatgccattaggcagcgctgcgtgcttgagttatgttttaaatatgatgcttaccagaaatacatttttgtatgaagtaccctgaggctatttatgaatttactgttactggatggaatttaattaggcatcatacatttttaaagatgattatataattgcattagatattctttgtgccaagtacatatttgaacaagtttttttctatctatgtgacattcctattagaagatttcatatcctgtatcgaagaaggattccttatgtattacaagtattctggagttgtggaagacattttcaacaactcattcacagcagtagctcggagttggtcacgtgtgtttagcttgggtaagcactgatgagctgtggctttttaacagccatgagatgtttggaataaggacagactttacacccagattccacccttggtctctgctaagacactcttcgctagctccacattgttctaagtttctaaaatggaattgcagcatggttacactagcttctcaatggtagtatatcttccatcttttaggattttgttgtataatccagcttactagttcacagccacaactaaaaccctacatttctttttagaatatctagttttaagaagaaaaaacaataacaatttgaatttaaaaagttttcctttgacttattttaactgcagagtctgcttttttttttttcttaagagattagtaggtatgatgctagaccctgacaaaaatcaaatcccacccctctggaccccacttgatccccctcaaccctccttgagcctctccctctccaagctcccagaggcagagatgctagaatggaacattgttcaagaggcaaaaatctcagtagcttttcagcatcactgtctccctatctctcaactcccagcatcttgctcacttctgcttcgacctccctgttagaacactgactttttttctacaagtttcagttaaaaccctgggctgctataaacttatttgcaaaagtacctgggtgggaagatctgtaagttttttcttggggttatccccaggatccccctgatttttctgacctcagaggcttccccttgtgagctgagtagaacacaccatccttgcttatttctgttgctaggccaggccctttgcccctttgcctgaggggtgactgaaagtgatgtcaaccgaaaactcaggcaagatgtggggaagcccagaagtctattgaatttgtcactgtcgtttttaatattggcctcatttcttaataatgtgctgtagccttattatacctagtttctttgaagccagatctttaaaatgtatacatgtagtggttccacctcttaaggctcgataatccacagggccgttcttcctcagcaccttcttcctcgtgctgttggttgttgtctagtagaaaggcccacttccttgactgggctgcagtgtgttttgagaacttgttctacaagttcttgtggtctgtaaactggaacttagcaccgctgctctcctgggttcttgctcttagcaccccagctctttagaaagggctaagttgttggtagtgacatctgcttcatgttgcatcatcccaaggcgatgtctgctgtcactcacagcaatgtgaacaatggccattcggtttctgtgttgacagcttgatccttcattgtgaatttcccccattgacctttctcctaacgttgttagcgtctattgatgatggttgcttgagttaagtatttcattggagattgtttaatgagcaagttagcaagtgtgggatgagacctgcaatggccagagtgtccagcaaaccaattgttggagtgacttaaggacagtggggacttaatagagaaaaacagaatggctagactttcccatttactgcatgcaatgtatttcctaccatcaaagttaattgctatttataaatcttattgtgtcaggtaagttttatagtaatattaacttctgtgtgtttatgctcttatagcatatagcatagggtcttacagcataggattacaaggtacagtaccatgtggtggtatagtccattgcccattattttcttcagtagtcagttgagcttttttgatgtttatgaacatgtataaccagactttttaggaaaggcaaggcattaataaacttacaaaggagtggtgctagagagaaagctcagtggcttacctcccttcaaaggattaagtttagttctcacaacctatgttgggtgagtcacagctccagaggatctaattccttctggcttctatggataccagcacacaaggcacatatacacatagagcatgcctgcacacacatgatatacataaataaaattattttcaaaaggggagaatgatgggcttgagagatggctcagctggtgaagtacatgcgaacctgaatgtgagacccagaacccatacaaaatcccagagtgccctgcatgtctggaatcccagtgcaggggaaacaggaaaaggaagataatgggtgctcactggccagccagtctagctgatttgatgagctccaggctcactctaaatataagtaaggtagatggtgattatgaaagacacctgacatcagcctctggccttctcatatacctgagtgcacacagaaccatgtaggcactcactcacacatatacatacatacatacatacatacatacatacatacatacagagagagaatgaatgaatgataaagatgacttcttccaaaacataggagaaatggcagttttcagcttgagtcttacgtggtttggaaagatggaccactgccatgtttccagagtagagagtactccttttaaaggacagtgtcacagcaactgaaattggctcactctccaagcaagctacacgctgccactacagtcagatctggggataccctcagcatttgatgggcatggaaatatattggttcctcctgtgtggatgatcattctcttggtataccatagcgtgcttctggaaaccacattatgacaaggatcatcatcacaacggttctaagagttgggcattcctcccacagtgccttaagtaaagaccatgcttttgactgtgcagttggtgtcaagtaaatcttggctctgaccataaggtattgaaaaaagatgaaacctggaatgatagaagattttgacattgtaaagtgatgctaacaaaagccacagaaagcaggaggccatctgatttaatccatttttgagggggttgggcaatggtgggcaatctaatgcttagatgtttagggagccttcccgagactgcacaactagtggtggttgcttggagtctaaactcacagtagaaaaacaccctaatacctaatgtttatgtgaatactaaatgatataggactataactaacgtgtcttcactaaagcagaaacattccataatcaccagctcacaaatacttgatcatactaacaacagtggtcctgcctctcttcctctcttactattttaatgtctttttttttttgttgtttttgttgaaggaatacagtattttattgccccaaaacattctttccagggccttctgtgtaccctgaagagctgtatgaattttttttttaattggtaatttctcccagcttttaaaaaggcattgcatgagctttgggctgctagctgcttcaagtttcctagaaaatgtctaggtatatttggacggatagtatgttttaataagtatcttgagccaactcacatgcaaaagaaaaaaaaagaaacaaatcgttcctttgatcatttctatttcataaaatcactacatagtctttaaatacttgaacagtcaccaggaaattgacttgggagccaccagggaattgctcatccctttcttttccctacactgggcagttctagacctgaggctttctgaaggtacctctggggaagtgtgtggatggtaggtggggaggaattcaggccctaagtcacccactctggtgagagggagggagagaaaaggtgtctggtgccgacttcctgaggttagccttagttccttgaggcagcgaaggctgcagtcaccccttccctgtgcagcacaggaagctcagagagcttgccccagagctgttcattagactagttaaccgtgttaccagagcgctccaggatcagatggagaacagcatccactcggatacggtttgttctctgatccatgattcatacagtttgtggtaaaatagaaacacgcttggctttgcagcagcactccttagatgtgcccagagaacgcttgtttgctttcagtgcccctaaattacaattctttgtgcacttcctgtttcacagttaatggctgagatctgtgactctagcaacactgttgtttttcactccagtccgtttctgctagaaactacgcagcctgtgtactgtctggaacatgttgcacgcatgtgctttgagaagaacagcatgcatagctgactaatttcaaaaacagcctatttatagtccttcagagtaattgtcagacacttggtctgtgcgcttttgctcacgtcatgtggatcaacatggctttttaaatggagataaattgttttttatgtgtgggtgattcatttgatacttctctataaattcataccccaactgtgtctctgaagtgtgtcactgcagtaatagcccagggaggagttttcaacaattagcattggattcaatatgagatggtgctttagagaacttacaactctgtgtgtgtgtgtgtgtgtgtgtgtgtgtgtgtgtgtgtgtatgtgtgtgtgtgtgtagaaaagggagggagggagagagggctggagggagactatagtgtctgtatatgggtgtggagaccagaggaggattctgaaactccctaatgtattcgtatgcccttgacatagtctcttactgagcctgagctagcctgatagtgagtgagccccagcaacacacttgcctctccttccactgaaccccagagtgcctgggatacagggatatgcatggccacctggctggatacagggatatgcatggccacctggctggatacagggatatgcatggccacctggcttctcagtgtcctcatgcttcatctctccctagctcttactttataaaacgtgctgaagctgtggagtcacacaggacctaaaggactctcgtccttgacctctaacttacaacagcattgttggctgtcacacatggtcttgccttatcatacctagcccatgtgcttgccaccacagagaatacaaacaggaacaggaaacggaagtcactagttactgagctggtgatggttttattgcgaggaagaaatgatgaagtttgaaattctgtgtggaagaatcaggttcctgtttatcttgtagaaagtctaaaacatattaggtattagaaatagtttctcatattatatacaaaagcctcggcatttgtttacacggttgagaactttctttgctgtttctccattttgacttttagggccgagagacaccctgtggttgaatatatttgtgaggtttttgtaaataaatataagagaaatgtgtttttgtagataaacatgagaataaaacatgagttgttctcatggtgggtgactgagacatctcaaacatcaccgtagccctagtcttgcaggcttgtgacatcacttattggttctaacagcgcacaagagagagtaagaacttgatgttgcctagaactgggtgttatgtgagatgcccttttccctcatgaactcaggagttctcatctttgctttctgcccctcaatgagctggcaggtaaagtgtaggcaccatgtctatgtgtaggtgccagtagcaccctccttgtgtatttccccaggatggtgtcatgatgtgacttcgtacatgactgttgacgtggctgtccaatggcatgagacttttgatctcattggtactcaagagaatttgtctcagatttgggctcttgtgctttaagcagtggtagaatagagataagaggggcagagggctcaggctggagctttgggatcatctttgctagggtttctgttgctgtgatgaagcacatgaccaaaaaccaactgaggaggaaagggtttgttgggcctatccttccagcttgctgttcatcatcaaatgaagccaggacaggaacctggaggcaggagctaatgcagaggccatggactgatgctgcctactgccttgctcccatggcctgctcagcttttctcctcccccaataacccaggaccacccacagggagctgagccttcaaccatgaatcaagaaaatgtcctgccaggcagtggtggcatatgcctttaatcccagcacttgggaggcagaggcaggcggaattctgagttcaaggccagcctggtctacagagtgagttccctaacagccagggctacacagaaaaaccctgccatgaaaaaccaaaaaaaaaaaaaaaaaaaaaaaaagaaagaaagaaagaaagaaagaaagaaaaagaaaaaagaaactggcccacagcaggctggcccacagcctgatctcatgttcttagttgaggttctctcctcttagatgatgttagcttgtgtgacataaatctctccagcataaaagctaattgaagaatggaggggacacctctcggcataaaagtgtgggtggctgttagtttgggctgctagatgttgagtgtcttaagtgaccatcattcccttcttatttagaggcagagaatgccaggatgaaggcactgtcagggtcagagttaggaagggcctgcattcaggtttatggatacttcttgctatatcctgacatggcagagaggaaaagtaaaacacttttcttcatcccttctccaagggtgtgaattcatcacaagggctcgactctgcatttccttcacaatgtcccacttccaaatactatggcattttggcttagggttcaaaaggatagatttaggagtgacacaagagacgatctgtggtgtaaccaaagcgatcagtggtttacactccaagggaaggtggcaaggttggttctgagatacaaggaggtgttctgcagagaagggaggtcttcaggggtccaggatggatgtggaggtgaagggttgggagtgggaatgggagaaggaacagtgttggtagaggtcaggaatctagcacataaccaaccagaactggtcacccaaagccaggagagcactgaagctgagaggtgaccttgtctagggtgtttgctgtttctcacaggcctgctacttgagaagtgtttgctggttgagagtagcactatgctcaagcaagtgagatccagggtcccgtgttagtggcaggcggagagcaggaaagaaactagcacagggtcagtatttgtccaggcttgagtgattagtccaggtattgttagtaacagcgtctttgtgcactcttaaagcagtgatgtgaatgtagttgttaaatacagacacccagcgtgcatgcacatggttgcagagagatactcattgcgtgtgtgagtgaagatttgtcccacaggggcttctgtggtgtgttgaccgtcattggagagacctggttgttctctttgcatatttactgtttgaattctaaaagacactgtgccttgtggttccctgagctctcttctctgggtttgttttagatgactgtctgtttgctcagctaatatggaaacttgagtccagcatattgccatgatatctgttattgtagctcttctggattctcttaggagacagtggtcttttctgggagctcctaggagcttagtaaaccccttaagacatagctggctaggactgtatagaaaaggaggcaggggaatgcagaagaagaaggagaggacgctgagttcttttactttccagcctggtgagaattggtttgggaagccttattttccttgacttctgggaaggtaggggtgagggagtgaggtcagcgggaggagtctggggtcctcagagttgcttcttcaggcagaaagtgccccaggcttatggtacttgtggtgcttcaagagtgaggtttttatttgagccgttttatttgaaggctaccatatgtagattattaccatgcccgaggtgtctttgtttgtggtgcaaggggatggaagaccctgggtcctgaacgctgtgggatgggaaagcgttcccatgggacatgcctttcccaccgtggggttgttcctgtgctcacttgattatgcattgaggttttccaggtctggctagaaacaggaatctgttgttccaatctttgagtcccctgtagggctttcctgcttcctgaagttgggctcctgacactgatgtggctgtactcaggcggatgtggggttatctccacgggggctgagtgcgcttcagaacgccctgtctagctcactcccctcagctggtgcttgtcggaagctgagatctgcaggagtagctgggaattcctttataaggcggtgtctccttttgtgtttctatcatttttgtttcacgcatcctgagtccgtttccctaagggccgtgacaccagcaggcctcagggagaaagcctcatcgtgctctttgaatggcatctcaaccatagcatccaagcttggctcctaaaagtgtcccacagggctgaaattcagaaggtcttcttagcaagagatggacttgggtttcttttccttccctctgtagctgcttctagctgaacttttcctttttcctccatctgcttgataactgcaagtgagtctcccgtctccacccaccctatcttgatgatttgggtggagtggtgtgtccctttttaaaaaacaaagcaagacaaaaacaaaacccttaaaacacactaaaacccagaagggcagctggggagtcggtagtgtgtgctcagaaggtgcacccgtatcctgttgtcagagctctgcggtctgtcccgtggttctgcactgcatgccccttattagtaacaggtagacgccctgcagtctggggtgcatatatctggatcttagtgagaccccagctctcgttagccaaggggtctatcctcacttcttttctctttccagtgctttaagttaagacacggtgtgagaggatggaattccactgtttgggtccaccttctgtgtctgcagttcaccaggcaagtaaagtatctatctgcctgagtttgtttccttgcgagtagaataggaatggtgcccttgagtgggttcacagcagtgcagtcacttgccccatgtgcccgtgtagagaaagcactcagtaagacagctggcaacattgcaggtgcttggcactgagagcatgtaccacaaagctctgttcttgaacataggcttgcccgcgtgtttactttctagtcatgtccgagtgagccttctggaaacgttacatgcatttatggggacagcacagctaaggcactttgaagctgagtggtgtgtccaatcgacccacccctccacatccagattcaatattcacaggataataacagtgttattaatttcgaggacagaggtttattctagtgtcccacaaccagaagagtcacaaaggatccgccagcactaagctagaattgaaatggccaacctggacagacatctgctgcaattgtaaacagtatggaaccttacagtatgtcttataccaaatggacatcattttaaaacacttggctggtgtggaaaccttcagggatgcaggaagtaggcgtcccaggcacgtctaggtgtctgtataaggctgcatcaaaagggatgtctctagacattttctagaagagttggtttctagtggtctgaggctagacctgaggtctccacgtataagggtgagtccaagtctggtcttgctgctgctctgtccttggcctggtttccactaatgtcccttcttgtacttgcctaggcctttcctgttccctagctacctctctggaaaggcctgcagaggccttggtccctcttcacctgctttgtttcccgtcctcaaagcttatcaggtacattgtagacagtgtgtgtgtgcttgttattgctggcccttccatcttgtacgagcttgctctgtgcacacaggcatgtggtgtgtttgtccttaatttactggagcctaaggtgtccttcagcctggggaacctcctctcaggctagctaaagtagcaggacatgggctctctagctcttcatccctgaggatggctgaatactcctctgtctcagtgagtttgcagacggaaaggatatttggggagattctgcagaatacgttattttgagatccatcttggtctgaagttaagattctgggagaagtgaattgaaagccaggcataatctatgcctttggcctttaacagcttttttaaaaatagaaattaggaaagtagccatgtgttcattgtacttgcatttgtgtgtggatgaatgaaggatattgtctgcactgttgctctttgttctttagctaagccatgtgggaaatggcttctacacccgtgtgctaggagtttttttcctttccctagagaaaaattggatgctatttttttttcttgcaaatgaaaaatatgtaactttttggttctggacaccaggaagcaggtaattcagttaactttcagacctggaaattacattattcctgacccactttgtgtattggatcctttgactttctaattctactttatttatgtacttgtatagctaacttaatttatatgtacaactcaacatttatagtgccattagttttcttgaaaaaatggcaaaacatttaaaataattttatgttcttacatgggacactgaggatggtccttctgtctctctctttctttcttcctttctttctttctttctttctttctttctttctttctttctttctttcttttccttccttccttccttccttccttccttccttcctccctcccctccnnnnnnnnnnnnnnnnnnnnnnnnnnnnnnnnnnnnnnnnnnnnnnnnnnnnnnnnnnnnnnnnnnnnnnnnnnnnnnnnnnnnnnnnnnnnnnnnnnnnnnnnnnnnnnnnnnnnnnnnnnnnnnnnnnnnnnnnnnnnnnnnnnnnnnnnnnnnnnnnnnnnnnnnnnnnnnnnnnnnnnnnnnnnnnnnnnnnnnnnnnnnnnnnnnnnnnnnnnnnnnnnnnnnnnnnnnnnnnnnnnnnnnnnnnnnnnnnnnnnnnnnnnntctctctctttctctctttctctctctctctctctctctctctctctctctctttctctctctctttctctctctctatctctctctctttctctctctctttctctctctctttctctctctctttctctctctctttctctctttctctctctctttctctctctctttctctctctctttctctcttcctttctttcggtgtagatggtatataaaatgtgtgtatgtctgtgtgtgcacatgtgtttatgtgggcaaatgtgcagcacagtgcccatgtggaggtcagggaacaaccttggggttacttgttgaagacaggctcccattgtctctaatgtgtattccaggctagctggttttaggtttcagaggattctctgccatcttgtcggtggatcactgggacagacataaacagaatagggcagaactgcaggtgggcatagccgtcagagcccattcctaatgacctcctagcctcagctttatatgtatgctaaggattcacactgaactgagccatctctcaagccctgcagccaaatttcttttggagtgagaccacctgacccagagccttgcccatgctgagttatatccctactccttaatgttttgctataaggtattgaattaataattagttaataaacccaatgcagggttgcttcccacctcagtggttgatgttctggaacaaaacacacacacacacacacacacacacacacacacacacacacacagacacacacacacacacacacacacacacacacacacacacacacacacagcctttacattttaacatgccctaagcagaacaatagctgcttaactgcctagcctccgtgctgctagactctacctccctcagataatcccgagttactacttactagtttctgtcttccatcttggctgctcttaactccaatttgtcagccttctgggccacgttttcttaaagcagagtctggggtgctctcctggcttctataccccatggcagcctctgtgtctcctctctcctaaggtgtggtagatctccttcctcttctcctggtccgtaaaatcctgcctctgtctgtcctctccagctattggctgctggcatctttatttaccattcagaaccaactgggggcaggttcccagaagctatacaaaccctcttgtgcaaacaggttttttgggggggcgggaataattagcatttgtaatataagcatgtaattaaggtaatgatgtatgtatgtatgtatgtatgtatgttaacctgaaacatttgatcctcctgtttcagtctcccaagtactgggattagctcaacttgaatttaaaattatgttgctgctgtgtgttttacatcagagagagggtctggaatacagaacgcctgtgtttgcacaggtaggctttgtgtttgtttggctttgctctggatagcagttttatggttgtcaggttgaatgtggtagtagatgctggccagtaatccgttcagctctcatggcttttacccgatttattccaatcgtgagattcttagttactttcccctttgaagttaaatatttaatatttcagtgcggttagaaacctgccttctgagtactattatgattctccgattttgctgtttctaggacttgagattttctccttggtggtgtagtaccttctgtttctggaaccccaccagatgctgtggccatttacaaatgtcagtgtgcataaactacttaggagagagctgcactttaattggtccttaaagttgtgccagtgggtaactattttagctgaaaattaaggaaagaatttacaaaaattagtttacttgttcctttgagtttaatgcttgctacaccatagacatcttcccgatgcttgtgttgggggtgcattcttatgagaggccatggaaatgaatagacaataactttatttccactgtaattctgactctgtctttggatgagttacttttcttgtttctgagatagactacctgacaggaagcagttgcaagaggacaggtgcttttggctcgcagcttcagagggattgcagcttgctctggagtggtgggagatacggtgccctgggagatgagggtgtgatggtgcccttgctttgagagtcacaatcacaaggtccatatttggtgacctactttccacagctattcctcaaatttaaaggcttcataacgtatccagatagtctttccatttggggagcgaatgtccgagcatgtgagctggtgcagaccatttcagactcaaacagtagtagccttacgagaaaacatggggtcgcgttcttaggttttgcttgagtttaaatgaaaatgttgtgtcttttttggggagtctggccgagagatgattacgtgagtgcagatgaaatcactgagcacactctggacagtttggattctgttaccgtcagccctcagcagtgatttatgaggcaggatacacagatatcctttcctgcccagttctcctcattttaatctcttctacaatagtcatagttgtctttactgagaggtgagtgagagagcaagtgtgtgtgtgcctgagtgcgggtgctacagagacaggaagagggtatcatatctccttgggctggatttataggcagttatgagccttcctcacatatgtgtgctaggaactgagctctgatcctctgggatagcagcaagccctcttaacggatgagccatctctccaatcccaatagttaaaatttcattttgtaacaggaattcccaaaatgacttttttcttctacaagaaagtatagttcgtagctttcttgccttctgaatggcttcctgaatggaaaataagtcctgcgggctgctgtggtttattttataaacagggctagaaagcgaacagcctggcaagctcctcatctctcagcaactctgagacgggttccgcgccccagtgaagacttgtcatatttataaaccattattatttcagaatcatcaaaggaaatgtgtagcgatggcagggaagcagcttgcttattctggaattttcttcactgtatttttaacattgaagaaattactaggaaagctttggcaaagtgaagacagatgcgcaaagatgagactgagttcgtggactgcgttaaactcctgagtggggcagtatctgtatgacatgggacaagccggttaccctctggagtgtcttgagggaagctgggggggatgcttcacattaacaaaagctttagatttagaaatggagactttatcattttactctgtgactgctccttactttattcaattttagcatagatgtcagctttaggactatccagttgggaagaattttgactaggagccattcttaaatgagtgtacctctttcaaaaaaaaatggttttaattaactgtacttcctgacctgctgtggtcacagaaatcttaactgtccaaagatgtttaggagacaaagtggctcattttcttccggagtgttatgtgaatagaaggctgtggattaccagtatacattttcttttcttgaaaagcaagttcctttttacccagcagggtcagtgtggatgtgtgctttgataagcacaggttatagcccgagtttaaaggactctatatctgggttcaagcagaaatcatgccgctgccatactgtgagctgaagggcaaacacagtaggcagcatacatttcggaaagaaaatactttctaaaaagttatatagttttaaacatttgattttttatttatgtttatatgtgcatgtgtctgtgtgagtatttgtcatgtgtggtgcccctggagccacaagaggatgccatatcttccagagttatagatggttgtgagcctcccgccacccccagtatggctgctaggagcagagctggggtcctcttcttctcctccatccctggctaccactgttctgtcttctttataaatgtgaccacatgaagggctttgcattagtgcagtggtacaatatttgtttttcatcttactgcaccgagtctgttgttctgaagtttcgtccaggtcatagcacgggtcagatgttttctttttctgggtgaatgatttcccattgtatgcagatagctcattttgcttgtccatttacctggagctggatatttttgcaaggtgtgttagcaatctactttaagacacaaatgcaggagaaaatgggtgacataaccactagtatattatgacacatagatgtgggtctgggttaggacctgttgttttcgaggggggttgggaatggatcttgctgcctttgcctcctgtgcactgggattacaggtacatgccagcactcatggctggagtcccggggtaaaatgcttccttaccatcagggattgactgggaagtgtgcatctgtgtgacctgctcctgtggctgctgtttgcctggtgtctcaggtgccacacaacaatttttttctgagtttttatgctttgtagtgaggcttagtacagggtgatataaacacccaatatagaaaatctagaagctctggctcctacctcgttctatgaaagaagctgtgttccatgaaagaggctgtgtccaattctttattgattcttttggataatttacttttatgaacagcttacggcaaaggccaacaaaatctgttttcatgaaaggccaccaggaagctgcattgtgagtataggatgtcatatttcctttcctgctgtgcacagatggggtgcagagtaatgtagactagtctgatctctgggataaaatggatctggacgcagacttcctgctaccggctggttgtgaccagatatgcacaaattagaaagcaatttcttttcttcttgcagaatttaaaggaccataggtgacttgtgttaaaagtaaagatacattggggaaatatatgatgtaatattattaaagtatcacataatctatttcttttgtttcatgtaaatttacggatatagttacatacggcttttcctgtgggtttaataagtgatttatttgtggtccttatgtttttccttctatctcccgtgttggtcagttttgaatcactatatcacagtctgttaatttgatttactgcaaagagtaaggcctttgtcgtcatgccaactactatcccccgagcgcacgcacgcacgcacgcacgcacacacacatctcctaccaacccaacactagtctgtgggttctcctcagaatgggcagatagcaaaagcaacaaaaaccatggcttgcttttgagatactgagtaagttttatgtaccatgcgtttataacaagtggttcattcttacagagtcagtcaggagtacttacattaggatgcctaaggaaattttacccagccatttgttatataccagataaaagacttttgggggaagggttataattcaattgtgtgggttggcaggggagttgagtgaatgtgattgaattctgttctcagtgaactgggtttttaaattttgttttgtttttctactttattattatttttaacaagcacactgaaactgaaatttgctagccatgtcttgcaggttttgtaacacctttcacattggcagctgtgcagtgcgtgctgtgtggaggaggctgacgtacagaaggaggcacagatcattggcgcagttgctctttaaaaccccacatgtccagtgataaacttgggaggaataggagagaatcacacaggagccaggcagcattgtttgcagtttctagggtctctaatggaactctgaatcccacagtgcactgtgagagcgagcagcatccttgggcatgcgtggtgactgtcctagtgttgggttggtaggagatatagctcaagtctagtcttctccttgtgattggatccacaggaagatctacatttttaagtgagctgtgatgtcatgagcacaccataaggcatgcatttctgatttgccccggagcctgtgcactttataatgtcagggtgatattgcaaggcagatctgaagagccttctgtagttgggcagagtgtttataggtagtcaggagtgattgattcagcatgtgccagatggtgaagcagtgtgaatgttggctgagggtggcatccatccaggactgtgaggaggtctgacttttagctacaaggcgtattgtcacagagtgagggagctgcttcatcaagaacaaatgtttgcttttgtaactaggtttcaattaactgacaatgaggctatttactttccaatagagatgaggtttgcgcatctgactgaacttttcttgtagtgatggggatggtgcatgtatgctctgggtctccaaggatagtagctgctcttggcttggggacagtttggtttgcttcatttgttctggtcttgtgttgtagagtttctgccttctgagacctgtatttgtcgctcttcttggtttccagtggcagagtgttccttcaaggtgtcaggtccttgttctgagtgcctttctacgtcactgtcttggcttgtcctgtgtgctcttctattctgtgttcatgctttctctgttcttgctccatgcccacttctgttcctgtcctgtggtcagccagctcttaccccacctctgtacgctctgctttttggcagcctgcagcctaggagagaataccgtgtctctcacacctagaggcctttggtctgaaaacaggaaatggagaccctgccctgtagtcagtcttctgtctctggctccctagaggctgaccttagccatatgtcttgttagccctggtcctcagtcagcatgaactggggacagaagccccagtttggttgtgactggggtggctctggtatagtgagtctgtgacctgaagacttacttgcacaggacatgtgactttcagaactcacatcaagatgagtgggacacccttctctctaggatgccgctccagggatcactgctctaggtcttgttagtaacaactgcttctggtccaaacttctgagatctcactgttggatggaattttctgggctccctttaggaagggtgagtccaggctgtgctggactccctcataagcctcctgctgtcctctgctgctgctctctcccatgcgttggctctgctgtatcgaatgccccccaatggacaccctggcatcccttccatcctcatcctcaccacctgctcctgtccgtagatggctgagcccagccagagaaagtcactctgtaannnnnnnnnnnnnnnnnnnnnnnnnnnnnccccacccccccacccccgcttcggagggcctcagggcagcctggaaatggaaccctttcctccttggcccacgctctgcacagtgactttgaatgttttctatgcttcccccccccccccccgttaatttattaattcattttcaaacctggtcaccaccccctcctcctcctagtcacaccgtcacatgaattctggagtttcgctctcacatctcattcccatttcattctctagtcagtaatcctcccaccacacacaagtcagacaggtaaatgctgatattgccggttcttcctgctgaccttagatacttctgcctgctgctggaccccaccctcaatttgcatactttctgttcatagttgaagaacagtccctcttaattcctacaaatcacaccactagcctatttttatatcctcatttgtcaaaatatgaatgtgtttaataacatgctgatgtctgttttatatacccttctgtgttttccaattttatatgatttatcatttttaaagtcagagcaaagttaaatgttcttggttgagtgtgtgtgtgtgtgtgtgtgtgtgtgtgtgtgtgtgtgtgtgtgtgtatgtggtgtgtagcacacatgcccaataagcctattattcccttatctatgggttacattataaggaaaacactctgattccaattgggactgaaatactcttcccccccgccctcaacttttctactgaacaggtgagtgtggccttcctatggctgccctgagagtctagctttccttttattttggtagtggcagcgagcgtttccgatgtaagaagtgatgtgaggtgagcttagcacgctggaacagcattgcctttgctcggctctgttctggtgcatgtggaactgtttccttgcctgagagcacggcagaaggtgtctgtctgtcctggggtgagcacggcagagggtgtctgtctgtccggggctgagcacggcagagggtgtctgtctgtcctggggtgagcacagcagaggatgtctgtcctgggttgagcacggcagaggatgtctgtctgtcctggggtgagcacggcagaggatgtctgtctgtcctggggtgatgaggacattcctttatgcctgggaaatgacctgacacgagctggcagccactccacgggttagtgcctgggtcatttgcagtgacaagtgtgttacttcacagttttgttttttgaagacttatttatttttatgtatgtgagtacactgtagctgtcttcagacacaccagaagagtgcatggaccccattacagatggttgtgagccaccatgtgcttgctgggaattgaactcaggccctctggaagagcagtcagtggtcttaactgctgagccacctctccagccccactttacagttttatggctggaaattgaagtggtttcaacaacatgagggctcactctctgcttactactgggtttggcagtagttggcagctgtgtggctgaggcagcattgtcccaaaggagtgcagatcctaggctattgtcctatgctggcaggaatccagatctgatggcagtcacgctcctgaaaatgcagaggtttttcatgttttcctctccttgatttacacctttatgctataattagtgattactaagatgctggaagactccacacagcttccacagagcaagaacaaagcagctttgcatctgacacctgtcatgttaaagccgagagtgcatcatcacgtgggcaacgcttgtgtgctgctgcgctttgctgacgtgtctcccaggatgtgttggtggctttttggccactatggaaggcatggctcggtgatggaaaactgcacgacgtaatttatattctaataatgttttctatgaaaagaccatttgaacctctacttaaaacaatcataaatgctatacttgaccgtatccttactaatcattatccttggaaacaggctaatttaccgtccacccactttagcacaggttctggagaatagcaatgtactctaagaacgcctcgtgctgtctcctcagaagctgaggctgctctttactttcagctccttcttgagtttggagctgtcttatgaagtagacctggcctgaaaggattttcagactttgcggatcggaaggagggttgttattgtattaccataaccacaactgaatggacctttacccttgcctgcctgtgatgctgagaccacggaagatgcacgctcccctccccaccactaacctagatcctggtcactttccctacatgcctctagaacagttcccatcatgccttgtccttctgaaggatctgtcaccacaggtgtctgttactgaccgcatcacaggtgaactgtctaggactctagaacttatgtcagtggctcctctccttactcagccacatttcctgtcactaaccaagtgacctccctgtcagtcacactggttttgcccctttgtgtgcccaggtcctctgtaaagccgtcctgccaggaccggccacagcctgtttacagacgtcagcagagctttccttctgactactgtctttcccattgctcatggggccaacattaggattgagccgtccagtcacccagtcagaggctgtgggacatttaggggcactgaggacatcctattgattgaatgaatgtgttgtgtactgcccagcctgcctggtgaaatgagcttggataggccaaactatggactcagttttctgaagactgcaaaacactaaatccatagctgcatttagttcaaccagggatgaacctaaggtattgaacgtgctagacaggtactctaccactaaactttgctccaccccgaccccagtgctttcctttccagacaaaatctcatgcattacccaggctatcctcaacatactagaaacccaggcaagctgtgaccttgtgatcctgatctgctcagcctcctgagtagctgggattagaggcctgcatccccaggcccgatggcagtggtattgaagtctccatgagcctgccctgtttacatggtgatgttgtagcgcataccctgtagtagttatggccacggtgattgattcacttttaatgtccttatgctaactggtttgcatggcaatacagtcagcatggcctctaagagtacagctctgttgaacctttacaactgagaaactgaccattttctatggcttttttcatgaagtaattgcccaccctttctgtttagcttctgagaaggagaatctgagttcctcgaacactatgtgattctactcagcagggtggattatcagggtgctgatgcattttggaaagggcagcagcccagccccgatggtctgctccacaggatagatgtaccagacgcctgctcagcgtccttcccacctgacctccacctttgccatgttccctgcctgcagcagaggcagtcaggatccactttacactctcagaaacagaggcagaatcacaggaaaatcaggctcaggagttcgctagctagctggcctctaacaatatccccatctacttctggaaatttctatccaactttgttcattttctggcttcttagaaatttaaattacatgtttactaaaagcaagcagtcttttgttagttacaggttttagcatttgtagcaaggccagaacattccctttcatatctcagggtgaaacatttcaattctgtcagagctagagagaggtgttggagttttggaagggtgactgactgtgtttagctaagggaggtgagtaattatgggttttgttctgaattccacagtgtagaggtgcatagctcagggatttcagggatatgagaggatgctgcagatcaagggaggaaagctttgggaactgggaggggactcaagtggagggagcttaaatgtgaactttgcccttttggaattccaagcttcttgactttgggtaggttgctaatctcctgatttctgctactcctcctactcctccatcagtaaggacacaaatacttgctgcatagaactcccagggatttttagagatgagatccaagtgttgcaaacaatgcctacaatgctgtaagcactcaaaagttccctggtaatagagtagtgcttcagcgagccacttgtagaccaagccatgtcactcatggaattactgttacaagtttcaaagaactgataacaaacctattttaagcacagctttgcagtagtgaacaggcccggccaaggtgggtatttcataggaataaatagagactagaaattaatgttttctaagacccgtgaaaactccttctatatcactgtccaccagaacaggatggatgaacgggctcacagattgtgcctttttccatagcaagtttactgagacacttcatcctgttaacagtgacaatagagtgctgtggggatgatttggtgggtgggtaaggcgctaaccacacgggcacgaggacctgagtttgtctccccagaacccatggaaaagctggacactgtagcacacatgcttgcaatcccggtgctcgcacacggagggagatgggagacctaaattgtcagtcaagctagtgagaccctgcctcaaacaaggtgaaagatcacacaaggtgaatggcggctaggaccaacataggagattctcctctgacccgaacatggcacacatgcacgcacgcacgcacgcatgcacgtacgcacacaaacacatgatgaccacacatttgctttctgtatatttggagatacatccatgtataagttagaggtggcctgtgttctcatgtcactgtcagataacaggtgtcacgatgggagaggctccattccaggttaggggtgctaggtgtacaagcggagtttggtagagttctcaagttggccgaggggcagggccatggtgaaacagtgaagtgtggggagcaggatgggcagggtggacagggagggcagggagtggcaggtcctgctcagaggacccactgggcagagccctggcacactattgggagaaagccaattcctgctacagaaagtgtgactgttcccttgtgttgttggctgtttgcacagagctatcaacgctgagtgtcttgggaggtaacagtgcagaggtgtgtgtgttctcaccctgcagttacactggaggctgtactgttttcagcacaggcatggctgctactgaagccaagcatggcctggatgtttccccgtgtgagtctcctgtgagaggagcaatagcgggagtacagcataggcttcagtcatgtgtggatcgaaagcggtcacacactctagtgtccagagcagggctcgcactgcgtcagggctttggcagaggacgacagtgagatctgggttgatgctgacaggctggatgctgactggtatgtttccattttcaacccctgaggcctggcctggccaggatcaattccggaacgcagtatcagcacttgtaattctaagtcttttgtgcatcccttggaaggaaccacttgggaaaccttatcagttgcagattcacaaccaaatcagtggccattgaagtgcttggttcgaacaccaggaaggagagaaccctttagataaacacttaagttaagcgttgttaggtaaagtgtgtgagtgtgtgtgtgtgtgtgtgtgtgtgtgtgtgtgtgagtgtgtgtgtgtgtgtgtgtgtgtgtgtgtgtgtgacagaattttgagaaaagaatgaaatattttatgtcacatagaaatattctatgctttctgtatattcctggtcctttctaggttctgaggagcccagtactggtgtggagctgcactgcaggcataagcctttctttggattcctgtggatcacaggcatatttgcgtgatagatgagaaaaaccagacttctcttgattctcctttctggagaggggaaagtctgtgtctctgaaagatgtcacatatagcctaattgaactgcctggtgtagcaatgcaattgtgtacctgcatgtgtgcactctgtgtgtgtgtgtgtgtgtgtgtgtgtgtgtgtgtgtgtgtgtgtgcgcgcgcgcacgcgtgtttgtatgtaagggtaggttactttctcagggtacaggatccgaggggtgacagctactttgtgctgatgtttcttacccttgggcctgtgctcttggatgaggtcgtgaatctgagttaatgtaagagaaatggctctggagcagatgtaatgagaaacactaatggacaattcttccaagtcattaaggtgaattttttctatctttgcaatgaacagtttaggagcaaaactaaattcatttctttctaatagaatacaaatataatttatagtaaaagctaaaaatgaggtgagataaagccaaaaaaaaagttagtctcacaaaagcaaagattaaaatgcttaaattttatattacaaacactagtctcagataccctgtttattttatagttactctgatatctctgaggggatgagtccaaattcatatgtgttagtacttacatcagtaaattgagttttgttagatttagctgactgtgtcttgtgtcatagtaatatttacttcaagttaaaagcaaacatttcttcatcttattaagtagatttataataactgtgtcctgttttctgaacacttaaatataggctacaggtgcatttttccaaatgaagatgagtactctgggttatcatcctccctattttgagataagtagagatttcttaatacttgagatggactttaaaaaatagttaatgatatatgtaaaagataaaccagggagctttatggttggtgatgatctgcgcgtgcgagcgtgcacacacacacacacacacacacacacacacacacacacacacacacactgtagctatgataacatttaaaatttaaatttattggttttacacgagtgactgcttaccataataagtttccctgaccacggttgagagcatcatacatctatgcatataaacataaatacctacaggaccgtcctgcatatttagcattttagatattgtagatatttagcaaaacaacatcactagcttctcaccttggacctggaaccttccgtagctatggttttgaccatatgtactttaccgtgcatggatttcctcctgtggtgcaggcctcagattcagtgaagagggtgtttgtagccccatagagtcttgcttcagttgaccagtgggcacttgtagcatggagggtccaggactggggaacacctctgatgccttctaccctgcagcccacatagcagcggccagcactgtgagagctagcccacaggacagggagtttcctggtcagttcaagggtgatttctctgtcttttgcaaccaaggatagcattttaaaggtctaatgtttacagttgtttcccacaggaagatgtctttcatccacttagtttaatctagtgtatacacttagcctgcttccagttaatagtcaagtgtctctctatacccactttcttggtaaaggattgaagacttgactaatggtgtagccaggaaagagaaaatgtaaccctgtttggaaaagccctgtcggaacttattagcaactctcctggtttttcctctttcccaaacccaagttcacgcagtcctacaccacactgagactggactgcccggggcagaattcccggcatagttgaggccttacccctattaatttctgccagattccccaagccacaactggcccagtccatttcacaccagcaaaattcgccttcacctcctccctgccctcttgctgactgtgccaaaggcattgttatgtaagtatgccaagggccagtggttttgccagggcactcccatacctggttggtgtcccagactttatggctttctgctgccattgtcttggctttgaattcagcctgacaactttgactgtttgacaaatgttagataacccacctcccttcctttagtaaatataccagtgctaagtattatatgacttgtacctgatggaataggccctatttctcaaggccagtggaaggaattcgtgggggaggtatgcttgaggggtggggcagtgggagggtagaaggagaaaagatagagaagaagtcaactgctgattccagaacaggcaaagccggcttctctgggtagacacaacaagcctgtgtgtggtgacaaagcccagaggacaggccagagatggcagtccgcgcaacaaggctgaagggtgacggtaaggagagctccaagggcggtaggccagcacgagggtttggagatgagcctgggctggagtgctgctctgttcactgcagggacttgggcttgatggctctgcttctcagagggcagctcagcctcagtactgccaaagccctgtctgtctgtctgtccagctcccactgtgctcggcagtgtttactcattgtttagctgtatgcttagctgatctgtggtgcggctggcttgacttgctcggatgctgagacttcttaagctggtttcggtgtgtggtgttaggcatcaaacccaggtgctttgtgggcaagagctatacccctgaggtacacccgggcccatttattaagttctctcttttgctgttactatgttacatttctttttgtcagcaaggaaacactttgtctcctaccatctgtttctctgcaactgtccacgtggcaggacctgggtcctgatgttttctttctgacacctgagcctggggaacccctttgccctttgctgactgtcttagtggaactttttttttttttttttttttttttttgagtttctataagtgagtagcctggaaatgttgctcaagttgtgcttttgcctagcatactgaacactttgggttccattcccagcaacgcacgcgcacacacacacacaccacagttacacagatagaagtattgttttggtattaaacagatcttcgtactgagggggggggcggggggggagcctcacctgtcatctcagcactggggaagctgggactagattaccttgagtttcagggcagcttggcctacagagtgagttggagaggcccatttggactacatgagagcctgtcttatgaaaagaaaacagaaatgcggggcaggattcttttagcaactcgttgtacttttaaaggcgcatggaaacttccagcagagctgctgtttgcagagcatcatctcttccgaaccgcaaatgcttgactttagcgattctgatctcgcagccatcagctccactatgcaaccgttaaacaaccccctctcacagagcagtcacagatgcctttatctgtgtgtacatcagggagggggttaaagattatcgggagaattatatttgttcatagtgatataggtctcctctctccctgatggaagatggaaagcagactggccgagagaattttgttgttttgcttccatttattaagatgttttccaaaagcagtgtcagaaatttacttataaataacaaaacagctacaataaatcaaatgttcaaaagtaacttttcagagttcttaaaatatagtgactcaacacatgcaaatttcttttttaaaaatatttatttacttattagtttaagtgtgtgtgtgtgttggtgtctgtgtgtacatgtgcaatgtgcctatgcagtgaagtcacaccttacattctggatccccttacttccactttcttggctgtcagtgcagccatttgcccctgagcctggctctaccattcatgtttaggtaagtgagacaggatcttctgagcttcaggtgggtcctcagtcttggagtcagtttgggaggtcacagtgagcttttagaagctgaagcgatgggcatgtcagaatgcgcagcaggtaggagaatcatgagacgggtcctttggaaccttaacttcatctaattgtagggtctgtccatgtcactgtgtatagtggcttatacacagaaacatttgaaagtcactgatctgggatagtgtaggttttacccaagtatttcagggtgaatttaattatgcacaggggaagtgctggttactatgtctttcttagctcttttccacagctaactgagtaggctcagagggagcgttctttagaatttaagaatttctgagttggaggccagcctggtcttttccaggacagccaggactacatagagaaaccctgtctcaaaaaaaaaaagaagctggtggttacgatggtgttgttttactgtgtcctccttccttcactgtctcccactaagatctttcaagtcattgtgagccacattcagctgatcccattgtcacatgaagcatgacgcacggaggaggtgaccactcagactgtaatttccaaatttaagtgtattttctttgttctacactaaatataatagttccggatccttcatgatagaatcaagctatgtgtccccaaaagcagatgtcttagaaggtgagtgtgtgtcacgcacacacacacacacacgcacacacacacacagtggacagtaagggaaggcagactaattctgtgaggtcaaataagagaaactagtatcccttctaccgtgaaggctttgaaacgtggggactttggagactgtggtggtaagtgaaggtagaaatgagagctgctgttgaactgataagtcagagggtgaaacggattattacttcaatactgaacattcatagatgaaattaggatccttccctccctacctccctcccttctttccttccttcccacggagtcttgctataaggctcaggctggccttcagttcatgatcccctccccttttcttcttttttcctttgtggtgctgaggatagaacccctggccttatgcagctaggcaagcggggcaccagccctgatggactttcttcctaacaggttacatgcattctgtgtttaagtattttctaactataaaatgaggttttctcatatacttggaatcttattcagtatgatacttataagattgcaaaccagaatttagttccaggttttgttcctttatttgtcttgaaaaaaaaaaaaacttttaaaagaattgctcattcttttcccttatattttttctacattttactttcagcatttgatctctttaagaaggtagaatcattttttttcacattagttttttttttcccccacaagggaagtcatgatacatgcgccctttgttagagaattattttataattgttcatccggaagcaattcacaagttcctttatagccaactgtagtaagggtgaagctggtgttgtgactgtgcagacgtgtcatttgtctgtgtccttcttatttacttagtcaccagtcgtccctatgtttgtatatttaaagacaggttcctttaaaagtaagccctgcctcttgcgacaccaactgtgagagaagtcggagctgagggcaagtctctgggtgctgagttactgggtaatgaaccctgtggcagcaaaggacatggaaacgtgtgggactcggttggctgctgggagggtgatggattttcattgcattaggaagggcatggggtacagctcccactctttacttgctcactgtagctgttaagaaggtttgtttaaggaagacatgttgcacgtagttgaagttggtgtttggctgcagtactgtccgacagtcataggttgacagctgtgccatgggttgctggagtgagcaagtagatggggatgtgttggttcctggggccagagccctaatacccagtaatcagggtgggccacagcctcagtggtgggaggttggtgttttcacatacggtgtgggagggtggagcaccacggggagttgtcttaggtactgttctgtggctctgaaaaggccgtgactgaggcaacacctaggaacgaagaatcgaatcatgggcttgctctacagcttcagaagttagtctgttatcaccatggtaaagagcatgccagcacacaggcagaagtagctgagagttctacatcctcatctgtaggctgggggcagaggggggcaggaacaggacttttaaacccccacagaatagatgtggccttgttgtgggaagtatttgggttctggggatgtgaactcaggttgttaggtttccatgcaagtatgggtactcactgagctgtctctcattctgaattttgaaattttttttttattcagttttggggatagaatttggatacttgcatattctaggcaagattctaccactgagccagaaccccagtgctggagtgttttgtaggcagtgagcatccttccgattcccctaaggataaaggtcattatgccttgcagacatcatggcacctgaggtgtagccagcttattctagctcctcactgcctgtgttccttgtttgctaggaaggcagttgctgttttcctcggtctgatttgcagagttccctgtgccagcctgtggctggatagccagcccggggcttaagttgaatcagcttcttaagttgaatcagcttcaggattgggtgtgtagggggcaggttacccaggccactgtttatagcaaggcagtagtttctgggcgctgaggtgctcttgtctttgtttgtcttgtggctcctcagggcagcctgtgggaaatgggaaagtggaaaggcctggtgtcttaggaagacaggcctgcagagggagtgaaataatgtgtggggttcattctgagaaagagttgaaggagttgacacccctgcggtgttcctgtgcccacattgactacaaatgtgcttacatctggacacctgccaaacctccttcctataaacgggtgtttccacacagtgaagctgaggcccaggaggcttctattgaaaccttcccatccttactgattacagcttttgctatggagatgctgtgggctctaaatacttagaagccatatattgtttctcattttccctttcagctttggagctgaggcccaggggctccttggccaggaggctgctatgtccacgaagacaggtgaacttagtatgagttggtttgttcagccaccagcgtgaactgtgacagactgggtggcttgttcagcatgtctttctcctcttcagttccagaaggctgagattcagacacaagctgtgtggggtctcgctgtggcttgaccactgagccatccctacagctctttgttccttataaggacactaatcctgtcataagtctcgtggtttcctttaaatccacgtacctttcaaagaactcaacttaagaagctctccctttgagggtggattatagacttagctcctttgaattttgggggaacataattcataactgtacatggatgaggctgggttaattttcaactgagagtcattgctgctcccttctcacagacgctatgctgggtccgcaagcccccgacttgctttgtagctaggttgttcacactgttctggacactgagaaaacaagcaaagcctaagggcttcggaaagtccctccctgcaggtgaagagccagtgtggggcttttcctgtcttccctccccttcccactgtgtctacagagggtggtagaggcagggttggacattgcagagaactcaggacgcctatgaactctatgccattttagtgtcagcttcagctccttgtaggcatgttattggaacccaagagtatctcacagtagactctagaagggagaacttcatcttcctggagctgacagaaaccaggaggttgtctctaagaccttgtctctaagcctctctgtattctcactcatagaacccataccgttgtctcacttcagatttccttggtgtgtttctctcagctcctggacactcagggccctgttttactcaccgcagggcgtcagggtctgcctcccagcccgtgtttaggagagaaacatgaagatgagtaaatgcttgggcaagctctcccgttctggcctcaggctggctctgttgttttcttcctaccttgcctttgatgtccttcataactaagtggcaacttgttgttcacagaaaaacccatgaggtagcctgaagagaggtaagtgggaaaacagactttaattagctgtatctgagctgtgtaaataactgttcccgagggtttagttagagacaggcgtcctccaaagatgcagacaaagatatatcccagtctccacactgtagaaacagaaatcaggtctagttgttgtacattctcttactaggaaacattttaagatgtccagaaaaacacataattgcaaccattgtttctggcttgcaaatttcttcttgataattatgaaaagtgaacctttgaactgttgagtatgaagcatcgttctgtaggattcacactgtggttgcaatgcagacttttctgacacggaaacctggaatgtggtagaatgagtgactattgttttaccaggaaggacacaggtggcaaaggtggcaagtttgggattaggttccgggtctttctttaaggctttctcttgtacctttttactcataacttcctgagctggaagtatgtgccacaccatcagtggaagctcccagtgacacgtaggaacttctggaggagtggtctcactgagctttcattagcagggccagcctagccagaaggacctgggttgtcctggaggggaaggtctggccttctgctgtgctgtgtggcctgaaggagccacttgggacctgggctcttggggtcgaggctgggtttgatggtaagagcatcttcaggatttatggaggaagtagagactgagtttattcagggaggggatggaagtgtggcttgtgtcccactttgtaccttcctcaggtcctggagatatactggggtcgagcgtcactgatgcggtttctcgcttctctgggtgtcagtgagactgactctctcttcccccacaaatgcagttgctgatgcttttgaaaaggcaggtgtcagggggatcagatgtaaagtagagatggctttctctgagagatcactgactgaacaccgtagttactcagtctccaggggaaaggggggaagatgactgctgacttcctgcagtcttgaaattgggttcttctggaagcacacaaagctgccatgctgttatcaaagtgtgcatctcatttaaatagattaccaaacataccatctaattattgaccatgatagtgctggtgttagttacggtgccagaataactccaaatcaggagaaaatagatttggaaaaattgggagagcaaccgggagtgagtgaggtggtgtggtgaggtaaaatgtgagctcagggctgaccttgggcttccactctgtcggcctcagtttcctcttctgtgacaacagggaagtggtccaggtctctctgcaaaggttcagccattaggtcctttgaatgttgagcctcttgtttgaatcactttgatgagctgagcccagtcatgaattctctgcattagtattcagttcttaaaagcaggagtgtttgaggctttgaaatcgagtccagcaggaaatttcttctggtctgtaatttccttccactcaggagtgacagggccccagtctgcctccgtcctccatcaggagtttgaggcagtgggatgacttctgattcgttttccctcccaccttgacttctgtgaatataaattggcatggcataaatatttaagcactgcattaatgttcagatgaaagaatcatgcagaaaccagaacaatcaaagtaaattagttaaaatttgcataacgttaaatatggtagcctttgaggcttgtggacagtggttcctggccagccactgcaccatagcaggtagcagagataacttacctgtgcatttggtatttaattgttaatgatgtgggctgggatataataacgggcacttactaataaatctatgtgcagtcctcaaatgtgctgatggggtacccgtctaggcatgtgacagtggagatgctggcactagggaatgttagtagcttcctaaggaaggactgacacacgaggaaggaggagagggtgccttgtgctcctcagttagggcaaagcacaggcaggctcccgaacgccaggtacagagagacacgattagtgcagggtgtgtggttgtagaacgcttactcgatagcttgtcgggctaaatctccagctgcactgggcctcagtttccccatgtgcacagcattacatttatgatccctcaggggttgtgaggcgcacagcacacaggacgaagatgcggaaattgtgattcagattgtgttggacagtctcctgtgtggcttcggctgctgctctggggcttaggtgactgcaggtctctgtgctgagctttcctgcacacagatgaacccaaaacaaagttcaggctagctgggtggtttttcctccacttaattaatcatgaatattgtccccttcattatgttttctagtgatatctaattttatgctgaattatattccattcttagatatttaaataccatttctgctatttcaatatttgaggtcatgctggaatcaatggtcttgtttatttttaagattttattcctgtgatacacatagggatgtgtgtgtgtagggggtggtggtgtctgtacatctgagggcatcagatcccctggagctggagttgaaggcagttatgagctataatgtgagtattttcattttctccttctcgggtcctctgcaagagcagaatgcgctcttaacatctaagccatctctccagcctcctgaggtcaacattcttatctggatgcttctgtcaacatctgtcttttctctagagctggaattacccagtttaagaatgttaatgccttttgctatatattgccaacaactcttcagaaatggagttgtaaaatataccttctcaaaaatagattattaagagtaaactctaaatacagggaatgaggagggaaaaggtttgtttgtttgttttaatgtgtctgggcttaggtgacaggggcaagaatagcatgcatttttagagaaggtaaacacaagtcaaggagagtcagggagcagtgcacaggcggggagcagtgcacaggctggtctgtactttttttttttcagagcagcttttatggttcaaatttgaaggaaagccatgatgctgtgatatatacaatatcgtatatatactataacatataggcgactgtgaaaagcagggtaggccctgatgagctcttcttgccacagatggtaatgtgctgctgccacatggtcacggcctctcttttgcctcagtggaaagctgaggaatgagatgatggtgttcgtgggatcttgttctgcgtgacttatcccttagttatgcgtgtgagtgtatgtctagatgcatgtgtgtacattgagtacagtacccatagaggccagaagagggcgtcagatcaccctggaacatgggttacatacaggtggttgtgagccattcattgtggatgttggtaactgagcatgggtcctctggaagagcagtaactgttgtaaactgccgagccatcactctaccacaaaggaattggtgtttggattgaatgaagtgtaagttctttgttctctttggccctctctagccctgggactcactgcttgactctggtagacagacatagagggaggatagataggtgaggaaaactgaaaacccgctcagaaggcctactcagtgtgggtgtgtaggagggggtcctaaggggcagagtggaggtcctcctggggcctctgtggaatctgaggggagcgctctctattggatgtcagatgctctgcagccctcaacactatgccaggctggttgagtcaatgggtaagttcaactcctctttcatcaaaatgtttaactctcaaaggacctccaggtcatctggcttagcttttcctttgtacagataagtacattttcattattcatttgtttgtttagcaatgatggagatcaaacccaaggacccatacatgccaaacaggggccttaccattgagttatagccccaggaaactgattattttcagttgagcttcaccatgtaaacaagtgaagtttatgttgctcctttaaaaaatgtatttgttattacgtgcgtgcctgtctttgtgttggagggtgtctgtgtgtgtatgcacatgctgtggagctctttggaggtcaggtaacagctctcaggatgagttctctccttccactgtgggtcctgggcatcaagtgcaggtcgtcggctgagcttatttggcttatcttacttgctgagccacctcccaggtcctgtttctttcttcctcctccttttcttccttggtcttctcttaatttgtggaatcaaagagcctaccttggagtggagttggatgctgagagtcctcagctctcacactaagatggcagaactgtagcgggcacatctggtacagacagcagagctgagagccagcttcactctagtcacttcttcggcctggggttgtgggctcaggtctgcctgcagtgctgctgctcacaggggtggctcttcttcctgtgtggctcactgatgcttctgagtagtcttggacagagaatggctctctcctctttatgttttagaaattatctgctagttactgtattgtaattcaaaataattttttttctttttccttgtagtgacggaataatggccagtgctttctttaggagagtgccagtggctctgagcacaccttgtgccttttaccactgggtgacactcttagaccagagtgctgtaccagtggaacccagggcccttgaacctcagacttcttcaaaacactttatgcaggagaaagggacactcttccatctaaagtgcatactggccactctcagacatgataggtattatgtatcagtctgaagcaatttttaaggccagtgagtattgggcaatcaattattaacaggatcatcaattaggcagcctttcagttgcttggaggtttatttagattcatgtgttgcatattaactagctactaattatttcaggggaacatttatatgaacttattattctagtatttattttgcacctgacacaaatctgtgttatctgttggtggctaaaaccttggtgatggcttgcacatactaatggatgtcacagcaaacctttggcagtcagaagacagtatgaggaagttgtttctgtcctttcctcatgttaaatttgggaactgaactgaagtcctcggggctggcacacatgccttttctgctgatccgttctccagcccagtcctgtgtatggacttccactgagccatcttaagaggaagcagagcagttacttgggaaaatgaacacaggttccctgtacagatctctagcaaatagaacttgtctagaacttgtgccaagcacttgagagcaggttagagaaggactttgctcagagcgtgtgctggcctgcctgccctccttgtttcacggcttcttttgtaaacccaaggcccaccgtctaggcttggcatgaatagctcctagtcacattcagcggaacaacatgtggtatttctcaggacaaggaatttggaagagtcaggtctctcctctgctggcttaagaggagggatgacaaaagttagaattttaggatcctgacagaagtatttactgtatcccatggggacagaaagaaatgacagtggcagagtcagagaagaaagaacctagtgaggttagtgactccagtgtattttgatccctcagtatgtgcatcctccagttagtacattgttgggtgacccttagtgtgatacccagtgcagggggtgggtgggctgtggcaagcaaagcaatgtgaatggagtaagacttgaggcacagcaggtctcatgggactcaaccaagggcacaagtaattgacagccccagatttctaatagatggtgtcatggtgtgactgcttctgcttcatgtggcttaggcaagaggcattgtgcttgaggtgggaagaggtggtggccagaggtctttctgctgtgctgttagaatctgtctttgcagagacacaccagagatggtgtactggctagttttgtgtcaacttgacacagctggagttaccacagagaaaggagcttcagttgaggaaatgcctccatgagatccagctgtaaggcattttctcaattagtgatcaagggggaaaggccccttgtgggtggggccatccctgggctggtagtcttgggttctataagagaacaggctgagcaagccaggggaagcaaaccagtaaagaacatccctccatggcctctgcatcagctcctgctccctgacctgtttgagttcctgacttcctttggtgatgaacagcagcatggaagtgtaagctgaacaaaccctttccttcccaacttgcttcttggtcatgatgtttgtgcaggaatagaaaccctgactaagacagatggtatggaaagttagcttctagggcagaggactaagtgttaagtccttgggagcaggagagcgctgggttgaatcttccacttcagttgagataagagggagctatcccatttaggaatactatgttgtttacaaacaagctaggtctttgaaagatgtatggagttttcattgttctggaggatggaattatatgtgggaggaaaaccataagagatgggtgtgtgtgtgtgtgtgtgtgtgtgtgtgtgtgctcgcacgcgtgtgcgcatgtgtgtgtaaggctgctgtgggagagctggatcctgatattagaagtctgcctgacgacctgattatggaaacatgggaaggaggccaggcagctgtgcaccatctcctcgggtgatggatagagatgctttgcttctgggactttgatctgattagattagtagcacattggtttgtctaagacaaggaaggatggtcaggagaaatggagcccagagaggagcaggttggcaattactacttgggatgagaagtgaagagggaatgaggctcctggcggtggaagaggatgggtttcaaatacattgatggacaagaatccaggatggattggttcttcatggaggctttgagaggacgccacccaagatgggtgtgcaataaggaggttagaaggacacaggatggcttctgccaatcggaggctggcatgaaaggtggcacagtggacatgtgcattagcctgggtttgtgtgggtgattgctgctgcagtggcagctagtagggcgaggtctgctggcctgtggcccctcagtctgtgtagtgtccagtactgctgtaaataaagaatgaggtgaggtgtggctgtacactggtcccgaggtgggtgcagaagcccacagtcagcatgttagagcccaagctagaaaagatggcgacggcccttaggcttactgtagaaatggctcatatggcaatgtgaagggagagtttgcattgttttcagatgcaattgtggggggttagggtgtaaggctctggacctgttcttggacacccttgtcactgagggctaagaagcaataagctttggtgcagaccccaaagactggctttctaatgcagcagatgggcaacagcttcaacttggagaagaggctaaggagactgttaactgtagggaagccagaagccaattagtcctgagaacgtttcttgataggatagggatgggagctggaacttgtgcagtgttactgagcagcggaagaaccacattgctgtttttagtgatgcatttcctgtcttggctgcctgtggaccatacttctcatgcatggaccttgagggccatgagtacaggaccttttatctgaaagagcctctgattagcaaagagtcacaacctgccctcagaggacgattgaggaggagggtgtgtcttagggtttctgttgctgtgatgaaacaccatgaccaacaagctagttggggagaaaagggtttattggggttacatttccatactggcatttactggtgaagggagtctggacaggaactcagaacagggtaggaacctggaggctagaactgatgcagaagcggggagctgattattggcttgcttcccatagcctgctttcttatagagcacaggaccactggctcagggatggcaccacccacaatgggctgacccctcccccattttccactaattgagaaaatgccttacagctggatctcatggaggcatgtcctcgactgaggcttcttcctctctgatgactctagtttgtgtcaagttgacacacaaaaccagccagtgcaggatgtttgctaaggcttttccctttgtgatattttctcaagagtcctcagactcagtcatttgctggcctaatccctaattgattcctgggtttgataacccaatctgttgttaggacctcggatgatactaagcaggtattgggctctggcttctatcttcatcacactgcgctgtttccacgtcttcgagtgggctagctgtctggtggccttgcatagatgtgcttctgattgccagggccaaagaagctttctcccactattatacacaccttaaagaattaaataatattaataatatagcttatcatggcattctaaactctgcccttaaaggatctgagacacctaaacattgtctctcatagcctgccatgtggagagtttttatgtatgcatgtatgtatgtgtgtgtgtatgtatgtgtatttattctgtgatcctgccctggcttctgtaggcaagctccctgcctctgagccatatcccagcctggcactggtgtctttttatttgccttgtcttcagatttgtttctaaagttgtctgaatattcaccttcctttctaaatgggcttattcaataattgtcctttactctggctttcctcataattggccaactttagacacggtgtgtttttggcagtgctggctgttgaatggctagaaggtagagggaatacagttagttgtattacccactagcattcttggaaagcagcccaaacttttgcttgctgattggcagcatcacactcttctgatgaagccacagtgcaatctagggtgctacccggacacaccattctccttcctgtagccacggtacagacatgaacagcttgtggttaattggcagtataaattcacagtaacaccaaaactcgatcttacacacacaggcctagtgaacgttctgtctgatgtcagcaacatggaatgtagacttgtaaactatcatagtggctgtcagctcattgcttatctgcctgcgcctttgcatagggtttcatggagcattatacaagcaatgcgtctgtgaggagctcccctcatttctgtttccatccttttggagttccatcaactggtggttaattcatgttccacgagatatgtgggggagtaaatgcattgcaaatgtggactgggtgtacctgcttttctataagacctctgacatttatgtcactggcctatgttcaggacatatatttatgcagagcagattaccaaaaagcccaatgagagaggaggccactcagttgaagagatcggactgaatcaaggagattggggaagttcttgagggtttctaggccttggcaggatgggatccactcagggcctggcctctcggggattttctttctctactttttcactttctgtcccttctctttcacccttctgtgtcaagactggaaaaaaaaatgaacagagccattgacttggttcatccatattaactcatcctgtcagacttgtaggatgcagtcatcatccattttcctggcaccttcattaacggagaggtagatgttgagctggtatgttggggcacggatgggcactgctggcctcaggtgggtcccacaggacttctcatgcttagaacatgccacagctattggattgttggctctgatttccagttaagaaagttgagatgcagagtaagccatttaattaaacaaaaccacataactgttgaatgacctaagcaagggcctatctagggtcactggtcctcaggccagctccttctcattgtgtgcatacatggatggacatgtaatgcatgctttatataatagccagtggaaccttatggaaagtatataaagcagacagaataaaaatgttccaagatgcagtatagtattaacatgcatccattttattctgttaagtttagatgtaggattactatgcctacatttctaatgagatgtgaggccaaattctaatagcattgtaacaacaaagtgattcttagttgatagtctcaacagcagtgttatataaactgtgttcactgaggtgtgtttattatgcctacagagaaggtatccacaagaaagtgccatgtgatgatctgtgtaaccaaactggtattattagcacatggaacaccatactgtagaattgccctcctcccaccttatgtcttcccttcaccatccatgcctaaggtaacatgatatcgaacaaggggttgtttgactgctatttacttaaattagacacccagatggttcttttgtactactggcacctgattggccctgacactggtccagtttatcatggctattggtatgtgctctgactattgggtatttttgattccccttcattgtgccttcatctttcgccatcttctaaatataaagtatgctccttgtttaaaaatacattggtgggggaggggagctgaaaaaaaaactgatgagaaagtgagtttggacattttcccaagaacgtcattatgtggtgtttggacagcaacatattgggagcagatcagttgagattatatcactattttaaatgggccacttgggaatcctagggtcccctctaaccgtcatagagcttggcagaatatgaaaaagtaacactgctgtgtttatgcagataatcccagaggagcgccttttcccagcctttctcctagcagatttgtgtccacaaagggtccttcaagtatttgtcaaatgcttttgggtatcagacgatggctccttgtggtagagtgagtttgtaggttcacctcaaggccaggctgtcctaaacactggcagatgaggccagttccgctggagagagagacttgcactaactcattttcctgtctgtctgggaatccaggggcagagggaggagattgctatggatccaagaagccccttccagttttcaggctgatccacgcctaagtttgccagctactgtcttaagtgttttggggatctcagctcctagcgtttgccagtcttctggagccagtttggggaataggttctcggaaagaatgtcttgaaatacttttagcattctgggagtagttgttgcagttcaaaagttcagttatttgggactgactgaattctgctgtatgtgtacgcatgcatctggtatatacattgccacgtcctgatgcttccagatagaattggatttaaaaaaaaaattggggcaaatgaaaattggcataatctctaaattctgattttcaaccacgaaaggttagtttttttgcattttgtttgttttatgtacagatgtgcaaagatggaccaagaataatagcctgatggtgcagctcagccacaataagtgtgtgttctcttggcttggtggggaaggtttacattgggaatcattatctaactcagaaaagcactgtctgtggccattagaatgcagtgtattacctcggtaatgtggtaggcaggcctttttaactctgccataagggtctgtgtttgtagctttgctggtagaactgtgggatgctgggctggggagagcacttaatagttaaagatgcttattgttaagcgtgaggaccgagtatgatcccagcgtccatagaaagcgttgggcacgttggagtgcacaggcaactacagcactggggaggcagagatggggcggcggcactggcggcgcggcggtggtggtggtggtgttgttttccaaaaattaaaaacataattacaccatggctcaggtacaccactcctaggcagatacccaaaggaacctgtgtctgcctagagacatgttccttgctgctcttctcacaacaggaaggagatggaaagagccaggatgtccatctacaggtgagcagacatagaaacatggtatacacacacagtggaattttannnnnnnnnnnnnnnnnnnnnnnnnnnnnnnnnnnnnnnnnnnnnnnnnnnnnnnnnnnnnnnnnnnnnnnnnnnnnnnnnnnnnnnnnnnnnnnnnnnnnnnnnnnnnnnnnnnnnnnnnnnnnnnnnnnnnnnnnnnnnnnnnnnnnnnnnnnnnnnnnnnnnnnnnnnnnnnnnnnnnnnnnnnnnnnnnnnnnnnnnnnnnnnnnnnnnnnnnnnnnnnnnnnnnnnnnnnnnnnnnnnnnnnnnnnnnnnnnnnnnnnnnnnnnnnnnnnnnnnnnnnnnnnnnnnnnnnnnnnnnnnnnnnnnnnnnnnnnnnnnnnnnnnnnnnnnnnnnnnnnnnnnnnnnnnnnnnnnnnnnnnnnnnnnnnnnnnnnnnnnnnnnnnnnnnnnnnnnnnnnnnnnnnnnnnnnnnnnnnnnnnnnnnnnnnnnnnnnnnnnnnnnnnnnnnnnnnnnnnnnnnnnnnnnnnnnnnnnnnnnnnnnnnnnnnnnnnnnnnnnnnnnnnnnnnnnnnnnnnnnnnnnnnnnnnnnnnnnnnnnnnnnnnnnnnnnnnnnnnnnnnnnnnnnnnnnnnnnnnnnnnnnnnnnnnnnnnnnnnnnnnnnnnnnnnnnnnnnnnnnnnnnnnnnnnnnnnnnnnnnnnnnnnnnnnnnnnnnnnnnnnnnnnnnnnnnnnnnnnnnnnnnnnnnnnnnnnnnnnnnnnnnnnnnnnnnnnnnnnnnnnnnnnnnnnnnnnnnnnnnnnnnnnnnnnnnnnnnnnnnnnnnnnnnnnnnnnnnnnnnnnnnnnnnnnnnnnnnnnnnnnnnnnnnnnnnnnnnnnnnnnnnnnnnnnnnnnnnnnnnnnnnnnnnnnnnnnnnnnnnnnnnnnnnnnnnnnnnnnnnnnnnnnnnnnnnnnnnnnnnnnnnnnnnnnnnnnnnnnnnnnnnnnnnnnnnnnnnnnnnnnnnnnnnnnnnnnnnnnnnnnnnnnnnnnnnnnnnnnnnnnnnnnnnnnnnnnnnnnnnnnnnnnnnnnnnnnnnnnnnnnnnnnnnnnnnnnnnnnnnnnnnnnnnnnnnnnnnnnnnnnnnnnnnnnnnnnnnnnnnnnnnnnnnnnnnnnnnnnnnnnnnnnnnnnnnnnnnnnnnnnnnnnnnnnnnnnnnnnnnnnnnnnnnnnnnnnnnnnnnnnnnnnnnnnnnnnnnnnnnnnnnnnnnnnnnnnnnnnnnnnnnnnnnnnnnnnnnnnnnnnnnnnnnnnnnnnnnnnnnnnnnnnnnnnnnnnnnnnnnnnnnnnnnnnnnnnnnctcaaaacacaaacaaacaaacaaacagcatttaaaatgtataaatctgatacttgttccatggcagccatgatgctgtttttgatctcaataagactctgtaagacagcaaaataatttcctagagacctattactttcacattggataaaatatacttaatatcctttcattttcatgtttcaaaggaagagtcaaagatgattaaagggctctttgaagcggtcagggcttggtcacttcacattctgtagtcagggactgaaccatagttacttttataaatgtattaggatgtgaagaactgactattaagtctaaagtagctgtattatcaataaagcaatacactgagttggggtattgttttttaaatatgtaattatatttcttttcatgaaaaatcatacataaattgttacgtttatttaagatgaaattgtacagccgataagagaagagagaatccacattgtagattccttttgtgagggcatgaagaagtctgtacacaattgagcatattccatgtttaaaggaagaaagtaaataaatgcaaacaactccataaaaaaaaaaaaaaaaaacttactttatggtccagttacttggtcagtaacatcaatatgatgagaatatcttgtgttaatgtcaagaagaaatccctcatgtaaggatacttacttctagactcccccccttactcctagacttttctatcacatctttattctcagccttcttggttgcttaatgctcagtgaagaaccccaccttgcctccctgagcgtatttccaaaggccaaggaagtcatgtggctcaggagcgccctcttctggcagctaaccgctaacccctgacttggttacttcttttaaatactctccatagaacctccatagaatcctaggtggctgaagaagaggaggaaaccagtctttgcaataaagggatggaatgtttcgtgtagatttcagtgcagactaaagagaggaggtgattccgtagttgtcggaggccagagtttaattacagtcaggatgttaggaaaatcttcctgaaagacttggccacgtatctgtatctgattcggcttggtgtaaggtggattagaaaggagcatcatgcctgctaggagcagcagcaatggcgagggcctgcaggtggaggaagggccaaggagagggaaggtgcggtacatagtatttatgccagttcagtcagagcgtgggctttgtgaggacacgtccccacatgatcagaattctgttgtcaggcttcagtaaccacggacaggatggctgacaggaaagagcatcaggtaagaacgtcacagagatggctacttctttgcttttgttgtgggtgcagagtgaaaagccaaggagaagtgcccctatgtagctcccagctcctgtcccagccgctctgtggtaaagccatccaggacacagggagacactacttccctttccagacccctttgctgtagtctggaggagctgtattgcacacaccttctgcttggcctgcagaagactctgagcctgcgcatgggacttgggctgcggggctcttgtgcccaccctctgactccaagacagagaaaatgaagacagtgctggccctgtgcttagatcagaactcatgcaggttcaccctgggtcctgcccagggtcttgtctggtaggagacccccacttgggtgcttctcaccgactgttactgtgggggagaggtcctagaaactctaaaagagaaatcacccacttgtgccccagcatcctggcctacggctcctctcccctgttgctgacagctaccccattctttccctgcctgcctcctccctgaaactttgacctttggagtccctcctgctctgaaaagatgtcatggcttaggatagagaagcaggtccttttatggaagcaggcagcatactttgtctactgattaaccagagtgaatctgctctgggctcttttagacaggttaggctgtagagcggtgccttgtgcatttgagatttcaagcagacagcacagcccctttagccagggagcagtggagctgaagtcaggctggctgtgatgggctcccttactcactatgtgcaaggtttgtatttctctctctgattaaggctgcaggagttctcagttaaaatgtccacagtgttttgggaatgtgtgggttctctgttatgttttcctcatttggtagctctgagccttcatattatacagtgttgcctcaaatatttaattatgatgcagttatagctgcttttatattttaattgacttggtctttagacatttagtagctttattttcatgttaattaaaaaattttttttacaacacttgatgtaaaaaagaaaaaggtgggcattgcagtttggcaaacctgggtttggggattagtggacggcaatttggttttagcactatggcactagcagtataagtaccagcatggtataatcttgtttctctgagtgttggtgtagagtctgagtcttttattcctatggttgttgctggaatcagttgggaccctgcatctgcacgtgccgttcccaaggcactgattgatagttgttggctgtcagtttgcctagatttggctttgatgaactgttagtgacagttcagggcttcatgctgacatggttgcttctctccggtgtctactctggagtctgtggatagatgccctgctctctctcttccctcaacatccacgtagccccactcctccccataactgtctgctgggtggcctccgtgggcagaagttaaaggtaggagctagcattggactaagagcttgtgcacagagaaactcttctcattcttctgaaggcaggtttcatgccgtcaatagtaattcaacatcttctacttatctgaagtggctgggattagaactggggcagaggtggtcctcccccttgcagagaatggacagaaacctacagtcaccccgtatcccggtttatcttgtggtgtcaataccagggaggtggcagtgcagtgctaggcatgaatgtttcaggtgtgactcttcctcccacacagtcccctgctctctgacccactgtatcgcctactaagtgaggaggtagccgtagttagcaatcggaattgtggacttacagagaaagcaaggttgcagtactctggtatagtcaggcccttatctgattttgagtttgaaaatcaaagtctctgaaccaggacaggcaagtaggaatctcctgttaattatcatggcatcttcatctgctttgttctgagcacagggagcagggatggatggggtcagcactaagaatgatcttggtacgcatggtaatcatggcaattactggcaccaacctttgcctgtcttctgccatggggtcagccctggtcctcttgcttcagtctccagagggatttttcttctgtcatgaaatggtactcgcattcacaggcgttcactacatgtccacagccctagttagttacaggtgtccaagaaaggagactttctttctttggagaggaagtctgaggccagaggggttaagtgatcgcccagctctgtcagcacattgctctgctgtagttcaaagacatgttctctttagccacccccactgccactctgcccaaaggggtcttgctcaagcaaggtcacctaccttcccttcctctgctctcagttctagccctgagaatagatggtcagccggaagaggaaacagaccgcccgttttccacgttgactgctggaagttttgtctctctgcaggctcaggctttacggtggtaatgtggactcatttgctgaggttgaggaaaaagctagtacccaagtgtttcttgtgagcttgcttttgagatgtggtggcaggaggtatcctttgtgacttgaactcagggtgtgattggcactgactggagtcaggtcagaagactcttaccttgccccattgctttctagtccttggaggattaatcagtggcatccctgaggtagacaccggaggatggcgtgtcctggtatgacagaccagacatagctcttgggaccttgaccatcagtgaaagaagtgttgacagaataggctgcaaatgaatgtgccttctctttgtgtttcagacggcccccttgagaatattgaccccaaagactcctgtctcattccaagaaacatcatggctgagccagactacatagaagatgacaatcctgagctaattaggccccagaagcttatcaaccctgtcaaaagctcccgaaatcaccaagacctccacagagagcttcttatgaatcagaaaaggtgcgtggtttctgggtggtgtttccttcctccaggaagctttggggtggccaggtttccttttgggtttacaaaggctgcaattgcttgtttgccatgttgaaggcatccttttaccaagcatgggggagctgttgtctctgcaccaagctcctaggtacactggcagggtctgacactgtctcctttcaaatgcgtgctcattttaaggagcacttgcatttcttttgtctgtgcctgtgctcaggcctgtggaggacaacttggaggaatccgttctctccttccaccacgtgaggcctggggattgaactacaagcagagcttggcagcaagtgccttcacttgctgagcccatatgtgcatattgtaaaacttgggtagaagaggctgagttcggggtagaagagagtgactcttcctatgcagaagagaaagactatttcttaattttaagtctctgacattttgggaagtgtaggaatcagatttgagccctgcctgtgctagtgttttctagctgcagagagacgtttctataactattagaaaataataaacaacaatattcttccttgtgtctttattagtttcttttctgtaatattttaaatgttattgtctttctgttaaatttttaaagggatgcaaaatattccctgtcttcttgtgcagtcaatcctgtctctaccccaaattactctgggttctgggacttgggcctactgctgcttgcttacgtgtttaatgcctgttgtatgcagtgtgtgtgttaaggcatgtggagacatgaggtggtctctcctcagtcagtttccgccttactccattttagacaagatgtctgactgaagctagggctttctggcaggccagcaagcctccagtaccatctgtctccatctctcagtactggggaatctcaggtgcttgctccggagaccaggattgtttggtgttgattgtggattcaaggggattcaaactcaggtacttatgcactacacagcagtcactccatccgacagaggcagcttggccaggatcttagggcagttcgaattcaacacggaaccagggaactcaaagtgcacaacctttccacactgcaatgcctgagctaatgtcagcctttgggaacagtgagctagggctgcctgaagagtcacctgtgggcctggggaggtggatctgtgggtgagaaccagagtttagactcacataacctatctaaatgccaggcaaatatgatggcccacctgtataatctcagaacttgaaaagcagaggcaggggctgtggaacaagctggcattgggccagctgaactgagaagcagttccctgaagtgaaatgctgcctcaacagagatggacagtgaccaaggaagacactcagtcaacctctggcttatacacannnnnnnnnnnnnnnnnnnnnacacacacacacacacactcacacactcacacacactcacacacatacacgcacacacacacacacactcacacacacacacacacatgtgcaaacacactgtgtgttcaagtaggcaaagaaggaatgagcaaaaccagacagaaatacaaggctgcttcattctttggaaatgggagacagcttctgttgctctaagacctgtttagcatcaataagatccaagctactagtaatattttagcagaatagtttgttacctataatctagaaaaatgtatgctcagtagaattaggattgacttttgctttattcttccttttcacaaatttctttaaaacttttcagttaacatgcttcttagagattaactgagtagcccttcccccactattctctttagaaaggaatagaggctaagagcagactggctggtcggaagaatgggaacctccacaaagctgcccctcagtttggagacccccaaccccaccatttccccagcacaatgcagacataagctaagcatttacaaaagatgcatagacttgtgttcagggcagcaagcagcagtccaaccacacacttgcttgtactggggccaaacccagtgatggcacagagaactcctgggtagggagtccccagggctggcacaaaggctgtactcagggtggagaactgccctaaaagtgcctcacagggccaggaaaaggctcggcgggtgaaggctgcgcttagtccttacagtcacatagtaaaaggagaaaggtgactctagcaagttgtcctttggcctccatatgcatgttgtgtgtcagtgaccacacaccacacacacacacacacacacacgcgcgcgtgtgtgtgcacatacacaaacccaaatatatgtaataaaatgattttagaaggcttgtaatctcccttattaaatttaaattaagataatatatattcaactacatttaattagtattacatgtagtttgaatttaagatatataaattcaaactacaacacctaccacaagactacagtataactggtgcttctgcagtctgtttaaaggggagagcttgggttaggcattcaacttttaattttatgagtattgatatatttcatatataaaatatgtggcctaaaaccctagccctaattttagaaactggctacactctggctggagatgtgagagttaagagcatgtgctgctcttgcaaggacccaagcttggatcctggtccttatcaggcaggtcacagctatctgtaactccagctgcagaccttacgtctgtcctccttaggcgcctgtactcacatgcacacacagacatctacacatacttagctcagctcttaggattgatccctggacagtcatgaaggggttggagagacttagtaatgtaggcatcagggcttgtaaggacccaccactgtacggctgcactggtataacccagaaaatgttattactagttgaagttacttttgccggtgaactatgggagatatctgaacttaaattattcatataactaaattcttaatcttaaaatgtaattgtctgcagttttatattgagaccttatgtattcataaaactgagaaagccttaattcattattccttagtgatgcttttgggttttgagatggcattttactatgtagcccaggctagcttcctgctttagccttctgagtgctgagattacagtgtgccttcacaccctcctggttaatgataccaggaactcatatgggctgtaactatgctgattaaagatttgatttccttgacaccctgtgtgcagttgtgtatctgttcattcttaatagttgtgaaataaatcataaaatcataaaagtaatctctcttctttcataggacttagatcagttttcttctaatcaacttcctgctattgaaaatagggaaagagaaagttcattgtgatttttaaaaaagtaggtagaaaagatgccagaatcagtgtgtgtgtgtgtgtgtgtgtgtgtgcgcgcgcgcacgcgcgcgcgcgtgcatctgtatgtttgtataattttccaagaagcatgaaatgtgggcttgtttgggtttgtagtgacttgtatggctgtgtttaaagaggaggatttagtataacccacctatgataataaaggatacactgttaaaataacacacatatctctttttttcctatttttattagcaggatgttggttagaagaaaactgatgtaagctctaatgaagggagattacgtttatgattttatggttcatttcacagttgtcaagaatgaacaggcacaaaactgcacacaggagtcaaggaaatcagatctttaattggcatagttaaagtccacatgagttctgtaaggttttgctttttggaaatcattctttaatgtgtattcagcagtgactagctgattaatcagtatgagttgatagaatccttaggaaccattgtctccagagcagatcaatagtcatcacctaggcaaggtaggcagcggtgggatgggggtgtgatgagggtggagtaaagtgtgccttgtagacgagccgatgagtgcacagttgtgcatatatgcatagcgtgagtgtgtatttaatacattttaatatcaaatagatattgtttatggatcaatggtgtaaataaggaagacagggaagaggtaggcaggtccatctagaatcttagaaacctggggctagatagctcctaaaggaaagagaggtgaatggcatgcaatttagaattcctaccagaaagcatgctaacaggagtctgactgttggattgccccaagcctttcatcggggttcgtctgcttgcgtatggttttccccatgtactggctgtttttgtgtgtcaacctgacacagctgcagttatcacagagagtggagcttcagttggggaaatgcctccatgagatccagctgtggggtattttctcaattagtgatcaagggggaaaggccccttgtgggtggttccatctctgggctggtagtcttggttctataagagagcaggctgagcaagccaggagaagcaagccagtaaggaacatccctccatgacttctgcatcagctcctgctccctgacctgattgagttccagtcctgacttcctttggtgataaacagcagtatggaagtgtaagctgaataaaccctttcctccccaactgcttcttggtcatgatgtttgtgcaggaatagaaaccctggctaaaacactccatttgaagaaatggccacctagtttttctctgaggaatgtagagtttccctgaagtctgctctcttgtgtatctcattaagcacactcgtggcgctctgtgatagctggctgcagttaggaggaagcctactccacttcctttgtccttcaggacgcgcttagccttggatgttatctctaaaggtttgagagcctccttcaggtctgaaagatgagaggagagagacttcctcagccatttttctcaactgctgtgccactaaactgtcttcagaacgtgagattagcggctgcagtgtgacttcaggtggatttgcctcctgtcctaggcatcttcatctctcttttgaggatctgccccacccactgtgtaagcatactgctgcctgccttccctacagccctggccttaatgtgcttttattggattcatggactctctcaactctttggaagatgcctttggcttctcttccaggcagtaagtgtctgagtgctattgaagaaccatttggcttagcagtagatactctcctctggctaatttcgtttccatctcttctgcagctcataccttcagttatatttcttttcctgagagatacttccagtgagatgacagtttttcaatcctttctttgcccagaggtcttgcccctcagaataaaccagaactgcagaaggtgatggagaagagaagacgagaccaagtgataaagcagaaggaggaagaagctcagaagaagaaatccgacctggaaatagaactattaaagcgacagcagaagctggagcaggtagggcttgaaaaaggggtctgctctgagaggcagggatgctggatgccaggcaagcagaattccagcaggccagatgtgcgtgtgtgtacccagagagagacaggagtcgaatgcagtgccagatgtgtgtgtgtgccctgagagagacaggagtcgaatgcagtggagggtgtgtgtgtgtgtgtgtgtgtgtgtgtgcgctccctgagagagacaggagtcgaatgcagtggagggtgtacatcccattcaaggcagacactcaggttccattaggaacctaaaagaggcatcagaggccaaagcaaactagaggggctgggaaggtggttcagtgactaaagcatttggtaacagctggacctgattcagatccccagaatctatgtaaatgtggggtggttgtggcatggtggccaccctgtaattccaggacttggaaatacacaagggatccctgaagtaaacannnnnnnnnnnnnnnnnnnnnnnnnnnnnnnnnnnnnnnnnnnnnnnnnnnnnnnnnnnnnnnnnnnnnnnnnnnnnnnnnnnnnnnnnnnnnnnnnnnnnnnnnnnnnnnnnnnnnnnnnnnnnnnnnnnnnnnnnnnnnnnnnnnnnnnnnnnnnnnnnnnnnnnnnnnnnnnnnnnnnnnnnnnnnnnnnnnnnnnnnnnnnnnnnnnnnnnnnnnnnnnnnnnnnnnnnnnnnnnnnnnnnnnnnnnnnnnnnnnnnnnnnnnnnnnnnnnnnnnnnnnnnnnnnnnnnnnnnnnnnnnnnnnnnnnnnnnnnnnnnnnnnnnnnnnnnnnnnnnnnnnnnnnnncacacaaacacacaccgaaaaaaagttgaagtatctctgtactccaagtgttagaataaatttgtttgagaaagactccagaacagctgtgtgtgaacccaggatattcttttaattgttgtcacctctgggtatagtttatagcaacaaacaaagggtccatgcttctgcacagattaaaattcctaaagtttatatacatatatatttttttgaaagttgagagtcttttgaaaagccatccaggacataactaattttttgtgtttgacattcattcagcttgaacttgagaagcagaaattgcaagaagagcaagaaaatgccccagagtttgtgaaggtgaaaggcaatctcaggagaacaggccaagaggtggctcaggcccaggagtcctaggcccaggctgtgtgtgacctgatgtgtccccaccatctctgtaggagccccgtctagacacctctacagtactgttcttgggccaaagtcctgaggaagagaatccagacagctgagaattttgactatcaaaaaaggattgcgtttgatttaccattgtggtagatgagttgtctctgatggttgcaattcccattcgccaaatgaaagacatcgaccagcacacaagataccatggacctgtgtttagaccaagaaagccacaaaaggagtgaaaagaggcaggaagcgggcactggaacacgcaagagggttgtactactcggcctttcttccattccaagtttagtgggacacagagccttccttgttaagagaattgtttggaatccctccttgggttatctgttagattgttttgattgcatcaaaatgtatttcatctgttacatccagtatttgtatttcattctgagaacccagatttccccccaccaccaccacattataaattaagaaaggaggctattactgtttatgtttaattatacctattactttggttgacattgaagttcagaaacaggataagacatttgaacatgtcagcacccatcatgaactaactgtaattcccttaggttcttggcatgacagtatgccagatattgccttttcacttctaagaaggtatatacagcttgtcgattcctttctcgccttgataaccatagcctttctgttccattttagtttgtcatttcttgctcaactattcctttcagttgaagcaatttctcagttctttttcggatgaaaccagagtgtgtaactcaacttctgtgtcccatatagagagaccagctcttttgagttctcctgagagcagtgtagaggagtgtatattaggactggtgatgaggcctttagagattgtatggaatgcaaatagagatctgtttctaagagactttaggggaaggcttgatactttttacattttgaatattttagacttgagctttgaacatctccggcggatggtcacaagtttctttcccttttgtttcctgtgaagatgaccatcttggcgctcttggcatgatgctgttggtaggatgatcctgactactgtgttgcatctctcaggaaaagctgaggtgctgggcaaggctgctcagttccctcttgctagctagcatgctgttcaaagagacatctaagttacaaataatatgaaagttctcatgcaaaatatattttgtactacaggcatgagattttttttggctttttttttcttttttgtatttagtacttctccatagagatgatttaaccagtaatttctacactgaagacttctgtttcctttcatgatgcatagaatagcagatgtagcgctttggaatccttgcttagcacactagatgctagttttctctgggaccacttcagtctggtagtttacaggcccacattcccttccagtctgcataagaagtaagtgggtgataattcactgctagataagaagcctgagagctgagtacagcagagcggattcttggtcctatcagcaagtgctatctaaataaaatatgagacgctgaagataaggtggtttgcccttgaagattggctcagtgaccactttgtcatcttcctttcctttgagaaagaaaagttcattcactgattgttgaaataagcctctccatgcacactgcttagtctttctctatgcatacagaataatgacatcaggtggtagggtgacgagtcggggcaattagacctttttatctacctggaagctagctctggagatgtcctgccacttggcaggatcttcaagggccatcgctagctcccatagaaggcctgatgctgttctactctacaacactgggggaaaagttagctacaaacatgtttgcttcctggttgcactcagaccggcaatcttccttggtggttagtgctgcagggtctatcaaaagacttgtacatacaagaagtgatggcttctgctaggtctcagagcatccggggagcagagcggggcctttaggaatctgctgggaactcactgagaatgctgtcagtcactcatttcttgcacttaacactgcacaaagcctcagtccaaagcctgaggacaggtcaccaactgagcagtgtcgtgctttgagccactaataggggggaaaaggctccatttttccactctgtagttttcttaaaatagttctgtgttttgtagtctcctgctagtaaagtagtattgctttctaagctataccagttgactttattcttctactccaagaatctaaacccatttgagtgtacataatatatataaagggagccttaatggatttgttttcataatttaatattttttgtatttgctcttgtataattgtttttttaatggaaagtattacagaatcgagggtgaaattcttagaaccaaagttattcttaataaaaatcaccaatgcttggaccacgcagccatgtttgtctcgtttgtttaagggctatgtagaccaggaggggaatgttgtagcttccaagcctcccttgggtggctgttctctctgacagcaggtatgtcttctctttgtgcatttgttgaatctgaaaacttacatggcgaacaattccatccccacatatcagtggctctcagtgctgccgccctttgcaggaaagcacacagcattgttgcagttgttgtccttcaggtcacaagacttggaattttaggagctcaggaggacagtagaagatgcctttttggaaggtccagatttttttgtgcttttggatagtaaaagttttaggaagtctgcttttgtgctgtttttgcttactccattgcgtgaacactaccctcaagggagttggaatgctctataaacatggctgtattatactgttgctcttggggaggttcaaatctctctctttgacaggtctcactgtgtgactttccctgggcagatagaagtgaatgtctatttctcacagataggataatgagaatataccaaagaaacgattctccccatttctggctcgatcatccacagggtttgttggggcttcttacaggagtatgggtgattcaacagaagtcatcatcgaaaaggccgccccacataagggctcgtgagagctgcatctgccacagggagagcatcctatcccagcaatcactagttacagctggatcagaagcttgggtttcatgtacttcctaagtcttacatggtgtgtgtgggtcttagagcagcagtgggagcaaggcagaagaatgcctgggatgtgaaaagcgaggaggggactgttggggacagaaaggtactgaagggaaagaggaggcattgcatatgaactgaacatcggtgcttttcttatcagtgacaatactcttattaacttgcataatattttcattgtattagatattataaatatttgacaaccctgcaagggccctgtatactctttttagagacagaacacctatgtagcttacattaaggccctgagctcaatccatacaatagaaataaataaaaatcttttttgtttttttttttaaatacaagcactccctttcaggagggaagacagtctgaagaaaatagccacacaacacacttttactttctattttgatcacttgcccaacttttaagatcttcggaatcttgatcttaaagtctgctttaattgcctttgataactcagtcagtggagtggagaactgtaaagtcccttagagccaatttaagttacactgtagactctaaaaccagcacagaaggtggattccacaaatgagagctgcccccttggagtaactaagttcccagggtgacagttatctgtgaagttttaagactttagactactatatctaaaataagttttaaaattctgttactaggtgtgcatgacaactaagggtgttttatttccaaggttttaagatgaaacaatcttaggagctactaggctcacagttacaattttgcttgatttttctcttgagaaacacatctgattgtcaactagggatgttttcagtatctccccatctgctcatacgctttctagcaacgtattaattcccaattggaatctaggataaaagttacttagttattgaaggtaactttattgttatgggcttcatcaaggtgtgtgtgtgtgcacgtgtgtgtgcgcgcatgccaagtgctgcgggtgttgttgaggacaacagtgtttgtgtttacacgtgttgaatgtgaacccagggagcacactgtctgacctgtgtcctctgagtatctgcagttcccatctccagagtgagccgggcggtggcggcgcacgcctttaatcccagcacttgggaggcagaagcaggcggatttctgagttcgaggccagcctggtctacagagtgagttccaggacagccaagactacagagaaaccctgtctcgaaaaaaccaaaaaaccaaaaaaaaaaaaaaaaaagtctactccccatctccagagtgacagacaggctgtcagccagcctccctccccctgccctcttatttcctcagtcctgtgagtctgcccactcccctgccctgcctcagccaccttcccacataagtcctgcctactggctttctaagtcaattacaaaggaaaacaaccaaatttattttatccccccccccccttttctctccattgtagtcttgacttcaccctgccctcctctgcttcagcttcccaaatgttatcacgggctgacaagcttgccttgtattttctctcatctttcatttttcattatttttccgcctctgagaattattttcctcaaccaaataaacatgtatggtaaatataattacttagatgccccaaacagccagaaccagaatggctggcttagtgtggccgatgttcggggacttgcaaatcaatattcaatacatacttgaatacagtgaccaagacattttagaaataacttagataaacttagtttaaaggtttagcctttggctaatgagaaagcccagtggagtagagttagttgagatatccagcatccacttaaatgccacttaagcatgacagttacctgtaatcttagcccttggaggtagagatatgatccccagcaagctggctagcgggactagctaaatcaggaaactctggcttcaagtgagaaactctccctcaatatatacaatgatgagcagtgaagacaacgtccaacattagcctgtaatctctcgtacaggtgtgaggcacatgtgtgtctgcacacacacaagcctgtaatctctcatacagatgtggggcacatgtgtgtctgcacacacacaagcctgtaatctctcatgtagatgtgaggcacacatgtgtctgcacacacacaagcctgtaatctcatacagatgtgaggcacatgtgtgtctgcacacacacaagcctgtaatctctcatgtagatgtgaggcacacatgtgtctgtacacacacacacaggactgtaatctctcacacagatgtgagacacacgtgtgtctgcacacacacaagcctgtaatctctcatgtagatgtgaggcacacatgtgtctgtacacacacacaggactgtaatctctcatacagatgtgaggcacacgtgtgtctgcacacacacaagcctgtaatctctcatgcagatgtgaggcacatgtgtgtctgcacatacacacacacaggcctgtaatctctcacacagatgggaggcacacgtgtgtctgcacacacacacacacacacacacacacacacacacacaacaagcctgcaaaaatatgaagctttatttctattatttttatattttaaaaattacttgactactactatggccgtgcctctttaacatcctcctcaagtctcaggaaaatttgtctagacaagattacagaaagggatgcccctcagactcactgaaggaggaaggtctgcatttttgactgactttttgcttgcacagagcctgcctggacagttcttctgaatccaaccatgactcacaggccttggtgcaaagccttgagttgttgctttgtcatgggagttttacagcttttctacttactgggcgctcgcttgctgcccttctcaggaacagtgtgtgcctttatttcgcaaggctagcactgtcctgcctttaggatgcattgatcttatccattagcatcgccgaaacgtatgcctttcagattgcaaacttagagggatccgtttgatatttatttatatttgtcaaggagagtaatcagtcctgtgtgaggaattttgggaatacttggctatgtatcaacttgaacatattgatatgatataattttctgtcatgtaggctctgcaatattctctatatttggtactctaattttctttatttctcccttttttatagtagtatttcctatatacccagctaaaaacaaacatatccatatactttttttaaaacctgtatattctttggagaacaagcaagatgcccatatatgcgaatcctctgtcaaatacattggttcttttttctttttttttttattagatattttctttatatacatttcaaatgctatcccgaaagttccctataccctccctccgcttgctcccctacccacccactcccacttcttggccctggcattcccctgtactagggcatataaagtttgcaataccgaggggcctctcatcccagtgatggccgactaggccatcttctgctacatatgcagctagagatacgagctctagagatacgagctctgggggtactggttagttcatattgttgttccacctatagggttgcagaccccttcagctcttgggtactttctctatctcctacattggggtccctgtgttccatcttatagatgactgtgagcatccacttctgtatttgccaggcactggcatagcctcatacgagacagctataacagggtcccttcagcaaaatctttctggcatatgcaatagtgtctgggtttggtggctgattatgggatggatccctgggtggggtagtctttgtattatagctgtttgtttcctgagtcaggctcttggtgtacagctctggctcacctatagcttgctgcataggctaggctagctttgaacttgtagtgagccatttccttatctctccaccaccatccagagttgggattacaggtgcaagccacaatacccagccttatttgtaaagtgttacacagtaagaaaatgtgaatcccaagggcttaaaagggcagaaataaacattaactggaagtattgtattaactcaatgttctttatcattcagataccatgtcttgaaattattggcatgtacaggacatgtattggtaggtaataaacacaatggtttcagcaatccaatatcataaaacctaacaattgatattgccaaggtgagggagtgaatgaataaagagatgataggtgcagtgtgtgtgcacaggaggtggagtcagagggggtgcaacaccagtctgggctttatcaataaagtgaagtgaagcaggctcagaataaacttcactatcctttcttggcccctgcgatggctagacttggttctaactggtaaagagcacttctaaatctatctgggttatttccagaaatagtgggtcactgttgtgaatatgtatgtcactgggatgggacaggacctaatggggcaaaagcacacttgtgcaagcgattcctccctagcaagtgtgtttaagctcctgcccttgtgcccctccccgtaccagatcctacaatcttcagtctttgcttgcaaaccctcaccagcaactttcccgagagttccaggcctccagcctcgattggggctgcagacttgacctcccctgttctaaggctcagcttccaaactgagcagctgctaggttccctgactttgcaacccacagacagtcactgtgggttcataggacctctgctgctgtgagctgacctaccacattcctgattcctgatttgtaaaattgcaaacacgttagttcctttgctcttgagaacttgtttgtgtatgtaagactgtaactagctataggccttgtcatggaaacagttttgacccttatgtggtttctctgctactggaatttaaggtaagttggttctactctggtccttgctggcattgtttatattggctggggtcaaggtgtctgagaacatggaataaatggaagccctgtaatgagatactgctactctctcaggccttggcagagccccagggttgttcagtcaaggtcttcctggataatcccctaccttgggtgatgctgaaacttctgtttactttcttctatggccctgggtagggcctttgtcagattccttggtacttttatttctcctgctagccaaatgcttgagatttaagcctggggaaaggctgacttctgcttcttcctgaggcctcataggagctgtgacagaggctggcctgaatagaattagcaacagaatggaggtctgtgccattctgattgaatagccaaggtccactcactacagcatatctgctgtcatctgccctttgtaatttacttttccccatcattccaggacacagttgcatctggatcagccaggtgccagcaaggagggaaagtgttttgatttaaaaaaaaaaaaaaaagaattgctgctcccaggagggcagtgccttaccccaggaaccagagtcaggggttcctaggtagctggtgtggaactgataagcagtctaggaccatggcatggaaaaaagtcactatgtagaactccagtgagccaaggcattttgctgagtcggtgccatttttaagaagtggtcacagcgtgagctctcttcccattttctgctttcttcctcagcgattttggtgtttctcagagataagcagccatttaactgcttgtacttaacaaatacagatacaagatggcttgctggctccagtgtttgaagtgtgtttataactttgttcagacataagacattgcaataatagtcaataagagttcaatacaatgtcacaggaatgaccagaagacagtaactacagggaaaaattccagcaagaacacacacactaaatcgtatggttttattgctagatgggtgttctctgaaggtgacagtggatgccagcagctcaggtgatataaacaaaacatggattttctttatcttcccatctctttctctagtttcaaaaattaagactgggtaagtttaggggctgggtaagaacctcacttcaaatctccagaatgtaccaaaaagcctacatgattggacacatctctaatcccagcacccttaaagaaacatggaaggtggagagtcagaagacactgatgagagaatccctgaggttgcaagggccagggttacatggtggcagataagagaccctgggtcaagcagaaggcaatgacttacactcgtggttgacctctgatgaccacatgtgcatcatggaatgtgtgtatctgtacttacatatctgaaggcaaggctctctctctctccctctctctctctctctctctctctctctctctctctctcacacacacacacacacacacacacacacacacggattgggtggggagagaggtacaaagaaaagcaggcccttaggattagtagtaacataagacctggattagacagaaggagagcaagtgagcatttcgtcttcccatgtactgcatcctagatgtgcctatggtatatgtgtcagctatctccacaaaccttcctgagggtgtgtattgatttgcttactagcagtgaaattgtgtgctctgccatggcagagtcaatagccaccaaatggtaggctattctgacccctctgcccggccccgctcccaccccgtcctgcatacaggataacatatcatgcccatgcctgagactgcaacattgagctcaattagagccagcaccttgcccttttgaaacatcaaggcaagtccagagacacacattgaaagagtcacacagatgcgataccacgacaaccatgaagggtggtgtgaaaacaatggccacggtgtgagaacaggtcacctcagcttctcatacagctggtgctgggaaacatgccccccatcactacattctctgtgtgccacttagtgggtgcagtgtttgacattcaggatctaataatcctgtagttccccactgggtgctgctgtcactgcagctgtagagaagagagaaatgtagttcattaaaattaagtgagcccaagatctacctggccctatgacacccctgttcgctctccagttctcagggatggggccaggctcactcattgtctgagttacttttccatagctgtgataagatactgcaaacaagacaacttataaaagaaagggt

SEQ ID NO: 678 - DNA, 1122 bp, Mus musculus
gagagccgccccgagccggacgggcttcttactccggcgttgcaaccgccgtcggaaccgccctctcgccacctcggtggctaaggtgccgggtaccaacgccagcagcggagcgcgccagggagcagcgcgcctttgtgcgagacggcccccttgagaatattgaccccaaagactcctgtctcattccaagaaacatcatggctgagccagactacatagaagatgacaatcctgagctaattaggccccagaagcttatcaaccctgtcaaaagctcccgaaatcaccaagacctccacagagagcttcttatgaatcagaaaagaggtcttgcccctcagaataaaccagaactgcagaaggtgatggagaagagaagacgagaccaagtgataaagcagaaggaggaagaagctcagaagaagaaatccgacctggaaatagaactattaaagcgacagcagaagctggagcagcttgaacttgagaagcagaaattgcaagaagagcaagaaaatgccccagagtttgtgaaggtgaaaggcaatctcaggagaacaggccaagaggtggctcaggcccaggagtcctaggcccaggctgtgtgtgacctgatgtgtccccaccatctctgtaggagccccgtctagacacctctacagtactgttcttgggccaaagtcctgaggaagagaatccagacagctgagaattttgactatcaaaaaaggattgcgtttgatttaccattgtggtagatgagttgtctctgatggttgcaattcccattcgccaaatgaaagacatcgaccagcacacaagataccatggacctgtgtttagaccaagaaagccacaaaaggagtgaaaagaggcaggaagcgggcactggaacacgcaagagggttgtactactcggcctttcttccattccaagtttagtgggacacagagccttccttgttaagagaattgtttggaatccctccttgggttatctgttagattgttttgattgcatcaaaatgtatttcatctgttacatccagtatttgtatttcattctgagaacccagatttccccccaccaccaccacattataaattaagaaaggaggc

SEQ ID NO: 679 - protein, 197 aa, Mus musculus
EPPRAGRASYSGVATAVGTALSPPRWLRCRVPTPAAERAREQRAFVRDGPLENIDPKDSCLIPRNIMAEPDYIEDDNPELIRPQKLINPVKSSRNHQDLHRELLMNQKRGLAPQNKPELQKVMEKRRRDQVIKQKEEEAQKKKSDLEIELLKRQQKLEQLELEKQKLQEEQENAPEFVKVKGNLRRTGQEVAQAQES

SEQ ID NO: 680 - DNA, 103665 bp, Homo sapiens
  misc_feature (1)...(103665): n = A,T,C or G
cagagttaataagtaaaccttctctggcacgatttaacattagctgcagtttgaactttacttctaagattggagtggatcacacagctctctcttccagacaagcctggggagcacaacaactaaagctggaactttttatataaataaggacttatgtatataacatgtatatatatttatactcatacatacacacacatacacatatacacacatgtataaggacatataaatgttttatatgtatgaggatataaatatataaatatatgtatttggtggctgagagtgactcccagctaataactagcaaggaaaaatttatgcatatatatttttatacatatttataaatgaatgagcttagaagaggaccttgagctccagacgagatgaactatgagccctgccaagatcttgattttgattttgggaggccttcagcagagaatgcagccgtgccacttctggactacagaaataactatgaattcatttactgttaagtccagaggaaactgaagctttggataagtttcttatccgaggtcaccaggcagatctctttagtcctagcctagccttccttccattcttccatgaacttattttattgcaattaatagaagttaggtgaatatatatatatatatatatatatatatatatatatatatatataaaactggcattcaactagttattaataatataagcattccaaaggatacttcccgctaatggaaatgtctgtatctagagcgaatatcagaaagaagaaaaaaaagttggagcaaactgtagaatgttcacagaaatttggccatttgtattgtatgtcagttatttgaattaggaaatttacagaaattatcttcatattgcttaattgcagagatggtttgtttactcattagtgtcgaccattaagttaccttaatatttttgacaggatgagcgcttaaggattttgttcccctctctttgctatttagagattttagttttaatacacaggaagactctcaggaaatccttttttctggttttggattcatgtaaagaaaaaaacgtaaaatgcagatctttgcatcattcagtagtcgtttatgtgagtaacagctgtttctctcgattcttcgcgatgtgcagttacaagttagaaccaccatttcatagagtccctttgattttaaaattgtgaacaatgaaaagcaagtgttctttaaaaacgaaattaagtgttttaggcagtacatatattaaatgtttggaaaataaaactctcctgaatttttaaactctctagaattggcaaagtactcagttacattatgaaatacagctctgttttggagcttgcaaaatgcttttgtagtggataactactgcaggggacaatactcatctttactgttggtgctgttagcatatttaatgaagtaattccattcctgtgatcacaaatgctcatgcacagaggctcttttaatgaaacagcttatcatctggtttctagcatgttctttcagatttgggcatatcattttgatccttcctaagtactattaatttaaaaaggtatgcatgtgctatatttgcttggcaaaccacacaacttttcacaaagattttccacaaatgagttctctaagtctctttattgaaaggcattatcttcctgagttatggaatattacattaacgtcatacaacaattgtgcaaaacagttaagcaaaataaagggacttctgttatatttacatgattatgctatttaaatgataaaattaggatgccatattcttttttattttttttttgaagtggagtcttgctctgtcacccaggctggagtgcagtggtgtgatcttggctcactgcaagctctgcctcccgggttgatgccattctcctgcctcagcctcccgagtagctgggactacaagcgcccatcaccatgcctggctaattttttgtatttttagtagagatggggtttcaccgtgttagccaggatgatctcaatctcctgacctcgtgatccacccgcctcggcctccggaagtgctggaattacaggcgtgagccaccgtgcccggcctagatgccatattcttaacttcgttttcctttccctattgttttcagtattcaggtcatcaggggtcaatgaagacttggtaaccactgaacggaccatgtgggaattcggttattactcaataagaattccttcttaggcctggttcctggtttactgctgagctctgcatgtgatacctctccaaggtttccaccttctgcctgccctcacattctatgtttatattaaagagcatctgtctgtttgcctgtccttccatctgtcatagaattctaagatagcctccacaattcctggcctctggtatacacacaacttctccagttattcagtcataccctaatctagctattgctgtgatgggattttgcagatgtaaggaaggtctcaagtcagttacctgtcaagataggaagatgatctgggtgtgcctgacctaatcacatgagcactttaagtctgagtctagagccctagatggccaagtcagagattggaagcatagaaggatttgctgagacactgctgactggaagatggggagggccacatgatgaggtttctgggcagcctttagcctttagcagctgagagtagctctcagctgacagccagcaaagaaactgggtcctcagtcctataaccacaaagaactgaattctgccagcaatctgaatgaccttagaagaggaccttgagctccagacaagatgaactatgagccctgccaagatcttgattttggctttgggaggccttcagcatagaccccagtcatgccatttctggactaaaaaaaggacgagtcaatatgtgggtgttataagccactaagtctatggtaagatgttatgcagcaataggtatctaaaacactgatttagaacccaatgcaccttagttgcattatagtcccaaagcgtttgttgttttttctttcccccatctttttcttatttaaaccaaaaacaaataagcagaaattaactattttctttgacctatcagttgaggccatgaggccaataccaatgtattgtatctgtctttgtgggttttatgttgaataccaaagtgcttttgtcttatcatcagaaagatttcccttgagactattgttagcacctgttactttgccctccattctgtagttcctcatgtctgattcagaggaagattatttgcaaggatggtcacaagaattcctcctctcctagtacagcactcaagccctgttgcaatatgactactgcttctaccatcaaggggggtctctttctccaaatcttggatttgggctgaccttgtgacatttttaatggtagaatgtacagacttctatcattcttctagacccataacgctagagctccaggggccttaccacttcctctttcgccctcctggacggggctgttgtgtgaggaagtcctatctagcctgctgagaggccatacaagtggatctgagatgcctgagctgacagctgccatcaacttctggactttgagaccacccagggcaagccagtccctggccaacctcccagttgactgcaaacacatgacagagccaagctaatgccacatggggcagaaataagatatcgcagctgagccttgtccaaattgccaacccacagtattgtgagcaaagcatgtgtttttattttaagccactaaagttttgaggcgatgtgttatacagtcatagataattgacacagaatgagagagcgtggcttaaaaataggattttaaaattaagattttatttctttttgaatggattacgattcaaatgtccacgtacacagtgcaaaatttaagatacaaaagagtatacatgtcaaaacaaatttccctccttgagggcattgttaagtttttctcatctctttggagctcttcagcatggtggtttgggtgtaaagtaacaattttaagattacgcatgaacaaaatgaccaaagtagacaataaaaaagcaacacgtcttattccagattgatttgctttgtatcattttacgtccccaaatagtcatttctgctttgttcgattttccttagggatgaatttgcaagatctccagatgtccaagctaaaggatgaggtcatagtggagtatatgggtgaccctgtaggttgctgctctgaaatggaaaattattatgtatgttttccagtaatgcaagatcagagaatctatcaccagtgatgggttaaatgactcagaaaccattcagcggagtgttccctttgtaatgtaagggaaatcagtatttgtattgaaagcaaatcagtaaagaccctctaagccacctgataaactgtgtcagccccagaacaaaatcttaaatacagcccagcaggctatttaggccactagttcccttgactttttccagagtcctgtctacattcagaatgtgaaatctacagtatatcagactcgggctgagggtctggtgttgcctgttataaccctgggaagtacgaggcttattcattcaacaagcatctatcacccacagagtgatatgttgcagacactgtggtggatggtatggatacaaatggaaatatcaccatagctcataacctttgagtttttatttcctgggatccccccacagtggctccaggggtcccaaaccaaattggatacttgatcttacctgaattaaaatcccactaagattccctagggatgtgagatattcagcctaaaagagcagatttaatatattgatactggcctcctgtcttttatttgaattaataaattcaaagtaaatatttgctcttatttgtttttggtttaaaagaaattatggtacctggtgcaaaaggtagcatcgtgactttgagcctgtaggcatttataccccagagtatggaacgagcctttgtttctatttctctcacggggcagggaaaagaccgtggtcacttatcacattcacacactctgcctgtggccttgcatcacagatgtttgtccaggctactttgtatggagaagtcaggctcactgctgggatgggatttagaatcttgaatccaatgcatctttggttagaatctcgaatccagtgcatgctttttctattcatctgatggggctgctgtaacagaataccctagactgagtggcttaaacaagacatttcattttcccacagttctgaaggctggaagtccaagatcaagatggcagtagggttggtttctggtgaggcctctctttctggcttgcagttggcggccttttcattgtgtcttcatgtggcctcttctctgtgtttgggcagagaaagagagagtggggaaagggacagaggggaaggagggagggagagaggaagagagaaggaaggagggatctggtgtctctgcctccttatataaggccaccagacctatgagcttagggtcccacccttatgaccttgtttaaccttaattacctccctataggtcctgtctccaaatacagtcacattggaggttagggcttcaacatatgaattataggggtatgtggtacacagtttagtccataacacttcccatatgccagatattacattaggcaagagggtataaagatatgtatatatgtcaagcataaactctgggctcacagaggcacatatttacgatacagtgcaataacgccaataccatgtcgggtatgggaggggcagaaaagatccatttagtgtgagcaggtcaggaaagggtttccagagaagactgattctcagagaggagaggagctcttggggattggtgaaggtctgctaggcagaggggaagcccgtggaagagcatgacaaggccatatattcattatttcatccagtcttcatcacagagcagggccacttagcaaatacggcactctggctgagtggagccttggatgtttgctggggagcttcgacttgatcatgtagcaggaagcaggcatccactaaagtgtttcaagcagaggaggaaactgagcatcttgcacctggaaagttcacttgcaccccagaaagttgagaggaaaagcatgtgttagaccagaggctggggccagttaggaaacccctgccaccatattgtgactgagcccaaaggcaacagtggcggtgccagcagagggggagggagatagccaggaattgtgcacactgcacaaaccttggagttgatgccaatgtggggagggagagagtttaggctggatcctaggttttggtttggtgactggtggagccattgtcaagaacagaaacacaactcaaggacgagagagaaggaagaatcataggaaacaccatgtataaagttcatggaattcagcttcctcagctgggaaggagtttctttaagttctctggcagggattccacccctcagtgggttccagggacccagggatggccagacccttacttggctggcaggctgtggcttagagcatggtgtgtgataggtatctttggaataagtaatttgtttaccaaaatccgtaactgatgtgacttttcagtatgactatgacccaaactgtcttagtcagaaaaatttccccataaataagcccttagtcatctgttgccaagacagttaaaaagcttttgatctaaaatccacgaacctgttgtcctttttgctacgctgaaaccgataactgtttcagtccctgattttgtacctgctgtgattcaagtagattgtaatctcagagccttagggttggccagaaaagcacttgtaagagagctgaagaaaaggagatcagagagcaaagaggcggaataaaccctttctttcttgcatatttaaatttccaattaccctttgatgaagggaggggaggaaaatgggtgaatctccaggtcaccgggttttgggtcctggcttgaccgtaaatttgtacaattacaacaaatgtctccttttcctccctgattctgtctgcgttttcttccaagaggaactggcaggatttctatggggacggcctcttagcatcgcagacttgccggggagacggagcccggacacccaggagcgagacgctcttgggtactttgtgtgtgagacagaataagagagagagatgggggtgagcacagagagagaaagagaatgaaagaatgagacagaggagagagaaagaatgaaagagaatgagaatgagggagagaatgagagaaagagagacaatgagagagaaagagattaagggagagagaaagagataaaagaagagagaatgtgtgtgtgagagagacagagaggtagagggagagagcgagggaacgagggagtgagaaaaaaggagagtgagcgccccggagctttgtggctgtgacccacgcggccgccttcccactttcccggtcatccggggccgccgcgctttccctccagccctcgctcccaccgagtcccggaggccgagcgctgcagccccggctggtgcccctcccggcgcggatgcccggcctttctggatctccgcccgacgcgcgcgagccgtggaaggaaggcgggggcggggctgccagggcggggcgcgttgggggcgtggccttgccgccccgnnnnnnnnnnnnnnnnnnnnnnnnnnnnnnnnnnnnnnnnnnnnnnnnnnnnnnnnnnnnnnnnnnnnnnnnnnnnnnnnnnnnnnnnnnnnnnnnnnnnnnnnnnnnnnnnnnnnnnnnnnnnnnnnnnnnnnnnnnnnnnnnnnnnnnnnnnnnnnnnnnnnnnnnnnnnnnnnnnnnnnnnnnnnnnnnnnnnnnnnnnnnnnnnnnnnnnnnnnnnnnnnnnnnnnnnnnnnnnnnnnnnnnnnnnnnnnnnnnnnnnnnnnnnnnnnnnnnnnnnnnnnnnnnnnnnnnnnnnnnnnnnnnnnnnnnnnnnnnnnnnnnnnnnnnnnnnnnnnnnnnnnnnnnnnnnnnnnnnnnnnnnnnnnnnnnnnnnnnnnnnnnnnnnnnnnnnnnnnnnnnnnnnnnnnnnnnnnnnnnnnnnnnnnnnnnnnnnnnnnnnnnnnnnnnnnnnnnnnnnnnnnnnnnnnnnnnnnnnnnnnnnnnnnnnnnnnnnnnnnnnnnnnnnnncccctcgccccgcggcgcccggcgtggaccgggtcgcgccccgacgccagcccccgccaggcagacaaagccggggccggggaggtttgccccgcgccgacggtggccgtgacactgactccagtctgcaagtaacttttcctcttttgcctcttctctttctcccctgttccagtgaacccagcatatggggtggtgtaacacacacaaggagtcctaattcaatttgggttccgtaatttcccccaggcatctttaggtcccttggaggtggcactgatgggtatggccaagtgttagtgttatgtaggggatggtgtccaccacttgtgaaatctgcaagaggaattaggttgagagggtaaactgtagatttcattctctgctgcaaggtaccaagcctgcttccttcctccctcccaaagattttaggcaatgacagcggagcaaagttacttgataggatgggtgcgattttgaggggtcaaagaaaaacggaatgagggctgttggacttcacattcttaaacttgcgatttcttgctatcaagtacatcggttttctcctccagccacgttttcctaacatcactttggaaattctatctatccaagtggctttaagttgaaatagtgtctgggctacctgtccagagaagatttcttagcgctgctggtttccggtttaaaacttttcatgagaaaattttatatattaattaaaaaattgaaaatatatagaaaaaaaccactcatatgctcaccacccaaacacaccctaaggatgaaggcatctttgcttaatttatgacttggcagccatagtgtgtttgtgtgtgtgtgtgtgtgtgtgtgtgtgtgtgggaaaaagggtggggtggtaaatgagagcattactgaccagccacatcagcctaaaatatatttaatcatgataattctacaatattggtatgccacttacatccaagattaatacggacaagttgttttgaaatatattttcttataggtttgcatataaccacctgtacagaagggagaagaaagaaacaggaaaaacaatgtaaatttccactttatttggaagaatgggctgacaaaaaagtttcatggactatatttttgaattcaggagtcatttgggattgacttttgtctttaaatgaaatctttaagctttaaaaatattttaaaggtaacattgtgttctgagattcataagaaatatgtgatggaaaggaattcttgtttgtggaacaaggaatagcagtgattgtacaaccgggtgcatgctggcttcttaaagaccttgcactgagaaagtaaaataagggttttcctgagaatcgtgagttgtgttgagtgtgtatgttcttttaaaataaaatcgttctttagccacagatttggccactggacgcttttgtcattacatacttttattttcctcttgtaacatttttggacttttgaattctctaatatgcaaaatagaggtctttgagacaaccgtttagaagtaggttgatcattaggatgatgcaatacattttgaagttagaagaatctacaagaaggaagttgtggctgtgtccactcaggtgcatttttgttgcagttcctgacactcggggcgctttaatctgcacacacgctcaggggagtgttgcggtgcagtagtagcctgtgagtgaatgagtcatgcatgcagtctgctctgatgatcggcattccttcaggagtcgtgatgtgtttctgtctgcaaaagtcaaacgaagctccaataggaaatgtcacaatctcctaccccaggggactggagatccccttccttgggtggttaaaaatggacttgatttgcgcttctgagaaactgacatgtgaaatcttgttcctgatgtgggaggatggacgccgtcattcattcattcattcatcgaatctttcctttgactgttaattgtttaaaatctcacaagtaaaggtggaaaagagttttactgattttctttgggaatggtggaggggtagaagacttctctcctgatggaaagaggaaagatgaggaatatggcttaatgttattcctaacttaccttctgccccttccctccagaattctgtgtgcaagtgttttaaggaaatgagttgggagtttgggtaagtgagatctagattttgggcatttgtagaagtccccggctatctgggggagttgtcactcttctttcagcctagagaaggtgactatgggtgctagtgtgctgtggggcacactcgggggtgggaaagctgctgtggagtgggatgtcctctgtgtgcatcatggggtcgagtgtggccttgggatgacctcatgagaccttgctgcatttccttgtatagttcccttgtctaatcatggcctatttttgcttttccttcttgaaacaaaccatttttctccccttttcctttctagttcaagaagggctgggcctgacccatctgaagtttccctcaccctaagtacttaggaaacgtgctgaagaggaatggacagtcttacccatctcatatccctaattccggtaccccatcagtgaaagaaagaaagattatttggcaagctggattagattgccatttagttatggtgcatggacaaggggctattttaaggttgatgggggaggctttgcttgtcatttactctccattcaccagacattcagtgcccgtcatgtgccaggcactgggtttactgctgttaacaagactataaggcaggtgaggaggatatttaaagaactgggctgggtacagtggcttgtgcctgtaatcccagtgctttgggaggctgaagcaggaggactgcttgaggccaggagtgtgagaccagcctgggcaacatagtgaccctcatctctacgaaaaattagctgggtgtggcagcgcgctcctgtggttgaagctactcaggaggctgaggcaggtggaatgcttgtgaccaagagtttgagaccaggctgggcaacatagtgacccccatctctacaacacatttttaaaaattagctgggagtggtggtgcatgcctgtagtcccagctaccctggaggctgaagcaggaggatcacttgagcccaggagttcgaggctgcagtgagctgtgatcacgccagtgcactccagtctgggtgacagagtgagagcctgtcgctaaaaaatacatatacatatacataaaaaagaattatacaaaattacacaaaaattgtttaattacagttaagagctgggaagggaaagcactgcttggtgaattaaggtatctcagaaagaatgatgtcaatgccattgaaggtgggggttgggtttctgatggtggaaatgtcagggtgggtgggtgcggcgggccatggagctgcatagggatttgcctagcgcccatcagttcagagcctgctggtaggggcttagctgaacagatgaggtggactgttcagttctgtctggaatttggctgtggggttcggacactttgtcgcttgggattgaaggtggatcgggaaaccgtatggttctgtcccagtgtccttgctgaaggtaaacctcatggccagtagccctgggaagccggttgtggtaggacgtggtgtcctgagctggcctggattccagaagtgaggacttgtatcatgcaaagggcacccaactacagctgtgcccaccagaggttttgttgcaaatgaaaagataagaggaatttgtggggaaagagtgagaagacttatttaagaacattattcggactcagatgagctgtaggaaggaaaacggggagagagatgcagaaaaaggaggtaatgttgctttgacaccaggtgaactcttgactttgggactgactttttgtttttaagtgaaaataaatctttcagctttaaaaatatttaaagagtaaaattgagttctgagattcatgagatgtatgtgatggaaaagagtttttttttttttttttgtagatcaaggaatagcagtgatcccacagcagggtacacgctggcactgagaaagaagaagggcttccccacaaagagggagttgtgttgagtgtgtatgttctatggaaatagaaatcattattcagccgcagattctacattcttttatattccctgaccagagatgttttaccaaaggtgtgagttaagcatatctttttttaaaaaactgtagagatggggtctcactatgttgccccggctgatcttgaactcctgggctcaagtgatcctcctgccttggcctcccaaagtgctgggattatagacgtgagcccccaggcctagcctaccaaggatgtgagttaagcacacgtgaatagtcctaaaacaggccctgtggtctgtagtggtgttgggggcgtgtgtaagtcacatgggttggagacaataatgtttcctccacacagcaaagtcttggggtttctgctgtggcagagagactggggtgtaagaacagcacccccttagaggctgtgagagggcaggggaccctctgggctgctcagcaggcctcttcctggtggggctgcttaagtccttagcagtcgggagacttagaagtcttgaagtggggggggacactgagccccagcaaccctcaggttatgtatgtgttgtcaagtctcccgtagaaacaaggtagaaaaaatgcaggttgcagactggctcttccgaccatggcaggtttaggtgcatgaggttagagggttgtgcctcctcattctctctctcctttctgttgtcagtgctgacttgaattatgctggaacatctccaggtgacagccctgcctggccacagcctgggccagaggagtggagttgctgaacggagcaaggtgctgtaggggaaaggtgtggagctgtgagcctggcctctcagggtgaggatccaggccccagctctttgacctccagcaagtcccgtaaccccttgagctctagtattctcatctgtgaggtcgcctgggttatatgcacctcccatgcatggtggggacatgtggtccctgagatttggcaaatgaggggtgtttatgctgttatgccagtgcccacagcctttcaaaaaatgttctttacaaaatgttactgcgataagagcacttaacatgagatctaccttcttaacagatttttaagcgtatggtgttttattgttgactgcaggtgcagtgttgtagggcagctctctagagcttattcctcttgctgaactgaaaccttgtgcccattgattggtaactccccattttcccccactgcagtccctgacaaccaccattccactcttcaagtctatgagtttagctacttagatgcttcatctaagaggagtcacatggtatttgtccttctgtgcctggcttctttcacttggtcctccaggttcatgcatgctggtgcttgtggcggaactgcttcttttctaaggctgcctggtattccactgtatgtatattaccacatgtgtttacccattcatctgtccttgatggttaagctggttccacaaaactcctagaagaaaacataggggaagaggttcaggacactggtcttggcagtaattacgcggctgccacgctaaaagcacagtcaacaaacccaaaactaaaccagattgcatcgaactaaaaagcttctgcacagcaaaggaaacagtcaacggagtgaaaaggcaacctgtggaatggggaaaaatgttggcaaactacatatccaataaggggttaatatctgagaagtttaagggatttccgcaaatcaacagtaaaaaaatgaagaacccaactaaaaaatgggctaaggacttagacatttcaactcggagtttttttttattattttgtctttttgagacagagtctcactctgtcacccaggctggagtgcagtggtgccatctcggctcactgcaacctccacctcctgggttcaagcgattctcctgcctcagcctcctgagtagctgggattacaggcatgtgccaccacgcctggctcacttttgtatttttagtagaaatggggtttcaccatattggccaggctggtcttgaactcctgacctcaaatgatccgcctgccaatcctctcccaaagtgctgggattacaggtgtgagccaccgtgcctggcctcaactcagagtgttagtaatgcagccggcagtgatgtcaagatgcggacacagggacacttggaggatgggagctttgtcccttgtccccacctgctcctcagtatctcttcatgccttcaggagagttttaaagataactgggttttcatattagaaatagcctgttttattccattcttggacaagagttttggcattgttcctaaagtgtcatagtaaagtgtataggaaagagggctgtcattactgtggtataagcttttctgtgccattattaatatatgggacagagcatactttgtgaaagttaaaactcacgctttatccaagttttaaggtatctggtgaatgctaatgagtttacaaaaattgtacagtcttatgaaatcttgcagtataaataatcacaggtggtttgtgagtgtttaatgtagatgtatcaaaattcccatgtcctggaggaagttgagaatgccatttgtgcatatgcgtatgtagagggggcttcataatattctttcccttgtaacttgattctatttgaaacacataaaactggtcagggttctttttcattttttctttttttagtggatgtgcagggtaaagtagtgtatcggaaagagagaggcctagacttgaaagattttcagacttttaagcctaagcttgccatgaatgagtatatgacttttgagcatgtcattatttctgtttcccagcgtcgtcttctataaaatggaaatagtcacactcacctacttcttagagttgtcttagggtgagatagaagcctgcattctttatgcctgcttgtccttctagggaatgctctggaattggaacagcatgtgggccaccccttaggataggtgactcttagaaggtgagaggaggcagggcgtcgggtgtgcaagagaatcagctacatcatctttcaggttcctgctgcggtgggtgaattctgttattctgtgcccatggaatgggaggtgtcatagaagtcatagacatcagacgtagagtttgacctgagtgagtcagttgccctcttggggtttgcatattcttacctgtgaaatgcagtaataatactggtaatattattattatcatcaatgaacagtttttaatcatcttatatgtggccaggcatggtgtcaagttctttatgacatttcttcattcattcagcaactatttaatgaatgctgccatatgccagtcatcgttccaggctctggggatcagtgggatcacgggctagcatggtggctgggacagacagactccctgcctgcatggagtttatatgctagtgcatgacagaaggtaaacagatacatggatgaggtgattcccatggtcagtgctgtaaagacaactaagtcagttcagggggctggagtctggtgggagagcaggttgtgtttttattaggatgaggctcctccgaggaggagaatttgagatctgagtgaggcaaggggatgagcctcgcagaaacaagtgcaaatatcagcccagtggctggcaggagcttgctatggaaggaatggccagagggcctgtgtgggaggagccagcggccagggcaggaagagagctgtgcagtggggtccaaggaggtctggcaggccacggtgaggacgtggctcatgaggaagccacaggagagttctgagcagggcgtgcaggagatggaccttgtattttgtcagtgtgtccctgtggttgtggagggccacggggactgcagagggccaggaatagaagcagggagaccagccggggtgccgctggtgagatggattggagttgatacaagagagaaaggcattgtgggtgacacctgctcttttggcctcagcctttgggtgaaagatggtgccattgattgatatggggagactggtggaggatgagctttatgatgttcacatcagcctctggacttagtgttgttttattcccattttacagatgtggagaccaagggggagagaagtaaaaagtttgccctaggacctggccaacaaggtgaaacctgtctctactaaaattataaaaattagccaggcgtggtggtgcacgcctgtggtcccagctacttgggaggctgatgcaggagaatcgctcgaactcaggaggcggaggttgcagtgagctgagctcgaaccactgtactccagcctgggtgacagagcaagactccctctcaaaaaaaaaaaaaaaaaaaaaaaggttgccctaggaagaagctgagccagaattaggatccaagtctgatctatgcccaagtcttgcgttttcaatcatttttgctggactctgtacatatctgcatttaccctcattgcgagattgatacgaaagtacctgcagaaatgcttgggagatgcatctgttttgttgttagcatagctttattgcggtataatttatattccatacaattcacccattatatgtacacagttgtgtaatttttagtaactttataagggtgggcagcctccccccagtccagtttttagactttgcagtcagttccccctcccacccccagtcttagttaatcagtgatcttttctcttatctgtagcgttttgcctttgtacaggtagaatcacagtgtggcctctctcttgggtctggttttgttcatgtagcatagtgtttctgaagtccatccattgttgcctaagacatctgcttttaaggaaccttcttagagtttgtcatctatcataagagataccctgtgctgatgagaaaaaggtccactgagatgtgccttaagatgagaataaaaataacagtggccagcatttcccgagcatttgttatatgccaggcacagttatggccattattttctgtgatttctagaaatcagttgtagaggcaccaaccaatgcagttccatgagaggtgccatgatcagtgtttttcaacaagggaggttaaaagcttgctcggggttttaagagctgggatcagacttgggccttcttctcatggagctgtgtctttactgcttcttcacacgcccttcaccatgtgtttgaggcttgtgtcttcgtagcctcacaaagagattgggattccagttggagaatgcatttgccagttttgtttttttttgttttttttttttttttggcagggtcttgctctgtcatggaggctggagtgcagcagtgccaccatagctcactgcagccttgaactcctgggctcaagggatcttcccacctcagcttcctgagtagctaggactgcagagcgcttcaccactctaatttttaaattttatattttgtagagatgaagtcttgttctgttgcccggttggtcttgaactcctggcctcaagcaatccttttgcgttggcctcccaaagtacgggtgtgagccaccgtgcctggctgaaaattgtagttttaaggggaatatttgtactgaatttttattttggcattaccgtatggagatgatagtgtcttaaagtgatccatttgtgaagtattcttaggcatagtgtcagaatggcaccaaattaaaaacacataattatgtcatcaggcagagcctgtgtgtttgagttgttttaaatgttgtgtttaccagaaatgccatttttgtacagagtgccccaaggctgttaccctattaatgaatggaatttaattaggcatcatgcatttttcaacatgtttatctaattgtattatgtataatacattttactctcgaacagttctatatctaaacggtattttttcctgccacatatagtctatattggaagatttcatagttttgtattgcagaggagttctttgtatatcccaagaattctgaaattttggaaaagattttaaacaccttacacactcaagtagcttggtaagagctggttacataattttagccatgataagcaataattttcttttttttttttttgagacagattctcagtctcgtcccctggctggagtacagtggtgtgatctcagctcactgcaacccccacttcccaggttcaagcgattctcctgcctcagcctcctgagtagctgggattacaggtgcccgccactgtgcctggctaatttttgtttatttgttaatttttatttttattagacatggggtttcaccatattggccaggctggtctcgaattcctggcctcaagtgatccgcccacctcagcctcccaaagtgccactgcgcccggccagcagtaaactttcttgaataagaattagtgttacactgggttctacccctggttgctggtagaacagtttttactggtgtcacatcttcctaaactttctcaaatggaattatggtgtcgttaaacttatttttcacgtttagtatgtttttctcttttaaggatttttaattataattttagtttactagttcaaagtagcaaacaaaaaagctttttatgttagaatacctagttttaagaataaaaattaagaattaataatattaaattttaatttaaaaagacttcgttcaaatctttgttgatctctttatctgggtaggaccccagggaagtctgccattttttaaaatattaacccgctgaatggtgggcctttgaaatgagtgaaagaggtcaaccattgttccatatttgttgggcaattccaggcagtgcagtggccagttagaaatcctcacgacttgagctggaagcctgggggaaagtaggatttgggggcagaggtaggtactggaatggtgcagtgaagaagctgttatcttccgttgccaagggactctgttcagctttaatctgtgtcctggctggacggtgcatgtcagctgcccaggctaccagtgtgcagggcgcaggagttagaagcaggccccagtctgtttctttttccattccagaatcgcttctgactggcacatgccttgaagagaggagatattatcttgcaaaactgatccaagtaaaattgaaattgcagggagtaaaaattgggctgtacatgtaatgcatgcactttatgcaagttatgcctcaattatatatttttaaaaagatacacgaaaaacaaagccaaaccacaaaacccctgggtagaaatgcaggattagacactgttaaggatgcaaaatctaagccacctgttaggtgttgtctctttttctcccctttcacttcagaggtgccttgttttgattcacgtgataaattgactctggacagacctgtgattttatgcttttttatgtgaatggctttcccatgaagcctcagagttgctacgaacctgctggcaaaaatttccagcaaaggaacctgtacatttccgcactagtagccccaggaactgcctcttcctttgccaaagctgaatcatcttacctgagggtttcttggtcctgagctgggtgtggcccagccattcatagcctagtttctgtgctgggccctgacctttcaactcggggatggctgggcatgcagtttgggaaatcagatggcacgggatcggggaagcccagggatctgctgaacttcccacctccccagcattgatttcatcccttattcacttagaaatggcttttcttaaggaccaggatttgaacaaagtctgtccaatgcatttgatggttatgccttttaaagctgtatacatatagaacagttcctttacccccaccccttccccccatgctattgacttgttgaaggaatcaggtcacttgttccgtagaatgttccacattctggatttgggtgctgggtttcttttaaactcatcccgctagtccctgtatttctgtaaactggaagttatcatgaaagcttgatcagattcatgtgcagtgtttttggcaggattaatttgttggtatcatctggcttaacgttgcctcagcttaggaaaaggtctgactgtctcacgtgtagtgattctaaaactgagcgttggggtcctgtggtgggtggcagcttgaccctttcatttcctcatcgatctttctcccaatgccgttagcattcatcgatgactgttgtttgaattaattatttcattagagattgttgattcttctctcttaatgagatggcagtgagcatgagatgagatttaaactgaccagggtatcggggaaaactgacaacattgatacagcttaggggcatctacagaattaacagaaaaaagcaaagattggcttggctcttgcagttactgtgagcgcctcctgttattaaagttaattaccgtttgcacggtcttctgtggatgttaccctgtcaggttaattttgttatttaagtcttgagttgcagcaatattaaattctgtgcatatgtgctaactctcttttttatgtaacttgggtgcctgttcacctaagttaggagagaatgacctaggtttaggaggtagaattccccgtgatggtgcagaccatgatagagagtatctttttcaattgtcattttaaattttctgacttgtaaggagacattcatgctcagtcttttcttataaaagatcagtcattgatgagtttaagataactagaggagaatgatacatctgaaatagttttgtgttttcttctgcaaacatacagaagaaatggatcttttttttttttttttttttttgagatggagttttgctcttgttgcccaggctggagtgcagtggaacgatctcggctcactgcaacctccgcctcctggattcatgtgattctcctgcctcagcctctcaagtagctgggattacaggcacgtgctaccacacccatctaattttgtgtttttttttttttagtagagacagggtttctccatgttggtcaggctggtctcgaatttctgaccttgggtgatccgcctgcctcaccctcccaaagtgctgggattacaggcatgagccactacgcctggctgagaaatggatctcttaatggcacctctcaacttcattgttaagagtgtttggagagggtagatacttgaattgtttctgttaggaagaaattgagagttcctttgaaagaagcatgatcgtagcgaatgaatttaatttacatatgctccatcagcaccaggctgcacggtgacatactacatccgcagtttgattttgggacaacttccatacttgaaggctaccagaatggaaatatattgattctaactatcatgggcaagcctgtcttttgccacaatgtgttgtttgaaacctatttgttaaaaggatcattataaagtaggttctaggattcccatagtcacagtctcattctgaggagtcgtgctgttgaccaaacacttgatttcatataaatcatggctgtgaccaataagtcctaaaagaaagatgtgaaaactagaaacgtggaagagtttgaaatcataaatgttgcttctgttgtcagagaggtcttgagcttggagaagccatagaaatgaagaggtcatctaatcaagattcttcatttttggtgaataaaccaacgcttagatgtgttaaattgcttgcccaagaccacgcagctaatgatttgtagagttggaaccaaaactcatcctggaataaggaccattagtacgttaagtgtttcttttgaacatgttaaatgcttcttacatgcatcatttttggatcctcatgacaaccctgtgatttaggactgtaattggttttattttctgaggaggatgttgaggcatagagacattgaatatcttgcccaggatcacccaggactgagatatattcactgcaaagaatgtgcttttcttttttttaatttttaaaatttttaaattttgctttatgttctgggctacatgtgcagtacatgcaggattcttacataggtatacatgtgccacggtggtttggcgcacccatcaatctgtcatctaggttttaagccccgcatacatttggtatttgtcctaatgctttccctccccttgcccctcatcccccaagaatgtactcttattcaccctatggtgtactgccttctgattcattcagtcattcatttcttccttgttattattattactgtttaaaattcattatttcgtgttaaaggaatgccttattcctaacagcccagaaacattgcctttcaaggactttccatatactcttaaaatctatatttttaaaaacctaccagctctaattattgcagatatagtcagtggaaatcactagctataataaatgttatttgaataattggtaattgtgcctggcttactagtatttgaaaaagctttcagattatagatggttcaggactcttataagatgtctaggtaagtttgaactgatagtttctttcttttgataaatgtcctatgccaacctacagctttaaaaataattcctttgaccattcttttaaaaagtcaccacttactcttttttttcttttctttttttttttttgagacagtctcggtgtgtcacctaggctgtagtgcagtgatgttatctcggctcactgcaacctcctgggctcaagtgattctcctgcctcagcctcccaagtagctgagaccaccggcatgcaccaccacacccggctaatttttgtatttttagtaaggatggggtttcaccacgttgaccaggctggtctcgaactcctgacctcaagtgatctgcctgctttggcctcccaaagtgctgggattacaggcgtgagtcactgcgcccagcctcaccacttattctttaaattcttggaaacatcatgaaggaatcaacttgggatgggtttggagccctccttctctctcttcttcctccttttcactccccttcagtaacagtaacatcctggggagctctgaagctgagatttcataaagatcagatgtgtttttgggagacagcgtgtgtggggtgatgggtggggaggagtggaggtgagaagtcaccctgtggcatgggagaggatgtttgatgttgattttctgagtgtcagcctcctgtttctcaggacggttggttgactgtctttttctctacttgcgctgcccacaaagagccagatgtgggtgcctccgggggtttatgggacccacttacctgtgtgaagctggcttacagagaggggagaatgggtagaccctggtagcgtccagggagactttcacgtgggcgtggtttgtactctgacccactggtgactttaaacaatttgtcatcaaataccacagttggctttgcagctatctggtatttgtgcctggagtaggtttgtttgttttgttttaaatgcttctaaattacaattctttgtgagcttcctgtttcctacttacagctgaaatatgtgatgactgactctaccaggactgcttttttccccttttctgcatttgtgctggaaacagaacagcttgcacgcacagcctggagcatgttgcctgcatgtgcttcttggtggacgtgagcacatggctgactaatttcaaaaaccgcctatttatatcctcttcagaagcgctgtcagacattaggcactctctctactaacgtcacgtcgattaatatggattttaaaatggaagtaaattattttttactcatgggtgagtcattagatagtcttttttaaatatacatcccaccatttctctcaagggtgtcacactggtaattgtcccatgctggagttttcagcagttatcataggattgagtgcaggaggaggctgtggagaacacctaaccctctgattttatagatgaaatgacagcccagggttgctgaattactgagagctcaaagctccttggtgcaaatctaggactagagctctctcctcccgtagcttcgaattgagcacagtgtcctttactgtcacccaccttgcctcaccctacctaccccacatgctggcacttgccaccacaaaagaataaaaacaaggacaggaaacaaaacttcctagttgctagggttgtggtgacgattttatagcagaaaagaaaataatgtttaagatatgtaatcctaaagaaactgtctttttttggatgtttgtgtaagacaaattcttattcatactaatggaaagtcttaaaaacattaaacatgaaaaatagttgttcataccatgaaaataagcctaggcatttatttaaatgtatgagaactatctttgtcgactgtgtctgttgtccacattttgacttctagggctaagcaacttcccgcgattggataaatatgggagttctttctaaataaatatatgagaatatatttctgtgcataaatacatgagaataaatacatgagtacctgcattgtgtcttacactgtcattatcctcaggcttttttcagatgtatgttgtcatttattagttccgacactggcgcattagaaggacgatgaactttttgctagatagacctaggcggcatgtcgtaagtgcttttatcttggtgagttcaagttttctcatctctgcagtgtgactattatcaggcaggaaaagcacctggcacagtgcctgtacacaggtgtgaacagaggttagtgtctgctcccccaaggtggtgttgtgatgtgatgtcatacgtgattgtttacactctcacctgatgggcgagactattccattctcataggactcaatgagagagagtttgtcccaggattggggtgaatgtttcacctatatcatcctcttgggccttctccacctgaaatgtagcctagtttgataagcagtggtagaatacagagacaggttaggaacctggtgggggtagagggtccatactggagctctgggatctaattggagagtggaggagcgaccctgggctcaaaggtatggctgtcttcatccatttgggctgctgtaacaaataccacagacggggtggcttaaacagcatttatttctcacagttctggaggttgggaactccaagatcaaagatgctggcagatttggtgtctggtgagggctcccttcgtgttttgtagaaggccacctttttgctgtatccccacatggtggagagggagatcatctgcctggtgtctctttttctaagggcactaatcccattcatgagggctccacttctatgacttaattacttcccctaagccccacttccaaatatcatcacgttgggattagggcttaaataatatgaatttatggtggaggaggaaaaaatattcagtccatagccatggccaaggtgagcagaggcttcaagtctatgggcaggcaggattctcatctcatatatttttttcttttatttttaaatctaccacagagacgttctttgctacaggtaggattcttaaaagcaaagcagtgttctgaagagaaggtgggttttcagtggcctgggatggaggaggataaggaggatgtgagttgtagaagtgagagtgaggctgaaggtcaggaattgaactagcacatgaggaattcgggtcaggaggtcaccagtaaccaggagttgacagtgatgcggactcagtgcccttgcccaggtattttgttgcttgctgggttcctgtttatgcaggagctgattgctggctgggagcacccctgcacgcccaagcaagagggatccagggtcagcagttagtggcaggagaaccccctgagggtgccttgtatgcagggagagtgcatttcctgtttggtttgggacgagcctggtccaggtgtaattagtaacagaggcttcctccttactcagcaatgactgctgtggtcgacaattaatatggtcaccctactcacgagtacttggttgcagagaagtatttgttatgtgtatgagtgaagatcctgaccaaagatttgaccacacaaggttctgtggtgagtccatggtttacctgtctcatgggcggagcttggctgcctctctttgtgtacttgttatttgaattccaaagaacgttctgcgccacacttttcagagctcttttctcccagtgtgtgttttagatggccgtctgttttgtcattgataagctaattctgtaaacctcagggcagctgcacatgcagcatctgtaattgcacctctgtaattggctggagtgctcgagagactgtacttgcttttcctggcgccccccagggtccgtggcttcacctaaaggcttggtggcagggactggtgagagagggaagaggaagacaggagggagaggattcttggtcttctactcatcggcctggttgacaggggctgggaaagtctgattcttagttgactgccgggaagatggggcttgcgagagtggagggggctgaggtggggtccaggtgttactagtggagggtgtccaggttcttggcattttgaacaaagaattggacaaaacgcacaaacaaagcaaggaaagaatgaagcaacaaaagcagaaatttattgaaaacaaaagtacactctacagggtgggagcgggctgggcataggggctcaagagcccggttacagaattttcttgggtttaaataccctctagaggtgtccctttggttacttggtgtacaccttgtgtaaatgaactaatggctcactattggtctgattggttatttgaatcagcaagaggggagcaatcagaggctgaagcgaagttacaaagttacaccctgtgccaacatctgattggttgcaggaagcaaccaattacaggctgaagtgaagttacaaagttatactcctgtgcaaatgaagacttggcctgtgaccagcctgattggttggaagaggggaccaagcagaggtcctttcagtttcacctgccatgcagaaatggtgggggttgcaaggggagtggcctccggtccttttgttacataggtgtggaaagttggggttatccttttgatttagttctaggaagtcagtgtgaatcggccttaggttccctgcctccagcccctattctcctgcctcacagggtccgtatcttggagctgtttataattgtagggagagcactgcacgtgtgttcctggttttcttttggtgtggtttctccatcccttttgggaggagttgatgcacttccttgaatttctgcaccaactattttatttggatcacagcatcttacaggctgttgtcatgttttgagacttttttgtttatggtgaaaatggagcgaaagactctgagtgccgagggccatggggtgcgaaagcataattctcatcggcagctggacctcggaggtccttttccaccttggggttttcccctggtcacttggttatacactgcgtttttccatatctggttggcaactctgaggacagggacccttggcatcctcatctttgtgtctctttagggtcctatagggcttaagtgcttcttcctgagtcattgctgctactcagctgagacaccaacgagctacccagatcagacccagagtgttgctgcttatttaggtggcagcctcagggctgggcatcaggagggcctgtcttgcttggtccctccatcagtctttctttcggacccagtatgtctcagcatctggatctgccggagtagctaggaactcctactgaaaggcagtgtttatttctgtgttggtgtcattttagtcccacacttcctgaactcaaaaccctctttcctaagacttgccatgaaacactcctatgaacaacggtggccacgagtccctttcggggagagtgtcgttttgtactttgtattgtgtcccaggccctggatcctgaggggtggccttgggtctaggagagcgctcaacagggttcgcctatagaagattcttccggtgaatggacgaacttgtggccttgtccagtggtttcttttcctttttccctgtagtttccttccactgtcaacttttccccctccttcatagcagcagatgttggcaaggacgtgcccagattagttaggcccagcctcttcttcttcctccgtccccacccaccttacctttaggactggggtggggtgatgtgtctggccacaacttccgcgaccactttttaaaaaaattaaaaatggagagccacgccacatgcttgtgacttccacaggtgaaagaatactcagctctagaagggcggaggtgagtgggtggtgacttcccgctaaggtgagcttgggtcctgttttcagagttctgtggtctgtgctgcggtcctgcgcttcatgtcatctgtcactaaggtgcagcagcagctactttccctgcagtatcttcatctccgactctgccccgcgagggccctgactctcaaataagacacaggctgtcctgttagccaagcagaagggatatgtcctcttctctctccctgggtaacttctgccagatgaagaattttcctccttctggtttctttagttggagaaatagtaatagtatgatttatcaggctctggaatgagactgccgggcccaccttccaggtctgccgtttaccagctttggctttctttctttcttttcttttttttttttttttttgagacagagtctcactgttttgcccaggctggagtgcagtggcgcgatctccgcttactgcagcctccaccccgctgggttcaagcaattctcctgccttagcctcccaagtagctgggattataggggcacgccactctgcccggctaatttttgtatttttagtagagatggggttttgccatgttggccaggccgatctcgaactcctgacctcaggtggttcacgtgccttggcctcccaaagtgctgggattataggcgtaagccaccatgcccggcgagtttcgtctttcttatcaataaaataatagtgcctccttcatagagttatacagtaataaagttggtgtaagagtagtgtgcctccatggaataagtactcagtacaacgttaaaacatgtgggtaggctgggtgtggtggctcacgcctgtaatcccagctctttgggaggccgaggggggcagatcacaaggtcaggagatcgagaccatcctggttaacatggtgaaaccctgtctctactaaaaatacaaaaaattagccgggtgtggtggcaggcgcctgttagtcccagctactcgggaggctgaggcaggagaattgcttgaatccaggaggcggaggttgccgtgagcagagattgtgccactgcactccagcctgggcaacagagtgagactctgtctcaaaaaaaaaaaaaaaaaaagaaaagaaaaaacaaaaacaaacatgggtatgtggttgcaataacttacacttcgatgctctggtactgtttttagaaagaccattatttatctcccagaggtgtggtcacagtttattatctaatcaggattagagtgaattgtttgaaaacttagtgtatatttacggggatagcaaagaaggatatttgaaactgaagtatcctagcaaccttggatccctttggtaacccatggcaaacaggctgctgctgctattctctgtggttgaagacagggttttattcttatgtgccataactgggagtgtcaacttttgtcacaaagaatgtgtcaacaatatgccaaagttgaaactgtcaacttgggcaagcatcctatacaattttaaacaataccaaattctgtacagctgtctccttatgataaatgggcattgattttatttatatttattttatttttttgagacatggtcttgctctgttacccagtctggagtacagtgatgtgatgtgaccacagttcactgcagccctggactcctggactcaagtgatcctcccaccccagcctcccgagtagctgggaccgtgggtgtgcaccaccacgctcacttgagttttactatgtttttgtagaaacagggtcttgctatggtgcccaggctgttctccaactcttgacctcaaacagtcatcctgccttgaccttccaaagagctgggagtacaagtatgagccaccgcgcctggctgggcattgattttaaaactgctcctggcgtggacacctgccggtgatggcagccagaattagatgtctgctgggaacatcctgatggctggatgaggctgtggcagggatggctctgaacgaacgtctttcaggccagttaatttttccactgcatttggtggcctggaactctgacacttgaatcaactgcttcttgagttgtggaatgcatctgaggctgagcctgacccgggttccagccgcttccctcgtggcaccctaccgcagccacattggcctctttgctgttttccctaagcagcgattcaggtgcttgcccagggcctctgtgtttctccagatccctgtcaggaaaacttgggccaaatgtgctgcagaggcctccgggccaccctttataaatgcgacatctgacgcgcaacgctctcttactcagctcttgttatttttcttccgagcactgcaccagaccgattgcagatatgtgcgtgctcatttgcaaattgcctgtcctcctcctcccctggcccggccgctagaacctacatttcatagactttgggttttgtatctgctgtttccagcagcagagacttgctttagttcttgctctgatttgctgtaacttcaggtgcattcagccaggtgagattgcttattgaacttaccaaagcaacagagtaagagttctggaggttttaatcactgtgctctcaataagccaacagaaggaaatgatctctgggaagaacgttctgcagaatacattacgttccatcttggtatgaagttaggatcctgggaggccaagtgtgaggatcctgctagcattttctttcagtgaattaaaatgatttaaagagcagtgaattaaaggctaggcataatcctatgtctttggcctttaacagttttttttttttaataaaacacagctatgtgttcagtatgcttttatttggcatgaatgaataaaggcttttgtccatgctgtagtgcgctgttccttgtgtaacattccatgtggaaaacttcttttagacaatcataccatgatattttttcttttccttgagaagatggatacttatttttttttctaagaatgtatagtatgtacctttttatttttggtcctggcccccaggaaactcaaaaccacacttaatacagagatctggaaattatattagcccttgtgtgtaccacttgctgtttcttttgtagggtggccttgacttacttactttttttttttggcacggagtcttgctctgtcgcgcaggctggagtgcagtggcatgatctcggctcactgcaagctccacctcctgggttcacgccattctcctgtctcagcctcccaagtagctggggctacaggcacccaccaccatgcccagctaatttttttggatttttagtagagacagggtttcaccatattagccaggatggtcttgatctcctgacctcatgatccacccacctgggcctcccaaagtgctgggattacaggcttgagccaccgcacccagcctggctttctaatgttattttatttacctagttgaatgtatgacttttttttttttttgaaatgaagtcttgctgtaacacatgctggagtgtaatggcatgatctcagctcactgcaacttctgcttcctgggttcaagcaattcttctgcctcagcctcccaagtatctgggactgcaggtgcctgccatcatgcttggctaatttttgtatttttagtagagatggggtttcaccgtattggccaggctggtctcgaactcctgacctcaagtgatctgtcctcagcctcccaaatgctgggattacaggcatgagacatgtatgacttttaacacactccaaatcttttttggaaggaactagtgaatgacagaacagttttatcctcctcttatctcctaatatggggtattgagtaacaaacttggttttgaaattctgttgcccttgtgtgcttttacttgggtaatgcaactaacagaaatttctggatttgcttaagtagaatttccatttctttgcttgataaagcccagggttgcaattttagggcagttaccagccaggtagagaggtaggaacggttttgagatgaccctctcactggtttcctctgtttattctaattgtgagattttggttactttgcaatagagggtttagatatgcactgctttacagcaaccgggtaactggcttctgaagattgaatatacggtttcttcagcattgctgtttccaaaagagtttagtttgttttcattcattgacttagtgccttcctctgttcaaggaattctactaattggtatgggtgtttccaaatgatgcttagctggccgacccttctttggagaagcttacatttaaaaaaattaattttcacaattggtatgtcaaattggtaattatttcagaaacaaattaagataacatcttagaaaatcaatttatggacttgagccgagtgcttcatacaacgaatgggttttttctaggtgtttgtcaccgggaattttcctgagaggcttgtatatattaatagaaaaggagtgtagcttttttttctcttcgttataatttaggtaaagtcttacaatgtgtgaacaaggctgtcatttttagcttgcgtttgaatgaaaacatgctatactttttggagaccctgattgagtaatcagtacttggggtagtgataaaccacaggtgagctaacttgcggcattctttagattaaaatttgatcgtcattgtttgttcccaacaatgatttgccaggaatggtatgcatacttctcttctgccccattcttccttgttctaatctcttcttaaatagttctgtttttcttttgctgaacaggaattcccaagtaaataattctttcttgtgaccgagggtgcagttggtgaggtcttcttgccttctgaatggccagtagctgcttccggactccggaaaatatgtcgcaaatgaagactgctatcactcactctataaacaggaccagaaagtgagcaatttggcaaggtcccctctctcggcaagtctgatggatctcttttttttccccagtgaaggcttgtcatatttataagccagtagtgttatttcagaatctccgaaggaaatgtgcctccgtgatagggaagcaacttgtttattctagacttttcttcactatatttctaacgttgaggaaattactcaaagaggtttggcagagtgaagacagatgagtgagactggattgagtttatggaatgtattaattcaactgatgtttgttcaactccaaatgaaggatccagcatccagggcacagataagtgcaggatattcgccctcagggaacttcctgtcattagggaggctggcacctgcttgcagttaacagaaatgttagcgtagttgctcattctgcttggaagcggagttcgttaccatttcatttaatgaacttttccaaatggaaagaaagctttgtacccgcacgccctggctctggatgtggaggttgagagccctgtgaagctcttatttaaacatgaaaatgggtgtcagctttaggactaagttccactgggaagaactgggggaagggagccatttttaggtggcattagccataccacctttaataaaaaacttcgtgtaactcaatgtatttcctggctggctgcagttacagaaatattaactgtcctaaaatgtttatcttaaagagaaacgacttcagtattagagaatgcacagaaaactagattataagtaaatacttttgttcacattgggggttaaaaacattgggcctgcttcatcatggttattaatgtggacctgtgttgttacgttataagcagaggtttacagatctgagtttcaaggcttggcacttggaaatgagctgagattagcgttagagaacaaggcctctcctgccatcttgggagctgaaatcccaggatctcaacctgaaaatcaggggctaacactctgatattgatctgtataccttcggaaatacagtttttaaaaagaaacaatttttaagactagaacatttttttttatttcctcgtactatgcaagtttatatacgtagctgtaaaaggcaaacgtaagctcgcttttttaaagattcacgtgaagctgttttctttccgtgaacggaagagtttgacagagaaacaccttggtaagcacacatcgagaatacgttattagaacatgattctttctccattgggccccatgaggccaagcagaaaaatccagcaatagaatgcaaatatgagcatgctttctttaagatgtatcataaactgttttctgtcagagaatggaaggatttgacagagaaacacctttgtaagtacacatcgagaatacgcaattagaatattgtctcagttgggccctgtgaggcaaggaggcatatccagccataaaaggcatgcatgttttctgtaagatttcatcataagcagtgttctgtcagtgaatggaagcatttgaatagagaaacttctttgtaagcatacattgacaatatgaagaaacaattattgatcaaaaaagccatgcattattatgtattttttccattctgcttgtaatcagtgttgctgttttttcgtcgtgtttaatagaggcaacacattactgatcccaaatactctgggaagatttaatctaaaataccccttctctattcagggatctgatcatttctgttcttaactaggttttcattggtattctcaacttttctaataaaacggtttttgggacttgcaatcttctttcattttgtagtaagtagccttattcctgttttatagatagaaaaaaataaagtacaaagatgtgtttgcactgttagaattctaatgccacagaatactactgtaaatgtttggttccaattgtgccagttttactaatatcacatagtacagaaagccataattttgtgagagttttcccactgttcactgctttctaactcagtggctttttgttgttgttgttgttgttgttgttgttgttgttgtttttgagatgtagtcttgcactgttgcctaggctggagtgcaattgcgtgatcttccctcactgcagcctccgcctcccgggttcaaatgattcgcctacctcagacttctgaatagctgggatgacaggtgcccaccaccacgcccagctaatttttgaattttcagtagagacggggtttcaccatgtttgccaggctggtctcgaactcctgacctcgtgatccacccgcctcggcctcccaaagtgctgggattgcaggcgtgagccactgcgcgtggccaactcagtggctttttaaaaaatcgtggtgaaatatacacaacgaggtaaaccattttaaccacactgctgtgcaaccatctccaccatccatctccagaactttttcatcatcccaaaccaaaactcggtacccataatacaattcctccccattcccttctcccagcccctgggaagcagcattctactttctgtgagtttgactcttctagggagctcatataaatggaatcgtacagtacttgtctttttgtgactggcttatttcgcttagcgtgatgtcttcaagacctgtctatgtggtagcatgtatgacaatttccttcctttttaaggctgaaaaatgcctaatatctgtgttgtatggatagaccacatggcttattctttcatcccttgctggatctgactcagtgtttttatactgagggtcacagcccgcattttaaaacgtaaagtagattaggaaatgtgtgcccatatggggtatttgtattgttttgtgagcccgtgcacacatgtgtctgtctgcattgtgatgtaaaatgtttttctggttgtcagttgctgttagaaaagtttggaagctgtaccctaaagatcttttagatgttaggtttccctggcccctgtgcctgcgtgagctcctttgtgacgtgtgtggtattcccttggtgtccaggccatcacacagtgctttttcttgactgtgtttgtattgctctccattgaaaagcttcttggccgggcgcagtgtctcatacctgtaatcccagcactctcagaggttgaggcgggcagatctcttgaggtcaggaattcgagaccagcctggccaacatggtgaaatgccttctctactaaaaatacaaaaattagctggtgtggtggcacgctcttgtaatcctagttactcaggaggctgaggcaggagaatcgcttgaacctgggaggtggaggctgcagtgagccaagagtgcaccactacactccagcctgggcgatagagcgagacgccatctcaaaaaaaaaacaaaaaaacaaaaagcttctttagcgtgtgatccccagtacagggaagtacaagctacttaaactagaaattctaaaaaatatgccacctgctttattcagtgcaagaagcttaacccctttagtgcttattattgactcatacagataacttagttttatgagctactttcccaatggtcggtaaagtcagtgttttcattaaaggtcagtatgaaagactgttaataaaggaggtcatatttcttttcctggtgtgttctccgatggggcacactgtaccctagggtaatatgatttttggaataaaacaggcctggattcaatcatcctgttatttgctagctgtggccaattatacacgaattacgaagagatttcaccatcttcatacagaatttatagggccatatatgacttgtgttgggggtggagatgctttggggaaaagtgtgaatgtaatgttattaaaaaatcaagtaattttatttcctacccttcatactaacagtataattttgtaattctttttctaggagttgactgaaatgtactaataatctgtgagaggtctgtgtgctaagccttttctcagtctcgtctcttggccaattgtggtccattggataaaaacagtatgtctggcctgctagtctgatgggctgccaagaggtggacagttgtgatcagccacatgggctttgttctgacacttgggtgacggtggaagctcctgattggcaggaactctgcaagtgtatgtgggagcagtgtttcccaaatgctgtttgcccagggcacatttgtactggtttgcaaaatgtcctactgaagatccttgttaataatgtgtaggttaaaacaacaacaaaactagggttcagttttgagatattggatagattatatccaccgtgcatacatattgtgatgtctcagggtacagaatgtaaagagtaacagttcactcttacagattcagttgggaataactgtgtcaggatgcctgaggaatatcaccttgttatctatttattacatactaattcaagattttttctcagggtggcatgcatattcagtagtgtttgtgtattgtactaaaccctgttcttactgaactgagattttgcattttttataagcagagcttggaagctgaacccttaagtgtctaccctggtcttgtggcatttcatgttgagagcaccaaaatattccctgtgtcatgggaagggtagattatgagagaaggagcagaaagagcagataaactcctgggccctagggtggttttttttttttgtttgtttgtttttatatcatgtatccacaatgatcatttggaaggaatccaagtgaatcaagtgtgagtcaaacagcattgtttatagatgctgttgtagtctgttctatgctgccgtagtggaataccacagactgggtaatttacaaagaaaagaaacttatttacttatttatttattttgagatggagttgcccaggctggagtgcagtggggtgatgcagcttactgcaacctctgcctctggggtccatgtgattctcctgcctctgcctcccaagtagccgggactacaggcatattccaccatgtcctgctaatttttttttttttttttttgtatttttagtagagatggggtttcaccatgttggttgtctaggctgatcttgagctcctgacctcaagtgatcctcctgccttggcctcccaaagtgctgggattacaggtgtgaaccaccacacccagccaaaaatgtgtttcttatagttctggagactgggaagtccaaggtcgagggcctgcatctggtgagggccttcttgctgcatcatcccatggtggaaggtggaagggcaaaagaggaagggggccgaagtcttccattttatatcccacttccacattaacagcattaatccattcatgaggtggagcccttatggcctcatcactgttgcattgaggattaagtttcaacatgaactttgggggacagagtgaaaccatagcagacagttttcagagctttccaccaagcctgtttctctccacagtgcactgactgagcagggctgcggcactgggaggtagctggtgtctgccatgcactgggcttggtgcaggagttgaaatgtacttgtgggccagatgtcaccaagtgggcgtctatatgtgcctctgcaatggtaattccactcttgctgctttgatatatatttgctatttcctaataatatagtaataacaatctagaactggaaggaaactccttgttttagaggggaggatccttcagcccagagatcatacagatatagttgggcagagttgggactggaactcaagtcccttctgcttgtcgtttttttccaatctaatatatatgtatatctacatacacctatacataacatatatacacacacactctaatatatatatatatatatataaatttttttttttttttgaagagatggggtctctgtgttacccaggttgaaatgcagtggctcttcacagatgtgatcatagtgcactacagcctcaaactcctgggtacaagcgatcctctggagtagctaggaccacgggtgcacaccaccgcacctgtcttccgccatgttaaacataacccttccccatagaaaattcttagcacattttataaagtgggctgtgatgccatgaatcccagcctcaggagggccattctgattggtctcaggcctccatgctgtaggtgttgtggtgatgctctaagaagtgcgagaacttgtcctcctccaattggaggttgactcacgcatgcttcctgcagtcaggttgtgtgagtgttgcaacctggtacccacccagggctggagagtctgcgtgcatatttgcttacaagtagaggagctgatttttttacagacaagtacatttcaccagtgctgccagcacgttctcttggtctggaaggtcagtaactggtaccagagttggtacggtttgtttttcattgtttgctctggcttctgtgccggatgaggtcattcagttgcatacagttcctgctttcagaagttgctagagtgtttctctttgaacttgaactgtggctcttttgatatccagaaagagagttctttgtggggatggttaattcttgttttgggtgcttttcttcaccgctctaaggaactaccacagtcagaaggtgcattcttactgcgatctttttatttgctaccttgggcttaaggagcctgcctatatctactgaggtgaggttaggtcagtctctgtaaccgttcgtcacttaggccttgatgggtgacatggatggggatgacttcctgggctaactcttctcttgctaaaggatgatttttcaccaccttgaatgcccatgattaaaacataaacaagaaaatagatatctgaggtaagaataaacactgggacttttctatggctgttgaataatgtagtccttctctagaaaatgttgtgtgaacttagacttgttaacagaatagcagacttgtatgagactaaataaaaattatatgttgttatagtgagtggtattgaatagtgtgtctttgccaggaagagagctttgtaataggctgtgtcttgtgtagttgtgaactatttttttttcctaaaatttcttcagatgccaaccatgtctgtcaaactctggatgagtcgccttttacttagctttttaagaactctttttggattcactaacttttatctgcattattttatccatgctctattaagtgtctaggatcctgataattatgcattttctctgaagatatctatttccagtaaaatttgactatctagtgaagattgtaggcctgataatatattttgaagtgcttgttatgatctgaatgtgtgtgtcacccccaaaaatgcatatgttgaaatttgaaccccttatgttatggttttaggaggaggggccttggggagtcctgagaatgggattagtgcttccaggagaagagacaggagagcttttttctcactctccctgctgtccaccatgtgaggacacagccagaaggtggctgtgtgccagtcaggaagggagccctcaccagacacccgatctgctggcaccttgatcttggacttcccagcctctagaattgtgagaaatagacaagtgttgtttaaggcccccagcctatggcagcttgttatagcagcctgagctaagacatatttgattttagcaaaatagcacttgatttgaaagcattctgctcattgccatcacctcctccttcacagttgtggattaaaaaaaaaaaaaatgaacacatgaccacaacaaaacactgatatgtgctgagtttaatttacttcttttttttttgagatggagtctcactctgtcatccaggctggagtgcagtggtgcagtcttagcccactgcaacctctgcctcccaggttcaagcgattcttctgcctcagcctcccaagtagctgggattacaggaactcgccaccatgcccagctgatttttgtatttttagtagagatgaggtttcaccatgttggccaggctggtcttgaactcctgaccacaagcgatacgcccacctcagcctcccaaagtgctgggattataggcgtcagccactgtgcctggcctttaatttgcttcttattccttggttaggattagggagagaatgtcttgggtggccactgtggaaacagcatttccagtacctgtcggtacttgtctaaggagatttaatgctctccttcctcttgggcagtcattctcacagtggctatggcttgtcttgctacatacactgtgtaaccaccctgccctgctgggccttggtgtacacagatattgggtaaaaatctaatgttgacctagataaacatcacacacacacacacacacacacacacacacacacacccaccacatttttttggtaggtacgttttcaatgtcgtttcatttcagaaaaaatatgggctacccttatattaacataggacactcaattaccttgtatgcattcacatttatttacatacagtttttttctgtagcaatgataaatgcaatcctaagtaatattggcttaatatttggatgctttaatttataaaagctttccctttctatggctcatgacagtgatttatatatttattggtagctctgttttagaaaagcgactgagttgctgggtgtttctgccctagtttctggtttccgggaacctctgggctcgcccagcctgcctggttggctgttggctgaggctggccaaggttcttgaaactgttgacacctgtgaagctctctgtccatctcagtaggcgcgagagtcccagatcttgtttggggaagcacggccttgcattgaggagggagaagggaagaaagaacttgattatttcagagaagagacagaggaaccttggtttccctcaaggtcttaagtctggagtacctgtcacttctgctgacctgtgagctgactgtgtgagggctccacccctccagtcctggcctatttccatctttcccaaaacttgagaggaaggttacactgaacagaagtacctgtgttgttcttgagttgaggaatttttttctgctatatttttttctaaatgatgctaaagtttttgctggaacaatatgttgagtctgtctagcttccggaggacttagatcaccacatgttatgatcttaacgtaacacatgtgtgcatgcatgcatgcacacacacacacatatgtgcacaatgcaaactgcagctcaccacaacacaacatgtaccctccccttcctttcatggggataggataactcgaatcttccttctgacttttattgtcaagaaatattttctacactctctatttctatatcagttgttggcagttatatctgcaaacccatgagggttttctggattcagataacacacatcatttgtggaatatgaggaatttaaggagactcgagggtgggcaaagatttgaataaacatcagaacgaggatgattatttgtgaaacagacctttgagaattgagttccaagagcaacagacctttcgatgagaaccaaaaaattcattctgtagctcagaaaattcctaacttcatttcttcaggataaacatgtcattataccaaatagcaatctcagtgtgttaaaatctacctatgcactgtgtcccacagacatcgtcagatgccagctctcctggtgttgccatttattatgttgccgacgattctgggatttaggatcccaccttcatgccctgtctctccccctccttccaggttcctgggactgctctttgcctcccccttccaccccaccctctctcccttcccctccagcctcttccaccaggtgctgtgctcctgccttgggatcagccagctcccatgctgcctccttccccagtatcttcacctcctggtctaacccagagatcagccacccttctcctacccgagtatcttcacctcctggtctaacccagagatcagccaccctcctcctacctgagtatcttcacctcctggtctaaccctgagatcatcagccagcctcctcttacctgagtatcttcacctcctggtctaaccctgggatcatcagccagcctcctcctccagtatcttcacctcctggtctaaccctgggatcatcagccagcctcctcctccagtatcttcacctcctggtctaaccctgggatcagccagcctcctcctctagtatcttcacctcctggtctaaccctgggatcatcagccagccttctcctccagtatcttcacctcctggtctaaccctgggatcagccagccttctacctgagtatcttcacctcctggtctaaccctgggatcatcagccagcctcctcctcccccagtatcttcacctcctggtctaaccgagagccactctccgagttcagtgctgccttggctcccttgggaatgggagtgcaccttctcccaccctgtatgtgccttgggatctggaggcagggcttaggttcctgccctcatggccacttttgggtcatgacccttcccctcgctgctgctttgagccttgtctcagtcgtattctgtcctctaccctcagtgctagcatttcctggtcgtagctcctcgttcgttccttgaaagttttggcccctggctcacagtcatctgctgcaggggtcagtatttgtcaaagctcaccggggactccatggcagccggagctgagtgaccagcagcctggtttgcctgagactggagtggcagcaggagctttttgggatggggatgttcagtctgaggactaaggagtttcacaggacgcaggactttcagtgctcaaactaggaggaggaggttaccctaaaaagacactgttaataccaggaaccgcttctgagctgaaatccagagatcccactcaccagaagcttctgtccttcagctcagctgacagattacaataagaacatcagatttttcccattccaggtccctttccaacccctctgctcctgctggactttgcctctgcttttgaattccaacatttcagcgatgcgcttgtcaacgcactggaatcccttacttcactctcctgggggattgggcggcccacccatgcctgtccctggacttctgagttctgccagagaaagttacacagttgcctctctatgatcctgatctctgcctcaccagggcctcaacactgcctggaaatcagattttcctcatcaaccctcttcctctccataatgacttttccaacctcctccacacttcttaaatctctaggttcatactgagcccatccctcctcctctcatttcactctcggcagattatctttccacagctcacgggacagtggtgcgaaggccattctctgaccttcccactgcccctttgcaaatccgcctgctcttgggcctgtacttttctcatttttctgtttatagtgaaagaggaatcttatttattctctagaaatccatttctgcaccaccattctctcccacctccaatttatttatttttatttatttatttatttaatttgagacagagtctcgctctgtcacccaggctggagtgcagtggcacgatcttggctcactgcaagctccgcctcctgggttcacaccattctcctgcctcagcctccaaagtagctgggactacaggcgtccgccaccatgcctggctaatttttttgtattttttagtggatacggggttttactgtgttagccaggatggtctccatctcctgaccttgtgttttgcccgcctcggcctcccaaagtgctgggattacaggcgtgagccaccgcgcccggccccacctccgatgtaaacctctctcctggtatttccttctcatgagcatttacaagtgctcaggtctctcctatcttacgacaaaaacagaacccaagctcttcttggaactctcctctttcagtgaccactttctctttccttctcttgatgaaacattttgagagcatgttctactttctgccttgtactattacctactgctacacagcaaatgattgcacactcagtatcataaacaacctgtgttggttccctcaccagttccgtggctcaggagcccgggcacagcctagctggtttctgtgcttcaggctctcaccaggctgctgtccaggtgggcgccagggctgtggtctcatcagaggctcgactgaggaagagtgtttccaggctccctcaggtcatgggcagaattcatttccctgcagttgtgggacgtgggtcgcctgcagttccatgccgcacaggtccttacttcctttcagctggcaaggatggaagattgcagcatgatggcttcacaggagtgacatctcatcacctttgctatcttctgttgttagaagcaggtgacaggtgaacagtaggtggagaggaatgtgggatcaccttaaagtcactgtgttacctacttattctttcattcccctttcactcctcaatccattagattctgttttttatctctgctactttagtgaaactgataccagagggtcaggattggctacaaaattttctgggcccagtgcaaagtgaaaatacagggttctttgttcaaaaattaagaatttcaagatggtaacagcaaagcactaaacgaagcgtagggcccctcaggcatgggggctgtgaaggtcccatgcccatgaagccagtgctgcagagaggccttaggtccgccctgctgcgagttccacagggccctctggttgtgttcctgcttggcctctcagcagcatttgccagctgggatttaccactgtggagcgcatcctcctctgtgaaacatccccctgccctctgagcgcctgagacactctcccctgggtttccttctctcgctcgattatccccttcagcctcctttgcagcctccccttcctctccccacccctttgtatttgggtattttgaggacacttttgccaccctgctgaggaatatcagcagtttcagccgcttcgtttgctgtaggattttggctgtcatatctacgtatccagcccatacctaacttgtgagctcaagcacctatgtcagtgcatcctttatagtcttgcatgctttgcaggtatctaaaatgcagtgagtctgtaacacatttccttgttttctctgatccattgaactggttcttcctcagtgtcctctatttcagcacttggcctcattctttccccggggagtctgggtttgtatctgtgtgctaaccccaggcttgagtcccatctttcttctggctcatcttgtgctccaagcccatgcgcctatgtctgccgagggttctccccttggactgcatttcatcaaatgctctccctggacttctgtggtctgttctcatggtgacctcggcttcctctgttaaaacccagcacacttcattgctactcctttgtcgaatgcctgcttcccccagtagaaaataagctatgataaataagtccacgaggcagggagttttactgctttatcctcagtgtcaagacatatgcctggcacaagctgtacactcaataaatacgtgttttaatgaaagagtttgttttaattttcagcccaattttttaaagaattaaattgattttttagagacagggtctcgctattttgcccaggctggtcttgaactcttgggctcaagtgatcctcctgcctcagacttccaagtagctgggattacaggcatgagccaccatgcccagcccagcccaatttttcaagtgtgaccattttgttgttttagaacgaaagtgtagaaaatactatatatggaagagtaggacaatggtatagtaggattcctgttcttgagatattagaaatatctgtaatgttataataggtttgggcctttcagttggattgttagtaattagaaagtaaagctgtaacaggaaataaatgggtgtttccttatttctgttgcgatctgggcactaacaggtggaaggaaactggtgccatttgccctgcagaattcacagaattaacttgtgcaatttgggtgggaggaagtcaaaataggtgatgattaaccatggagatgagtgtatttcagatactgtcatctgaatcagtttgcccttaccacagcaaaaatgtttttataatattttatcttttttttttttttttaaacaaataagtggtgaggtagtcatggtgagagatctgcatctctgattcttgggggcactgtttcctcacaaacctgcagtatctgctttgaaaactattttgatatagaatggtgaaatggatcaagtatttgggggcctaattattcagagactaaatgtggccggaagaggaagaattctacccaagaaagctgccgctgatctgctcaacgtctcggagcagtctttttttaagcagaagtcagtaacaagcaaacacaatgtcaatggatttattaatctgttaaactcttcattctgttacctgctgggtctcaatctttttgacctcaggacccctttacactgttttaaaaaagtatttgagaatcttaaagaacttttttttggttatatctattgatattttactatgttaaaaattgaaactgagaaattttaaaagttcactcaaaaataacaaacaataataaacctgttacatactaataaaaaggccatttataatgaagaataaccttactaaaacaaaaaaaagtatgagatgaatgtttcacattgttttatttatctctttagtgattttttaaagtgaaaaccaaaaaaaaatttagtgagaagagcgacattgttttccatttttgtgaatctgtttcataaccagctttgatagaaaatagctgtgttctcatgtctgcttctgtaatcagtctgtcggggtaggttgttttgggggtcatgtatgcagaaaatctagtttcacacagttacatcattgggaaaggccagagaattgaaataaccttttcagataattacggacattcttccttgatactacaccaaaacctgatgagtggtagtgtctgaaaggttagttacaatattctgaagccatagcaatgatctttcctactctgttacattaaaatttgtctatcttgcattttgaataggacgatagaggaatagttaagtcacctataatacattcatgtaatggcagattttgcagccatatattgaaaaagttattacaggtaaaatgcttacaaatgtaataaattatctatttaatatcccaattttgctaaaaaatgaaaagaggtgtgtattgtattagttgaaaggaaatgtatcaaaatataaatattttaaatgatgcattcatgggggaaattttctttatacttttctgtattttccaaattttgtgtgatcagcacattgcttttaaaatcagaagaaaaaaaataagtattttttgttacgagagaaatgtctgttaaactgtttccctcatctgtaggttgccttctacgtgtaaaaccccagtatttccaatttgagtggtaacaaagatctgttttctccctcaagtttttatttgtttaacagactatcgtaacctttctgtggctgttttaagcttcacagtttttccgctttatttcagtagtaattcattgattgaatagacaagttttgacttgttcaagaaaagttgcataaattaaactttcacatgtagcagagacataatttgctttttctcatttctgttatagctcaggcaagttctatttcttatctaagtgaaatggcaaaagaatatcttgtcctatgggataacagagctactctcatggttgagaaataacatggaaattagcatgcaatcgacttctgagttattgtgtctgagctgtttgccagtggtgtgagtgtcacagttttatggctggaagttcaagtggcttcagaaatgcaaagggcagctcacatctggggattagttccctgcttacccctggatttagaaaggatgtttgcaactaataatgtggctgacgtggtattgtcgtaaaggattgctacttccagaattttgtcttttgtggacaggcctccaaatttgatgatcatctgttttcctgcaagtggaagatttcatcatgtttgtatttctttgttttacatttcttatgatatagttgataattaagatgcctacagaagctacaaagcacccacaaagcaggaaattagcaactctgcctctaccacttgtagtaaagcttgaagacattatcactgacttctccagctgaatgtattgttctgtggctttagttaaatgtgtcagtgactctcagggtttagaatctctcccaagactgtttaggaaggtgcatcaccctttgaagtgtagactgtgatggaaaactacttaattgcatattctaatattgttttagattaaaagaccattctgtcctctgcttaaaacaattgaggatattatatttgagggcatccctactggttaatatcatcattacatttgaaaatgttcaaatttactttccatcactaagtatgagttgaactttttggagtagaaaatgcactctaaggccgggcgtagtggctcacacctgtaatcctaccactttgggaggccaaggcgggtggatcggttgagatcaggagtttgagaccagcctggccaacatggtgcaaccctgtctctactaaaaataccaaaaattagctgggcgtggtggcacatgcctgtagtcccagctactcgggaggctgagggaggagaatcccttgaaccctggaggcggaggttgcagtaagccaaggtcatgccactgcactccagcctgggtgacagagtgagactctgtctcaaaaagaaaataagaagaaaatatactctgagtatacctaatggtttattctcttttattgttgaatccactatttacatttctttctttcttttatgtattagactggactaggaaaggtttacagatctaaataaggaatgaggagtgttattatcattgtattgccatgaccacaaactgcggggcctctcgcccttgccctcccccctgtggttttgagggtaggaagccttaccataacccagttcctgatcatgccgcctccctgccgcttacctggtcaggcctcttcgctgtccctacctaccccaggcctctgtgtttgctgctccgtctgcccgaagctctttcccttggtagcccttggctctgtccctcacttccttcaggtgtctgctgtcttctcagcgcggtgtttcatgaatatccacaatagtgcaccctgccactccattgccttacctgtatttccctgcatggcactttgcacggcctgatattatatttccctcggtttgtcagttggctgcctgcccctgaatgcaggctcccaagagggcagtggctttgtgtcctttgctgctaggcccatgttgttgtgaacagtgcctggcacttaatagacacagactaaatacttgatgaattaatgggaggatgaattcaccagattccctcttgtgggtgactctacacaagatggcatttactcgccaggtgtccggctcccttcaaaagacagagaatgatggctggtttcgttgtagcttgactcagtggcacaccctgtgcctgacacccagttgacagatgtgtagggaacaaaattatgacgggatggccacacagttggctgtttgtactcattgctgccagctgtctcccagaacagtcatctgctctgtagggggagaaacagggacatgaaaagccctggaaggttgtcaggaagcaattttaaatttctaatatgtaaacatcggggctttggcatattttgaaccattttgatgataggaatggaggtggtaggagccaccctgattaagttcttgttgagaataaactggtgcaccagacatttacataggctgaatcaatgttgatggcagccgtgtttttaatccatgggcctaaaacagtgtccctcatacctgtctcttgctgaggcccctgtcgcaggtgagccatgtctgacttccgagccttccatcgactgctcagtccacgtcttcagccctatttcccaagcttacctagtgagtcctccttgactcaggctggttcctccattgtttctgccacctgcaggccattggtgctccttgaataccctgtggtgtcatcgctgactcgtgcctccagggctttcccgctctgacggctctgtgtttcctattgcttcatatagcttgcttctgaattagcatgcgatatgtgacactcatatgttatgtatcttggtttagtttttacagaaagatgaaagactcttaaaagggatcttggagttgttcttgtacatcttttatatctcctaagcctttgatgggcacttgttccaaatgggaaagaaaaaaaagatgaaaaaaaaaataagccacccagaatgcagatgggacaaactgttggtgttagagcatggtggtcacccaggcctagagtgtggggtacacaaggaccactgaactaaaactctctgatggtctggatcaggctattgagtagagcaacgggttgtagagtgcctggcacgcaggttgcaatgagattggggaagcaagggttgtgcgtttgttaattcagagattgtatgaaaatggaaagaattaggaggaggttgaggtttatactagtattattctctccacatttagagaaggctcttacagttcctttaatccaatactacacaaaaaagtcctctgagaggccgggcgcggtggctcacgcttgtaatcccagcactttgggaggccaagacgggcggatcacgagatcaggagattgaaaccatggtgaaaccccgtctctactaaaaatacaaaaaaaaaaaaaattagccaggcgtggtggctggcgcctgtagtcccagctactcggagaaggctgaggcaggagaatcacgtgaacccaggaggcggagcgtgcagtgagccgagattgcgccactgcactccagcctgggtgacagagggtgactccatctcaaaaaaaaaaaaaagtcctctgaaaactgagtgagaagctgcgggcttataggactgaagtttggtgctgaaattgcttaggggacccttttcagttgcctcctctttttttttttttgtaagagaaccgggggatttaaatctccctggtatggtttccattagaatggaagctctttggcaggtctgccaggaccatttatcaccttgtccctggtactcagacctcggtgctggcaaagctgggctcatgaaggctggctgcgcaggtgggtggctggctcacgcgcttggtcctggaggtgggggagaagagatggtccaccaaatggttcttgcagttctccccgtcctgccctctggacatggctgtgttgcggcacaggccgtgttgtacttgtggctgatcttgatcgattctcttctctgctccctgtgctggagctagacaccaggtgtttttttttgttttttttttttttttttgaagttccacaggtgattttgatgtgtgagccgtggttgaaagccacagctggactgcgttggaagggaaatggaggtcagcttaggccagttggttcacatggaaatcaacaaaaccagcgtggctttgaaggatgtataattctgttactctttgttggacccacacaactcagcagttgaaatttattattagtttttttttctcctgcgttttcatctcctaatttgggctccccttcatatagagcttttggaagcaagtaagaattcaagttcatcaggcacattttcactacacctggcagaacatattaaggtgttgtgttttataaaatccagccagaaactataggtggtctccagctccacacacttagcaaggcccctgctcaactccccacccaaccccagttttccagtccttcctgcgttcaccagaggcacagtcaggatcaccttagacgctgagttcagaaatggagaaggaatacagttaaaaaaaaaaatcaagatcaggtgagcagtagccagatggcttctccacacaactctctttctggatgcttctggaaattgccatccaattttggtcattcttttggctgtataataattcaaacggtgctttgtgaataagttaccttttaaaagttatgcattttagcatctataggaaggtcaaggaattattttacacctcagggtgaaataatttaattaggtatcttgtttaccctgagtcttctgaaagctagagggagcaaattggagcttttgaaagagtgtgtgtgcgtgtgtgcgtgtatgtgtgtgtgtgcgtgcacgtatgtgtgactgtgcgcgtgcacgtatgtgagtgtgcgcatgcacatgtgtgtgaatgtgagcacgtgcacgtgagtgtgtgcacacacacactggtggggaggcaggtgatgatgggttgtgtcatgaatgcccaagtctggcggtgcatttaatggagtagtccagggaagcaggaggaaactgaggaacagggagggcaagcttgaggaattaaggaattacctggactcacggggaggagctcaaaagacgaattcgatctttttctaaaaacattttaaacagtagtttgcctgactccaaatcaggaagagacagctttacctcatctctcctgcctcctagcctgtgggctccattagcaagggatgaactatcgagtaagagctggcactctggcatcaggtagacctggctgggacctggctgggtcctggctaggccccggctaggcccctccaatggcatcaccatgggcaggctgctaatccccctgggcctcagctactcctccgtcaataaggataataatacctccctcgcagaactgttgtgaaggttgagatgaaatatgagagtgtttaaagcagtgcctgggatgcagtaagcacttcgaatgttaaccagtagtagcagtcatatttttgtggattacctgggaaccaaaccgtcatcgttgatataatttctattaccagttttaaacagttaaatgacaaagaatcccattttaatcaagacattacagtagagcacagacccaacctggttgggtacttagtagggagaaatagaggctagaaattaataattatgcccaataccagtgaacagctgttttcgcactgtgaccagtttagtacaaataaaaatgtttatagactgcatcttttctccatgcacaatttattgaggtatttcatcactttaacagatgataattgaacatttagaattcctagccttgaagatccagcgaggtacaaaccagaaatggccctggcccctaggtagctaaatatctagaggggagaagatcaaaaacacacatggggctggcaataaattaaacaattacagatggtgagagttgggaaacaagcttaggacagagactgaccacggagggacccgtgttggattgttgatccgagaaggtgatgttgaaatacagactgagaaggtgaggaagagccaggggtcaggagaagtgtgggaagggggctggcttgggagggtcatgcgctccaggtggggacatcatgtgcaccaagacatgcagcccagaaagagtttggtgtgttccaggaatgaaggcaggcctgtgtggctaaggcgcagggagcaaggtggcggagagactggcatgaggcatgagaagcaggcccaggtcagatcaggtggggagtgagggccgctgccagggcattggagaagctattgagaggccctgacaatcccatggggggaaagtccattcttagtgcacgtttcctgctttgaactttttctattcaataacgaaaagctgggtgctatatttgttttagccacaaaactatctgggtatctttgagaagtggcacttgctgaggtggccttctaaatctttgcctgctgttccatggcaggatgccttgtgaagccaggtgtggcttgtggcctagatggaccagggagatctcaagtgaggggcagtagcacggagcacacagtaggtgtcagtcaagtctaaacgttgcgcacggctttgttttgtccagagctgagctctcgttaggtcggggcttgacaaatatgaatattgtggcctgggctgctctctggcatgctgagtgctgactggtgtatttcctttttcagccagagaatcctggtcaagccctgaacagtccagaaactctgaggtcagcatttctagatcttctgtgcatttgggaggagtcaccattgatgactttatcaattgtaaatttccgatatcaaattactggccttccagtcagtcggttctgatgacaggaaggacgagggctctggaaagtcactttaagctagtcattgttagtcaaatagtgctgtttttgtatatcgagtattgagaagggaatgtgcttggtctgtcttctctctctgcttcgtcacctgccagtcctgagggccccaggcagcagtgcagctttaatgtggattcctatggatcagaggtgtcctagggctcacgttgttattctgcattgcacttgcagccaggtaaaatcagatttctcctgtttccccttttgggggtggggtgtgtggatttgaaaggcctgtcacgtgtggcctgattgcactgcccagtgtgtgtgtgtgtgtgtgtgtgtgtgtgtgttaaagatgtctgcaagtttagcactggcctgtcctgattagtgaggacctctgattgcctaggccagggctcaggtgagaatactttgatgctgaggggtaaacttgccttctgaaggcacagagcctcctgggtggcagagcaaggactgggcctggcgtttctgacgtttagacctgtgttctttgataaagccatgatgtttaattgtggagaaaatggttctgcagcagatgcagtgaggaaacaaataatgcccaatttttccaagtcactgaatcaaatctttatctcagaagtgaacattttaagagaaaacaaaatttatttcttgctaatggcgtgggaacaacttatttaaaaaaatgagagtgagcaaaataaaactagattaaagacagaagtaaaatgtttagaatagtttgttttataatcaggcattaaattatgtcagtgggagtatgattccaagttcataatgtcatcactacttaattaaaataatagatgtctttgtaagtctgcttttgttagataatattatttaatccagtagtcagttttataatcaatgtttttccttgaggtaaaaaaacatcgtatgacttcaaattattaaacaactttataataacaatgtcctgtttcctgaacatttataaattcaatttatgtcatttaggcttatgggtgcttttctccaagtcaagattatgactttggttataaatccctctggtttgagaaagtagtgatttcttaatacttggaagatagtttttataataattagttgtatatttataatgtaaaacaaagagctcaactgcttatgactaatctgagcaggcagtgttgtgtactgctgctatgacaactaataatttcggtctgacattgacaggtaacttgttagaccataggagcttgcatactcacaattgttctatatttgctttaaaaaatgcctgaatcagtcatcagatgatggtgtattattgacatatttttcatccacttgattaaatgagcttttggttgatatacttctgtgaacttcattgaccgcccatcgctgcttctgctcacccacttttttggtagaggattggaggggatagcatttgtcatctaccttacacaggaaagaaagggacagtgtaaccctgttttgaaatgttctgttgaaacttattagctgcttggtactggtacttcctgtttccaaaaccaatgtttatgcaacgctacactccattgtgagattatttattgccttaagcagaactcctggcatgtttgagaccctgcccctctcatttgtaccagatccccaagtctcaactggtccagtccatttcacaccagcagtaccagccttcatccctctcctgcctcccttctgttgggtggcaaagaccttgttgggtaaataagtttaatctaatggttctcccagctcattcctcctgcccagtctgagttccggcccttatgactctctgactgtcattgtcttggctttgaattacctggcacctttgccctgtctgagcaatgctagcactcacctcccttcctttagtaaacctactcatgatgggtgtcatgtttctcatgcctgcagtgctgtgaactgcagtgccataaggtaggtgggaagtattcgtgggggaggtgtgtttgtggagtaaggcagtgggagggtagaggaaaaggagataaagaaaaagcccatttctaactctctgaacaggcgaggccagcttatctgagatgcctgtgatcaggtgagtccatatctactatacattaattatatatgacatatgtgtggcagtgagcctcttaggatgggccagaggcggcaaaccttgcagcaagcctgggaggtgaagacaaggaaaaacgggctcagaaagctacctgagccccctgaaccgctttaaaacgagtcagcctgtttgaagcctggccctcccattattaattgttatgaattttatgaatttgggcaagtttcttagcctctctggccctcagaacctacctcagagtgttgtaaaaattcactgagataatggcagttaggactgcccagctcaaagctaatattagttaagtaattatttttgttgtttttgctgctgaactaaggccagctgatatgtggcagagctgggctgagtttctcagactctaaagcttgggctccttctgcgagtcatactattactgttgcctcatctgttttggtcagtatgaaaagtgcctcagttcttagtgtctcccctactctttttgcccagtttcctgtgtggtggggttaaatggcccttgactggttcctggtaccagggaccagagaacttccttcttacccattgttaatttgagctaagggtgtggaattttgttcagcttcttagaaaattatgcagatagaatgattgctttggcattaagaaacttgttaactgactttcactatgttttttttttaaaggagaatgcagttgaaactaattttgtggatagagaaactgttggaactgctttacaaagtattttagtaagtgtggggaaatttactgtctcggtcatctttattcctcagctttcatcatgatgtaggggaaaaacttacctgtgaacagatataattattgaagtcatctttaatttgtattctctccctcattcacacacaggtaaaaagagttgagattattttttaacaattggagaaggtagtttaaagattaggtggaagagaagatgatgtcttactatcagtaatattaacccaaataaaactgtttaaatgtttcccatttggaagagatcatgacaggtggtatagagcaagctcatccaatgtacattgctgttggacgtttttgtgtgctttcgctagtctcaagagagctgccaaattactgtggcaagtttaagtaagtgaattagggcaggattttccaagctgctaggcagtctgttagtgggtcataaaattagtttagtgggtcacaacaagcattacaacgaagtgaaataatgacttttttttttaatggagtcttactctgtcacccagtacagtggtgagattttggctcactgcaacccttccatctcccgggttcaagcttttctcgggcctcagcctcccaagtagctgggattacgagtgtgtgcctggctaatttttgtatttttagtagaaatggagtttggctatgttgcccatgctggtctcgaactcctggcctcaagtgatccacccaccttggcctcccaaagtgctgggattacaggcgtgagctaccacgcctggccaaaataatgaacttatcacagtatacagcatgttgtaaaggctatgtatttctcctggaaacgttgacttcattttttttttttcattgttgggtgtgtgtgggtagtggatcactgtatatagataaagtgcgtttgaaagcctccgatctgagatattttagaaagtttatctgagttctttagagcaagtctaattgtgcagagaaggaaagtgcttataactgagtctttcttagctgtatttccatcaccattgagtggattcaccgtgacccattttagggttcaggactttggtcatcacagtggcaatgttttgcaacatcctccttccttctgtggttcccaccaagatcttcccaagcatcatttctaggtgggagggtcacacatagccatgccagttatcacaggcaattacacagagtagatgtgatcacacagaccgtccttttcaaattaaaaatgttttgtttctctaaggctgtcatttttcttttctctacactaaataaaatagttcacaatcctttacaatagaactacaccatatgtcacagaaggcaggtctccgagaggctaaatgtgtggcaaaagtagacaggaagcacagtccaaccgctgtagggttgaaatatgaaaagctagtgtcacaggccaccaagaaggttctgaagcctttttgggggagaattggggagaatttgataaagccagaaaggtacaaatagggactattgagactggcatttcagtggattaaactatagaaggagaaaaagatattccttaacattggtgataatatgttgttatcaggtataatgatttatagtaatggtaatacagatatttttttttccagagctaatacattttgtaagtggaaaataaggtttatgtcttcaattctaaagattcatagatgaaattaggaaaatagtgtccttaaaaaaaaaaaaaggaaaatagtgtccttcctaattaacatgtcccatgtaccactgtgtttatgtactttctactataaactgaattttaaaatcttgaataaagtatactcacaaataattggaatcttactcagtttgacatttgtaagattatcggccgggtgaggtggcgcacacctgtaatcccagcactttgggagaccaaggcgggcagatcacctgaggtcaggagtttaagaccagcctggccaacatggtgaaaccccgtctctactgaaaatacaaaaattaggcgggcatggtgggcgcctgtagtcccagctactcaggaggctgaggcaggagaatcgcttaaaactgggaggcagagattgcagtgagccgaacttcatctcaaaaaacaaaacaaaacaaaacaaaattataaaccaaaatgtagagaatgacttttagattttgttctttcaactctgagttgcctcggaaaacttttaaaagaattgtctcatttttcatggcctttgtgctacatttttaagtacttaatccatttaaggaggtaaaactatcctactgtaattaagctgttcagattaatttttttaaggcataaaggaagtagttagctatgatgatctgtattttcttgttacataattattttacaattgttcctctcgaagtgatgagtgatttcctctataaccagctgtcagtaaaagacaagttttcattatgagtatgttaacgtgtcctttgtccttgtccttttcatttagttaaagtaaccagtagctcctatttatgtgaacttgaaaaaggtactgttaaaaaaagttctgacctttgtgataagagctgtgagtgaagtcaaagctgataggatgctgggttcttgggtaatgaatcctgttacaacaaaagaaatgaaagcatgacaacttgggtaactcagggaaagaagccgatttctccatttcatgtggacttcgtatcaggtggagcatttacttaaggggtgccacgccacctttttctgttctttccctgagtcatactgctgctgtaggatttaaatccctcgatggtgtgttgagactttgggcaaacatcacttgaccatagagttattaggtagtaacagacttgattgcaatgcaatgaattgccagagtgagtaacttgatggaggatatgtattggttcttggggcaaaagtcctcatacctgacagccgaggactagagctgcagactcagtggtaggtggtggttgttctcacagacttgtgtagtggggaaggagtgactattaaggctttgttttgagagagacagacagagaattgacttgaggatggacgcttacaaagtagacatgagattactgcagtagtcctaaatgatccttaaaagcatcctgttggagtcaagataaatcggatcacttcacttctataggatctggattatgactgatgtctctgttcctcatcactaaaatgaagtggtatttctcgaaggcctcttttaactccagaattagatgaatttttgaaatgttgaatattttctaaaacagcctcctttccattcccgtaagaaaaacggttgttatgctctatagacatgtggcacccgatgtctgggtatttaccagtgagctctttgtttttaggctttcatcattctgtgttccttgtttgccaagtaggatgctcacttgcaggatgcggtcattttcccattcagcttttaagttttcctgtgtctgttactgtccatacagatagtgaaaggcttcagctgagtcctgtggggagatcacttcgagtttctgggtttgggtgtgctgtgatggggtgactgagatcactgtcggtggtgaatgaacggtctcatggagctggggttgccctgcttttgtttactcgtgactctacagggcagcctgtgggaaaatggcaaggcttggcgtcctggaaccacaagcctccagagggagttgaattaatgtgcagagttgaatcagggaaagttcagaggcagtgtagtttactcccttattccagtacccacactcactacaaatgtgtttacatttaaacttttgccaaagcccccttagtttaaaagggaggcttcacataaatggaaaagctgaggccaaaaggcctaaacttctctcatctttattgcttattgcagcttttattatagatgctgcgagtactcagcacttctaagaaactccgattgctcttgtttccctttcagcttggagctgggatccagagtagttaactgaggggcctcgcaagccccttgtcaggaggatggcctgcctttgaaggcagttgactcttgtatgtgtcttagtctctttaggctgccataacagatgccacagactgggtggcttaaacaatagatgttggtttcctcacacttgtggaggctagaagtcctagatcaaggtgccagcagattgggttcctggcttgcagacagccgtcttctcattgtgtcctcacatggcattgaggctggagagtacagggagagagattgagaaagaaggagctctggtctcttttcctcttcttataaggacactgatcccatcatgtgggctgcagcctcatgacctcatctaaacctaattacctttcaaaggtcccacctccaaatactgtcactttgggggttagggcttcaacataggaattttggggggactcagcattcagtcggtgtgtgtgcgtgtgtgtgtgcgtgtgtgtgcgtgtgcatgtgtacttgtagaggagggttgattgtccacctgacagccgttgccatcccctcttccctgctggatgccaatttgcatttttctggcacgttttgcggctagagtggtcatgtgacactgttctggccaatgaggcgatggaggaaggcccccgggggcttctgggagtgcctgccttcgcagctggagagagccctcctcaggggctgtctctgccttcccttcttcccatgtgtatctggggcagctgaggcagggctaggagaagagcccgggttcctcctgccacctccaagcgatgaagcagccctgggccaactccagcattctcgtgtgaactgcagaggagccctgcgcttccagctacttgcagccaggtgctgttacctacgccccacgcaccctcacagacctgtgtacaagggcacaagtacctcccctggagctggcaggaggtgcagtcggaagagcatctggtccctgaggcctccctgtgcctccccctggacccccagggtgtccgtgttcccagttgttgaccctcgggtgcgtctgtcgcgtctgctctcttctcctccaggcagggagctcctggaccacgtcttgctcccctctcgatcttcaggcccaccctgtgctcccccgtaggagacatagtaactggttcagccaaccaggttaactcaaccagcgagcgctgtgggtcctggtcttgctgacagctgttgctttactcctttcttgtttttggtgtcctccctgcgaagcctgcgtattggttgttcacagaaagcccaccaggtggcctgaagagagggaagtgggaaaacagactttaattaaaagggccggggccatggaaatagctgttctctagggtttggttagagacagacaatcctccaaagacccagacagagatgtgtcccagtcctcacgctcagttttcattgcggaagcagaaatcaaataagagccaacttaaattcttttaattatggaacattttaagcctacagaaaaaacacatcattgttaccgttgtttctggcattaaggtctcttttttctttttaagagtgaaaaatgaagttttccagacaaacccttaactaattcagtatttcaaaagtgaaatacaggctgaacatcccaaatctgaaatctgaaatgctctaaaattcaaaattttttgagcactgacatgctgcttaaaggaaatgctcaccggagcatttcagagtgtagatactcagaaatattccaaatatgctaaaattggaaaagctttgaaatctgaaacacttctggtgtttcggataagggatgctcaacctgtagtgagtgagtggttggaagttagaacatattcttctgtagaaacaaacctgtttgacccacaatttggccaatatacggagatttgagatgaaaaacttacaaaatgatagaatgactggctgtcattttaccagtaaggaaacaaacccagagaagtgaagtcaggatttaggtttgtggaccttttatttaaggttctttctactctgccatacgttactagtgacttcagacaacagtgtcgaatctcatcagccaaaacccaccaggaacacaacgtgtagttatacagaagttggcttcgtttagcttgcttctgccggggccagtgtacccagaagaaccctgggactattttggaaaggcagacttggggttgttgttggactgggtgatttgaaggtggaattagggaaatgggaccagatctgggttggatgtggccaggaggcagaaacaattcagtgattgggtatccaacaacttttatctaggaggtaggagattaaagtagagttagagtggccatgcagtaaagaatttgcaatcatacatgttggtgagaaaagggggcatctggttatttttgtggtagtaatgtgggcccatctgtgtccgtttttgagcattcattatgttctgatgggaatatgggggtcaggttgtcaattagactggtctttactttgaaggtcggtagggttgaatttaatttgttcaccaacttacttaatttcattctgaatgctgatgcttgaggaataggttttaatggagcaagatgcagtgggaagtagggacttagaggatgtctaaataaccgtgtctgagcagtcactggtttttaaacattgtagctgctcaatggtaataatgcaaattttaaaaaaggcagatgggtagttttcgcctagcttgagaagctttaaaaatcatcatgacgactgtactatcttaaaacgtgatcagctatagaagcagataaaactgtcgagctgttattaaagtgtacttacagttgaaacatattagtcttcaaagatgccatccagttactgatccagaggtaatgttaatggtggtgttactcacggtgccaaaacacccacagatcagtagaaaatgtggacagtcaatttagaaaatttgcaaagcagtcagaagtgagaggcagtgttgggtagtgaagagtggaccagactccaatcttggtcctagtccgagctttgccactgtgtggtccagaatgtctttgccactctcttaacttagtcatttcatctctctgggcctcagtttcctcatctgtcataatgaggaagttgaacacctggtctctgtgttccttctaaagtttctgtcattaagtctgtttgaagatagtctcttcttttgaaagtattagtttgtttggccagttgggccaggtcataaatattacggaattattagtcagctcttgaagacaggaatgtttgagggctttgaaagctagcccagcaggaagcttttcgtggtctgtgtattttccttcctctcaggaatgattaggccgaaatcaaccatcttctcagtccatcctctttgtagtttcctgagatgaatgaccgaggtgttttctcctcagaaaataacataggagaaaaattccaagggaggtctctttattcaggaacttgcaatttaggaattaagtgtgataactttattttaccaattttaattttgtgactataacataatataaataaggattctgttacatgcaaattttgaaatcatgcaaaaaccaaaaaaggaaaagaagtcaatcaaaacttgtataatttcaaagatggtggccaggtggtttggaagctgtgcatgggattgccacatggcctctcccctctagcaggcaacaggtgccttgtgtgtttagtcagtatctgctgcatgtcattgctgatggcattcaagtttttgcttatgtgtgctggtatttaatgttcacttagatctaaatatctttttttagccttcaaagatgtcaaccaggtattcatcaagagatatattaatggggatgttagtgatagagcccaggacacccccagcccccagatcaatagctttgtaacagaagcgctaaaccactatgaaggtgatcagacaacagggggatgcatcctgccattaatttagcagaaagagcacacgtccaaataggagagttaaaatagagaggtgctgtagcaaagtggctcagagcatggactctggagctagctgcatgatgctgctagctgccatttaattagccttgtagatttaggcaagtcacctagtctcgctgggccttaatttccctatctgtatgatggaataaatttaatgtctactgcaaaggttatgtgacacttagcaaacatgataaaacacaggttgccgggcccaccccccagagactgactcactgcatctccgatatttgcatttaactaattccatgatggtgccgatgcctcggaccctgggatgacactttgaggatcaccatgctgtgcatttgtacacacagacacacacgtaggcatttgttttccaaagtaaagggcatactgtttggagcctaatgtttttctcctatttagtgccttgtgaatattttccctttcattatttattctaataatggatgattttaagctgcactgtattccattattagatatttaaatggcttccattttttccgctatcatagaccatgccggaataaatatcattctgtgtacacttgtctacatctctgttgatgtctttagggtaaattcctaaaagtggaattactgcgttcaagggtgtttcacggtaaggccttttgctacacattgccaacaaattcttcagagagtagcagaaatttgtcttcttacaagtagtctatgagagtagatgctgattttctaaatgtaagggaataagaaaaacttcatgattaacttttttcacgtgtatttgggctttggtgggagtaggcaagaagaatatccgtggatttatagagtaagcaaaagtatgtcaggaaaaactaggaagaatagggctgaactgtggcttgatttcaggagagtttctgggattcagacttgaattaactgaatgatgctgtaatgtataagtgttggtataggtgattttatgcaaagaagaataaacattggcttacttttatttatcgtatacggtatgggtgactactgctgctagttcaagggtcttgattttttaaaaatgtgtttcttgactgtggtagctgggagccccaggatacagacttttggttaaataacatctgctccactctgccttcccgtgtgggcctctctaaccctgggccaagcagttgagtctctcctcggggtgcctggagtgagggtggatacagcttgggtaattcagcatctgtacctaaaaacttactcaaagtaggcttcatgtaaagaagtcagtggttcttgggaacaggggtgagtgaatggaggcgaaaggtggggccctccacaggtcagtcaggccctcagggtgggacaagagctgtagggctcttggttataaacctgtgtggtggagaccagcaggtgagccaaactcttctttattatcagaacatttcactaataagggatctcaagggtcatctggcacagccttctctttttgcagataaggaagctaaataatttattatttcagttaagcttcaccatatgagagtttttggtttttttttttttttttttaaagtttttaggatcagatagtgaaccttggaacagaattggctgctttttgtttcttttttctggaagtgctgaactttagagaattgtggctgcatggtagacaggcaaaacaggaaggacacagtgcagctgagagcgagggtggcctgtggtctctcgtttggcctggagaacgggctgatttcaactcctcctgcactgctcctgagtcacgggtcctacaccaccgtgcctctctcccgagctcaggaggccgagctcaggactgcatgctccttcctgagtggtctccaaaggcttcagagtggccttggatgaagagctgctcacttctgtgccagtcatgttttttagaatttacgtactagttttcttcttgcaattcaaaaaagtgttttttttcttttccttttagtaaagaaacacgtatgacgggttatttcttttaaaaagcaacagctcccctgaacaccaaactgtgccttttaccactgggtgacactgttagaccacagaacgtgctttgctggtaaaatcaagagtccttgaatttcagatttcatcaagctactttacataggagagagaaactccaaatcacttaatagtcatctatcaaatgttatttgataagtgtaatttatcaattttaaggccaatgagtttaaggcaatcagttattaaagaaatccattaattgggcaggatttccattgcttagaagtttttgcagattaatgtgctgcatattaatgaactaattatttcatgggaatatttatgcaagccagtgtactaatatatctatttctcaccagacaaaagtctaagttatctttctttggcaaaagactcactgttgatacacagcaattaatgttacggagttttagtgaggatttttttgagccatcttaaaagcacgtctgttggttagagaaatgggtatttggttctctgtactggtatgtgttaagaagattatgtcttactatttctgagctctttcaagatcaaatgaagacagaattgttcaaagcgtgggttgacctcccctactcagtttttggctccttttggaaatctgatgtctgcccttctaagcgtaaggtgagcattatctggtcagtttcagctgaccactatgtgactgagatgtttctgaggttaagaattgagtgcgagtcaggccctccctttgtggggttaacatgagaaagaagacaacttcaaatttaattttaatagaatcagacttcagtatcctacaagaggtattaatggagtcctgcaggagtgtaaaggggaaacactgaggaggagccagggaagacttggtggggtgagttccttcatttgggtactctaaaccgcccgtattatcctgttcattcaatacttttttttttttttttttttgagatggagtctcactgcattgcccaggctggagtgaagtggcgtgaccttggctcactgcagcctctgcctcctgcgttcaagcgattctcgtgcctcagcctcctaagtagctgggactacacacatgcaccacgatgcctggctcatttttgtattattattattatttttttaagtagagatggggtttctacttggccaagctggtctcaaactcctgatctcaagtgatctgcctgcctcagcctctcaaaagtgatgggatttacaggcgtgagccactgtgcccggcccattcagtacgttttaatacggtgcacacagtgtgacatacagcccagggctggggaaggcaataggaggtaagatgagaggtttgctggcctctggaggtcagccagaggcacaaggagtcggcagctccagctttctcctagctcttctgtgtctgctagtcactgtgaggccactgctactttgtatggcttatgtacaagccattgtgccagagcataggggagaggatggaagtcactcagaggtcttttcccttctgcagagattcacttctgtgtccttcaaggggagacagtgtggaaacgtgggaaattagcccacaggcggggaagtgcctgaggcaaggggcgtccagtggagtcttccacagcagttcaaacagtaggacatgtctccggaggagaggccccgggaagactcggggaggcaggctgtgagctggtctttgcaaggtgcctggagttttactggctggggaggagggatttctgcccaggaggaaatcggaagcagaggtggagatgggaacgtgcacgggcttggtgtgtactggctgcctagagttgatgccagagagttaagaaccacacatttgtaaaggtaattgaggactccactatcgagaagggggccacagaaggccaagcagtttagcatcctctcctgaggtgaccagtgatgctcggcttggtagccctgatctgattaaatgagttagctcattggatttgactgaggatgcagccggattagagggaaaggcaaccggaggggatggaggccatggagaagccaagtgcacaattcccaggatgagggatgagcgactggtgatagggggcgattttcagatgcgtttatggaagggaactgatgatcgattctgtacttagggttgaaacctgtgagatagaacctttgggagaaataaggaagttaagggaagactgcgagggattgtttctcagtggaagaatggtgtgtgtgctgtcgtctctgttgcttttgagaaacaatagctcaaactcaaattcgcctgggatgacttctgctacagtgtaggccctgtggggtggggttggctctgtcctttcagtgtcctttccagcacctgggcagtgtctggcacctcagaggccttcaataaatcgtgagtaaaggggagctcaacttgacacctgttgattctgaggtgaacattccagtacgaagttggaatttcagagccagagcttgggaagtcaggaactatctccacacacactttagaaacagctcttgtagcagaaggggtaaaggtgtatggggtttccagaggcatgatcgagagaagaggacagggctgtggccctctgcctggactgctggtggcgttaaagggagggaagaggaagtgtgggcagaaagctgggggagaacagggggaggacagagggagggtggtccaggggctgccttcgcatcagcaaggaaataccagccccagacccaggagaggcccaggagagtgtcaccaaaggagggagccctggatggcctgagaaaaccctgccgggtgtggactgtcatgcggatagaaacatgctgttgctgtgaatatttgaaggatgacatttgttgtctgttagtgaccacggatcacagcccttggggacagacattgagggccagaagcacaggcacttcttaccagaaaaaacacctgacaggccaagtgacactgccagctcctaggtagcagttggtctggggaacattagccaaggtccttctcagggtgaaatttctctggaatagttctcaggcccagccattgccctgggaataagctcaaatgcacctctttggttgataaacattctgtgctttggggcttcagatgggactgactagggctgggacacccagagctgcagagtggagcaggctctgactgtgtgtcacgtccacatggtgaacatggcagacgtctggtcgcccttctcgtttctccatagatgtgctgctgttggctgaacctaggggacattcctctctcccaccaggtactactcacaggatgagggtagttctgcagtctaccagggaattctagaatctgcacaggagtagaggaagtgagggtgcagggtttgtgtcttatctgcagtcctaggactttcaactgggtgaaaaaagtcaccaaggatcagcctcttgccaagacaaggggctgttatagttgtctgtgggcccttgaaggattttattccccccttaagccatttttacctccttccctgagccaggaattgaatgaatctttgtttattttaaattagttttcttctatctagagacttcttgttctcacaccctagagtatttttgtttttgttttcattttctctctgtattttgtcttcagtcttttctaagtttgtttgaatatccaacttcctggcaaaactagattatgtgagaactgctttgtttttttttaactttggctttgatcatgatatatttggacaatatagaaaatgcctctttttagccaagatgcagactttggggaggtacaaggctgaagaaatttagttgcaggagtaatttgctagtttgcatggaaagcagcccaaactgtcattgcttgaccatcagcctcactttcttctgacagataccagctgggtcttgggtacccaactttggcacaagcctctctgagatcctgctccagtcattttctttcttccacagcactttctcccttccctgtccacactggaaaaatgagcagaggccaagattgggttcatcattattctttgtttaaactagtgtacttgcggtatacggtcattcactttcatgttgatggaacattaagtaatggagagttagagtaatgaattagtttgttgggactgtttgcctactttgttgagcatctgccacgtgggcaagtactgtggatggtagatgttttccatgagttttcaagaatgctgagaccaactctgcatatgcaagtgtactagctctgatttccagttgaggaatcaagactcaggttaaataattttataaaatcaataattgatgagtgacctaaccagggattctaattcaagatgggtggtcttcaagcctgatgcttttttccattatgctgtataacttcccatggactatggatgaaatgacagaattgtcattatgcagcagcaaccaagtgacttgtggatagtaattttaatagctgttgaacgtgtactcttacacatgcagaggagggcatgcaccaaaaaagtgtactgattgagggtgaatgtttagaggaaacacacctgtgtcaccagaatctgtattatccagaaacaatcttttccagaccctggaagccccattggtactgccgtctattcactcccgaaataagcattatcctgacacctaacatcaaaggttggttttgcctgattttgaacattatgtacatggacgcatgcagtatatactcttctgcatcttgctttgtttgcttaacgttgtatttgtgagattcagctgtgctttgcttgcagaattgccagttcattctcattgctgcatagtattccactatgtcagcacaccgctgtttacttacccatcctactgttagtggacatttgagttgcctccagtttgggactattatgaatggcctgccattaacattcttataaaaatcatttatattgatatattttaatgaaatatgtctttcctgcctcccatctcactttaatgtcatcctttgcaagatgttttctgtttgggatcgtaaagctgtgatgttagaaaggttctaaagtcctgttgagagacaggaaatcattctgttaaagtcaaatctggttcgtccatccatcatcccagcccatggagtgcctaagagcttccttttggaattacacagactcaaggtcaaatcttggtcctgctcttaagcagcttggtaaccttgggcagcagtgacagcattattgttactaatttattcttattcgttgccagtgacagcgctaatagcaggtgatgtctattgaaggcttactgtgttgtaggcattgcgtttggtgcatttcattttttttttttttttttttgagacagagtctcactctgtcgccaggctggagtgcagtggcgcaatctcagcccactgcagtctccgcctcctgggttcaagctattctcctgcctcagcctcccgagtagctggtattacaggtgcatgccaccacacccaactttttgtatttttagtagagacagggtttcaccgtgttggccaggatggtctcgatctctggacctcatgatccgcccgcctcggcctcccaaagtgctgggattacaggtatgagccaccgcagcccagcagttgcatttcttatttactcttcatagcaaccctgtgagatctgtcagtcctttttcattgttgccttgttaaactggcgaaggcccttacccaagatcacacttagagcaagtgaggaagctggaatgcagatgcgggttgccccacccaaacccatgctcttgaagctgtcagcctcatttggagactgggaagtcatgacccctgcctcatgggccgtatgaggaccaagtgacaggggaagcttacatatacccccaggtgacatggacaccagctccaagatggattcctttccctgcatctctcagaatggccagctgcttttggggtgtgctttgactacagtgcaggaaggcggagtgggcatggctgctccactctggctgtcctaaggaaagcggacctgccattccaggtctggacacctcattagttgaggaggtgtcgccacctattggtcgttcccacctcactcgggccagcttctggttgctgtagtgtaggcagatgtctgtcggatgtttcttgccctccttagttgtcactccctcctcctctgccattttctaaatataaaatatgtgccttatttgtaaaaatacattttcgggggatgaaaaaactgatgagaaaatgagtttgatactttcccaagagcatcactgtttggcatttgtacaacaacatattggcagcaaatttattgagttcgtcattgttttaaatgaccatcctgggaagccacagaggactgtcccgtagccatagtggagcttggcagagtatgaaacaataacgtctctgcacttacgctgatgactctggtgggacgtcgtttctaagccttggtgcaccaggttggtggccacagaaatcccctgggcacttgtctgttgcctggtctaagatggaaatttttaggtttgccttagggccaggcaagtcaggagtttgtgatgaaaccaactgcactttgggaaaaattcttaccggaactcaggctcctgcctgtctgggaactgtgggtgctgagagagaggctttggatctaagaggtgtctttcccttttcaggctgacccggcctggagtttgccgcctccaccttacgtaacttgggtttctcagggtattgccagagggttggcagaatcttagagacagcttaggaaacagattctccaaaagtatcttggaattacttttaactttccagacgttttagcagttcaaaaggttgtttcactttggttggtggtagcgcacctgtaaactgtacacgttgccacgtgccaagagattgttttagaaaggattcaagtattagtgcttctagatagaattaggtcttatatatttaggtaaacatgaaaactagcataatctgtaaattctgatttttaaatcttagaggattaggttttgaattcatctctttgatgtagaaatatgcagacatggaaccagagcagtctgctggggcaagccagctacggtctgggtttgttttatcagcccagttgtgaaagttttccgagggaatggtaattcacctctggaaagcagtcaacagaagtacctgggatagccagagagctgggcccggagtgaactttggaaagggaaaaacatgaaaagcaaggactcaaaatccatctgtaagcatgggatttcccagtgctctgggatagtagagtcaaataatgacttccgtgtgttgctcagtggaaattaaaggtagaattctcatcaggcagcatttttcagtgcatagtgtgtctgtctgaaatacaattctgttattactcaacagcttgaaaatctttcagtgagtcccctccattcagaacagcacgagaggcccttgtcatcaggcctgtctgtttcctgccccactctgaacgactggagccattcagaacttcatgcagcaccttggcagtgtgatagacagacctttttagactttccagaagcttcttatgttagttgcatgaataggtccaagaaccattgaacgttgtcagtgagaaagtctgtgggtcattcaactgaagttacagttttgaagaaatcaaagcccagagaagtagagtttcctatacagagttttccaggcctctaaataaagtatgtaatgttgctggttgcatagttgggcttataatagcttctattgagttctcatgtttgtgccagggattagagagagtctttgcatatacattttactcagtttttacagcattcattttacacataggagagctgggggtcagggaagttaggatttgtccaggatctcaaaccagttttatttctccttcactgagctggtcctggttttccttaattgacttaatacattaaaaaaagttactttgagtaagttacttgaccagtgaagtgactgtgacaagattatctttgtgtttatttctagaaatgatgtttcatgtcagtaataatatttgcttgcaaagtacttgtacctctagacatttctaccccatctttactctcaggctcctggattccttgttgctcagagaggaaatgtacctggccgctcaaccccactttctgcactacaccttatggcggtggaatccaaatggctcagggacaccctctgtcgttagcccatgcctttgttacttcatttaagtaatgctttctgaacaggtccaaggggtcaaaagaataggaacataaaccagacatgttctttgcagtgaagagaggataagatttatatccacattgctataatacaaggcggtggttgacgaattactaggaaaaaagaacaaagaacatcccatagaatttgggaaggcgtcagggcagatgcggcatttatttggatctgctggatgcgtgagtttggctttgtggagatccggggctgcggtgggaaaagcctcagcacgccttcggagggtgcagtgctgctgtaagcatgctggtggagggaaggcggggtgtgaggatgtggggagcaagaacatttgtttcagcttgatcggaagataggatttgtgagacgcaagagttgccttataccagagttgtattttccagcgttggtagcagtgagcaggatggctggcagagggaagagagctgtgaagaaggtcatagtgatggttattgccatgtgttagtcacagctccagggcggggtgtcactgagaagcagctggaacccagatcccacatggttctcccgccaccaccactgccctgagtacaaagactcaaggagggggttgctccggcccgttcacccccttgttactaaatgaccatttcccagaccccagtgtggcctttgcatgaggagctgcagggaccatgccacctgttctgaggacaggcttaaggtctccatgcttaactcagactgagaggctcctgtgcacccccttttccagctccagttgtgaagaaggacaaaccagtgaaaaagaaggaagatgtttgcccctgtgttgacagcatatacatatacttcaccacactgtcccacggaaaaacatcctcctgggctgaaatcctaaatgcactacacgcacttctgtgcagccacaagtgtctgaaaagtcaaccgcagcccccccctcctgcaccggctcgcagtgcccgtgtctctctaataggagacaggcttgggtgcccctcaccccactggtcctatgtgagaagaaagatttccaagcaactaaatctaaagagaagtcagaaaaacatcccaagctagggcctgtttcctagattcagaactaaagtcatttcattctgtgcactggaagctcaacctccctcctggcaacaaggcccaagtcatgtttgcacctcaacactgacgtccaggaaaggctgagtgggcatcttatgctgtctctagttgagggggaagtgggagtgcgggacagaggatgaggggacggaaagcggagggcaggcaaagcctgagactgcagagggccagtcagtcaggtaaacgagagcgagtcagtcaggtaaaggagagcgagtcacccaggcttgagcgctggctgcacttgccctctcaatgtcacctctttcatgtcgatcagacgtctcagactcgacacgtcctagatccacttgctctttcagcctcccgtcatggcaacttgagccttctggttgctcaggccggaaacctccaagtcatccttgattcctcagtgcttttcacgcctcgtgtccagtccttcaggaagtcccagagactttacctttaaaatacatcttgaatcaggctctccgcctacctatgctgctgctgcgtgagtctaaagcatctctcacctggatgacctttgcatctgccgccctgcctgcctgcagcccgttctaaacctgggagctggagtaatcttttaactcatgagtcagataccgtcattactctgctcagaacctggaaatgactccccatggccctcagggtgaagaccagaatgccagcactggtgttcaagttcccacgctctatatcctcaccatccctccctcccctgcagccagcctcgcgctttgccattcctcatcccccccaggcaccctcctaccctgtggcctttgcatgcgctcttctcgctgctgatcacggcccgctcttctgtcacattccctccagctcctccccaaatgtaataacgaggtcaaggtcagaggcagttgtctgtttgggtttggcatcgtggagattatctatggtgaagggcagaaatacggagccttttatggaagtgtgtagccttcttggtctatgattaactagaaggaaactgcagttgatttttcagacacttgtggctgagcagaggtgtatgtagtgcatttaggattttgccgaggagcacgtttttccatgggacagtgtgttgatatcaggctggctgtgatgggttccctgagtcaccctctgcgaggtttgtaattctcaattcagttcaggttgcaggcattcttgttgttaaaagagcaatgcaactagtgtctgaggaatgtttggtgtaatttattatatatgccttactgtttgataattttgagcctaatcatggagtgatatttaagatatttaaacaaatgttgcagctacattatttttcagttgacttagcctttggattttcattctctttattttcacattaactttgtaaagatgttgctttggtttggtggacagaacataacacggggaggtgctgggggcagggtcatacttttcagcagggcagctaggaggtcaggcctctctgagaaggtgacatttgaggaaaggcctggaaggatacaagcaggatgaagcccacaaggtgcttaaggaaggagacagtgagcagtgtcacaggccagcgagcaccgtgctgagaactagaagccttttccactggcacagggtcagcattgatatgtttgtagcatagattgatttgctgaggctgaaggattagcagtaaaggacctgggtccggtgcctattgaccaacaagtgaaacaacaagcactaaaacttagagaaatcgcagttagatttatttggagccaagtttgaggacttacttaagcctgagaacacagactcagtgtagactgagaatgggttccaaagtaagttatgtgaggcgcaatatatatacgtttcattccctttccttttctattttgttttgtttgagacagagtctctctctgtttcccaggctgagtgcaatggtgcgatcttggctcactgcaacctcttgcctcctggcttcaagcgattctcctgcctcagcctcctaagtagctgggactacgccaccacgcctggctattttttgtatttttagtagagacagggtttcatcatattggccaggctggtctcaaacccctggcctcaagtgatctagccaccttagcctcccaaagtgctggggttacatatatgagccactgtgcccagcctcttttttttttttttttttcttttcttttagagatatgaggtcttgctcttgctctgtcacccaggctggagtgcggtggtgcaatcatagcccactgcagcctctcaactcttgggctcaagtgattctcccacctcagcctcctgagtagctgagactataggcatgtaccactatgcccagggcatttccaatgttttttaaacatatggggtcttgctatgttgcccaggctggtcttgagctcctggcctcagtgatcctcccacaacagcctcccaaagtgctgggattacaggcatgagccaccttgctcggccttgtattttgtaacaggggaatacatgtggcacagcggtgggcgaagcaggcagtgaagcagcggtttcagtcctgtgattgtgattggtggtcacagaggctgtgcataagataaataaggtaaatatgcagctgagtgggtaggagaaaggttaggcatcttagagtctggtggagggtgactgattccatcccgtctttgttctgtatctggtaaacagatttatgaccaataaccatcagtgaaatatttaacaaactccagtaagataggcaagaggccagctttagtttataggcccctctttcctgacacatgtgtccaactgcagccattgtgggccagtgttccaattttcatttgaactttctttttttctgacatactcaagtgcttgttctgaggtcgatatggagacagggtggcaggaagcatcctttgtgaccggaacccaagttgtggcagtggcagtgatagaagtcaggccacagggctccctggccttagtcatgggcaagacgagaccaggccaccattctcttccctgccccagcccagttacattccaagcgctttagaatatttatcagtgatgccccagagtggactcaggaggatggcatgtgttagcatactgagcacagctctgtgggcctctgcatgtgtgggaaaagccttagcaaaaactgcaaatgagtgtttctcatctttctctttcagacagcccacctgaggatattgaccataaggactcatatctcattacaagaagcatcatggccgagccagactacatagaagatgacaatcctgaactcattaggcctcagaaactgatcaatcctgtaaaaacctcccggaaccatcaagatcttcacagagaacttcttatgaatcaaaaaaggtaaaatggtttcttgagcatattttttttttaagaggacttttaagatcatgatatctaattttaattgtatttacagaggcttcaaagagtctttgatttcttgcactttgttaaggctttcttattccttctcacatcctagaaccgggttacccctccgtgaggcagatcccctgcaggtggccatcactgtggtggccagcagtgcttccagactcctgcagtcacgggttcccttctgaaatggatgtgtatttccaaattcggatggaagaggctggattaaagatagaagagaatgtcctaagtagaagagaaatatgttcttaaatttaaaatctctgaattttctccttacactggggaaggtgtaggaatcatgtaattgccgcctactccggcatttgtcagtagtggggagaagtctctagaaccatattagacttaatagataggacactcatgtttttgtttgtttgggggtagcattttaaaagattattatcatagtctttattattaattattttggaggacaggaaagcatttaccttctatctactttgcaaactccatctgtgccataaatcattatggatgttgggttgctatactctgctttttaaataatttgggcaggacaggagactaggagaactgaggatgaaaggctatttttttcaatttaagaactaggaagcttcatttaggattattttcagatctcgtaggactatagatgactcatttgcccactctttgctaagccctggtgaaaggtctcccactgaactgaaagatacgcagatcaagtttagcattagggtaattttttgcagggaggcctagttaaacaaatgttttaaagaggatcaaggggcatttttatggcaattctctttcctgagtacactccagctagaaaaaatgactcctatctatcccaggaattatttgtaaatacgtttctccctctagagtgtgagaatgtggcttactcctgttttatccccagcatattagtaggaagctgttggattaatgtatattaaattgaatgcaaataagattttagcttccatctgcctttgtcacacaatagaagaaagaatatatgaatttggtattattatggccaaagcaaaatgagactatcaagttcctaaaatagaccacagaatttagaagccatcctatcctgcctgggaaatcatgtcttcattttggtggaaagctcgtcagtttagtaggctccgaaatagaatagcagttgtcactcaaagattttcagattatcttcacctctttggcctcagttcccttatctataaagtgtaaggtaggagacttagctgttctctaagaaacattttagctcaaattttttcttctaggaaaatctatgaaagggctccaagtcagaataaaggtcagagtaaaaccaacatttgcagaataagtgttctctaaattataggctatgaattattctgcaaaaatatatttagtagtttgggtcattgctgtaaaacctacagatttgtgcagttgagtctgtttccacattttttagagaaagggcttccattctgtctgtctttgtctggcctgttcttctccttgtttgcccagctcaactaacctgagacaatgctgggtttccctaaagtactatggtgtagagaggatgtgggctttgaggtcagagagaaatgatatgaatcttggttttaccagaacttaactttacctaccttatgatcttggccaaggtatcccctcttgagatctgtttcttcatctataaagtgggagataatagtatttttcttataaaaattaaagtaggctgggcaccgtggatcacgcctgtaatcccaccactttgagaagccaaggcaggtggatccactgaggtcaggagtttgagaccagcctggccaacctggcgaaaccctgtctctactaaaaatacaaaaattagccgggcttggtggcacatgcctgtaatcccaaccactcgggaggctgaggcaggagaattgcttgaacatgggaggtggaggttgcagtgagccgagattgtgccagtgcattccagcctgggtgacagagcaaaactctgtctctaaaaaaaaaaaaaaaaaaaaaaaaccaaaacttaaagtaaataatagcgtgtatgaaaatgcttaacataataagtgatcacttagtcacatctatcttccacttcctatgtgacaacaactggaatttcctattgctttttctcccttttctttgaaggattttggtctggttggaaatacattaaaaaaaaaaaaaagaaaaggcagatttcaaaatgaaatgaaaatatatctcatcttatctcttaagagttttcaaggtaataccaaacttgttagaaatacagtgattttaaagtgagaatttctcagtttctttccttttattcatcttttattttgtatactttttagagactggggtttttatttctaaattttagtgccaaactataggatacatcacatcaatactgtgtgtgtttggttaatgaataaccagtcttgattactgcatggtattgtaataaaaatccatttgcttttctgtagtttataacaagtcttcctacattttgtctcatctggtgctctttctaatagcccagtgtgtgttatcttcaggttaccctcactcaggtgagtaatctcaaggtgactggtttaaggaatcatctcaagattacataatagttttttgaaatagtgtttagaaataaaagcaagtttatgtggagacttatacctttgctacgcatagctacaaatttagctcaaagctctatggcagttcagtttttccagttacatttcagagattatgtgttacaggctgagaacaagaacttaagagaacaagtacccacaggtcttctaactgcgaaacctatgctctttctagtgtgtaatcctattcctctatttactgtctttggaacccagcttagtttcaggttaaaagtctttgaagcctctaggtctgacggttaaaaccttgtgtcaggttctcactttccacaggtgttttcagtagtataaaaaggcagatttcaaaaggcttttttttttttttggttaaaagattactattgaagggatctttaaaaaaacaattaagaagggctgggtgtggtggctcacgcctgtaatcccagcactttgggaggccgaggcgggtggatcacgaggtgaggagatcaagaccatcctagctaacacggtgaaaccccatctctactaaaaatataaaaaattagctgggcgtgttggtgggcacctgtagtcccagctactcaggaggctgaggcaggagaatagcgtgaacccgggaggcggagcttgcagtgagctgagatggcgccactacactccagcctgggtgacaaagcgagactccgtctcaaaaaaaaaaaaaaattaatatttctgatattatttagagagatagattctgtgctctacaaagattactttttagaataaataggtcagttacttaaacatatccctaaaattggttctttggcttgtatattttgaagtcagtggcttcttgttcctggtttttagctgacattcttttggcatgctttactagttgaatagttcctcaataaatacttgctgctgtacaacatggaaaaagataggggcagttctagagataaaggatacaagtatttgtgttccaatccatgcaggtaaaaatgactaaaccagaaatgtaaatgaggcaggccaaaccaaagattacaagattaaagaacaagggctgaaattcaggcccagcgcggcggctcacgcctgtaattccagcactctgggaggccgaggcaggcagatcacctgaggtcaggagtttgagagcagcctggccaacatggcgcaaccccatctctactaaaaatacaaaaaaattagctgggcgtggtggcacgcgcctgtagtcccagctacttgggaggctgaggcaggagaatagcttgaacccaggaagcggaggttgcagtgagccgaggtcatgccactgcactccagcatgggcaatagagcgagactctgtccccccggaaaaaaagaacaagggctaaattcaaatcaaattttccctgtaccctaagaaaaataattaggccgggagatgtttgactaagtgagtaggcattgttctgtgacggtctgagccccagacctttcctctggatgaatgctgtcccaggtaatgaaatgacttcacttattaatatataggtacacagagttcaggtagatgtggaatgaatggggactcgccccgtctgcccttgaatgtatttagtggtttatgtgaaatgtacctttcaaagttgtctgtatgtttcatactctgggggtgggaatataaatcattgcagcctttttgtagggcactttggcagtactcatcaaaatatgcgatgtgcagatgcttagccagcaactccgcttctatgaatctagccaacagaaatacttgtagaagtgtgcagctataaatgtccacagaggctcagagcctcattgtttttaatagtgaacagttggaaaccaaatagatgtctgtcagtagggatgtggcagaattgtggcatgtttatatgggtatagaaagtatggaggaacatagacccaactgttggtaagagttatctctggatgcaggaataggtaggggttgatgggtacagggtctctactttgcataattttggggccactgttcacatagaacatttgcgatggagtggtgctcctcgattcgtttaatggagagggtttggatgtgcttttgctttttatttaacacatgggtatattacttttctttttctgcaaagagcacttattaattttatagttttttaaattggctttgcccgcttcagtagtcacaggtagctacctgaccgagaagccgacttgggaattactgttactcgtgggtgatactgtcataaaggggttgaaagtacttgttagctgtatatgtcagaattgattaaagagaaccaactattcttgtgcaagggatggtattgtagttaattatgacatttggagaaactaatttctgtctgtcgacactatctctgttccatttagacttagagacttacatgggcaatgcttgactttttgcattcagcacagaaagttaagtaatccactgtggtaaaatattaactaaatttatatgacttcttgactgctgtaagtagagaatatttatcatataagcaccattttcctgaattttttgttactacatattttatcttactgtcactattgtgtaaaatctttgaaaggaaaatgaatactgtgtaatagttaaacccattcataggttgcaatagagtgtcagccaaatgtgtcatacatcaaatcttcagcagcttttgcataatccaggagaattgaataatagttgaagttaattttgccagtgaaatgtagggaaagaaaaatgtttgaaatttaaattattcagatagctaaattcttaatcctaaaatttaaaccccttaattctgtctgtagtgttatatcaagactttttgatagtcatgaaactgagtaaaactttattcagattacttaaaaacagcttttcctgtggttaataacacctttattttgaacagagtactcttaagcaacttatattgtgctgattaaagatttaatctgtgcatattttttaccctgttgtttatttagttttgataactgtgaaataaaccataattaaatcacaaaagtcacctgcctcttttgtttccctggaaatttggccaaattttttttaacggaaagttctgctaatgaaaattgggaaattggagacatatattattttgactgtgtgtcctctgtcattaaagatggactatactagctgggtgtggttgctgatgcctataatcccaccactttgggaggccaaggcaggtagacggcttgagctcaggagttcgagaccagcctggccaacatggtgaaaccccgtctctactaaaaatacaaaaaattatccggtcgtggttgcgggcacctgtaatcccagctcctcgggaggctgagggaggagaatcgcttgaacctgggaggaggaagttgcagtgagccgagattgtgccattgcactccatcctgggcaacaagaggaaaactgtatctcaaaaacgaaaaaaaaaaaaaaaatagagctgggcgtggtggcatgtgcctgtggtcccagctactcaggaggctgaggtgggaggatcgctggggcccaggaggcagaggtttcagtgagctgagatcatgccgctgcactccagcccgggcaacagagagagcctgtctcagaaaaaaaaaaaaaaaaagatggaatataccgatttttactctaaacaacaactttgaattaagtttttgtgatttttaaaaacatctagataggagagatgccagaatttttagaaattctagatgaatgaggaagtatgcaattgaggattggtttacagatgtgattgtgtggactttaaagggatcaaggtgagtgtgctgttgaatttctctggccggagcacatatattggaaattgttatttaacagttgctcagatgactcctagttggttagtcacggtagttgataggagtcgtttagagaacaaccctgtcccttgtctacagattagcagtcatcagcagccggaccaggaggtgtgtgggaggtgctcaggcccatcctggagtccgggacagagtcagcagtgcttgttgcctgcagttcagaaaagcctgaattactgttccaccacatgcctgcgtgcgtagcatgagtgtgtgtgcgctgttacctacaccctgtgctgcctgaaattgaaagcgcttttcctgttcggtggtttgtcctatttttattttaaattgtcctggtaaattttaacatcaagttgagattacttatgagttggcagagactggctaagataagtgactaaggaagacaataagaagaaaggtgagctggataatccagcattctggaaagccataggagaaatcctaaggaaatagaaaaggcaaatcttaagctaacagttaaacagacagatatagcactagagaaaatgctaagacatgtctttcccttgacttctctcgaatatttcagatggagggtggctagttcatggcctgtttggcttgtttctccccatttggagagatggtagcctaatttatctctcagaaatgtaggacttccctgaaggccgacttgctttcattgtaaataatcaactacacatctgaaagggtttcggtggaggagcacgggactgagaattaggggattaaggttctgcacggccatgtccttcagtaacggtataacctcagatgtgcctttagatgtacaggaaccccctttcagtctgaaaaatgaagggtgggaaggtttccagggccattttactgtctaagctggtcttgaggctgcatttagtgcataagatcaggggctagaggccaggtgtggtggctcacgcctgtaatcccagcactttgggaggccgaggcgagtggatcccgaggtcaggagtttcagaccaacctgaccaacatggtgaaaccccatctctactaaaaatacaaaaattagccgggcgtggtggtgcacgcctgtaatcccagctactccagaggctgaggcaggagaattgcttgaacctgggaggcggaggttgcattgagcctagattgcctgccactgcactccagcctgggtgacagagtgagactctgtctcagaaaaaaaaaaaaaaatcaggggctagattttgggaagcctcccctccatgcagagccccctcatttcctgaccatctccgtctctgtcatgggcacccatcacagtcatcgtacgcacatccccaccctcactgccctcctttgcgtagcctagtgtcttgcacatggcacgtggccaatacattgtcattgaatgaatggattttatgtactctttggagatctcctcttgcctttctttcgtgctggtgaatttcttagatcaccatgttgcctgctgtagcctagtaggtatcatactaattttgtagaccacttttccgtggttgatattgtaagttaaatttctgttcataaaaaatgtagccattagattaacgttttctatttttgttaatgctctttcgcaggggtcttgctcctcagaacaaaccagaattgcagaaggtgatggaaaaaagaaaacgagaccaagtaataaagcagaaggaagaagaagcacagaagaagaaatctgacttggaaatagagctattaaaacggcagcagaagttggagcaggtaagggggattggctggaagctgtctttttttgtttttgtcttgaagaatgttggagtgttggagcgggcaggatttaccagacgtgccagtgtatacatttataccatgaaagaaatattggagacaaatgtcagcaaatggggtcaaatatgttcaaggcagggacaagaatcctactgaggacctaaaagagatcccagaggcaaaagcaaaacagggacatggcactgaattcacacagggtgctggagtaatttaatgaaattcactttcatgaagactccagagcaactgcgcgttgactccaggatttgtttccttagccctgtcttttcaattcttgtcatctcgtggtcctatttgcagtgacagccaagtggcttctgtttctgtgcacaattacccagactctatccatccatttctttaaaagtgggggaccaggagagaatttattctgtggggaagtaaagttgtcagggactttgaaaagagagaagagtattttgaaaggctgcttggtttgtaaataatttttccttttctgaatgtcatttagcttgaacttgagaagcagaaattgcaagaagagcaagaaaatgcccccgagtttgtgaaggtgaaaggcaatctcaggagaacaggccaagaagtcgcccaagcccaggagtcctaggctgaggctgcaccaagacctcgtgtgtcaccccacagagctgtctgtgggtgccttctcaatctcagggcaaaagcccctggagaatattccagccagcagagaattttgacttgcagtaggatttggtttgattttcctacgatctgggtggatgccttgcctgtgacagttgcagttcctattcgccaaatgaagggcagtgccctgcacgtaagttggaatgatggacctgtgttcagagacttaacagaaccaacaagcaaaacaagtgagaacaggaaaaaggaagaggacactggaatcaattcttgagagttgcactacttggtttttcttccattccaagtttcgtgggacccagagccttttttcttttaaaagctaaaaaacaaatgtttaattcctctttttgttatctgttagataattgagatcacctagaaatgcgtttaatctgttcactcactgtaaattttgaggacccagaattgtcttgtttaatttatactttcacccctgttgcagttaacaccagagaaggaacgtgaatgtcgagcacagccactacccttgttggcacttaatttagaaatagggtgagaagtttaaaagcccatcttgattttattttcattccttttggttctctgtgtaataatagcaggctacatagtgacattccagttccaagaaggtacatcctgtccattcattaattgctttgattactaggagggtttctgttcagttttgtttttaaatgtcttgctgatctagttctttcagatggaataaccttccagtcccttagagagtggaactagtccatataacccagcttcagtagcaaaagtagaagccgccacatcttttcatttctccaagaggagagtggggaaggttcccatgaccagctgggcagtcaggatttctctaggcattctaatgtgaaataagtgtagactgctgtcaaggaggcttcatcagaagatgtatagcatttgaatgtctaatgataatgcatatcattagaatccaagctttgaaaatttctgattaatgctcatgtatttctttatctttgtttttccttgtgaagaaagactttcaccactgtctgagtgatgatgctgttgataaggatgatgtcgatgactactatattgcatctctcaggaacagctgatgggaagggaggggctgctgagttcccttgttctagctagcagcacgctcctcagagagggggccgagttacagacagcagccgcattctcatgcaaaattagttttaaactgctagtgtgggcatcggtaccttttgcctgggtgataccgaagaattgttgaggatttagtatgctccgtagagacagttcagccagtcatttctgcattggagagacttctcatactttctttgaagactcatagaaagctggatctagagcttttgaatccttaattagcacagtagaaattagctttctatgggaatgctttagtgttagcagttgacaattaggcccatattcaatctgaatgggaacaaaagtaaatgcaatgataatatactgctagttagagaaacatgttagttgattatacctgaaatggattatttatctcatcagcaagtattatttgaataaaatgagaaatgcttaagaaaaattgttgctctacagtaatttggtttcgaagaatggaatggtaactattttttcccatcgttcttttgagagaaggaagtgtgatgactgatgatcttgaaaagcccatttctgattgcacgttgactggaattctttctttgtgtctgtggactagcgatgctgtttgtaaaatgaagattcgggactggctcatatctttttatctaactagatgtcagatcttgaaatctgtattctcgaagcaattctgccacttgatcgtattcacaggggccctggtaggctcctttagaaggaccatttctgttcctagagcttaactagaattcattcttcactgaaaaaaaaaaaagttacttaagaaagcatttctttcctaatctcactcaaatctgcagaattatttgtaattagtaatacaaaatctggccaaaaggagacttgtaaatagcgtaaagtggtgtcttatgctaaacggtggaatgtataggcagagaagctctttgaagttgtcagatgagctgggctcacaagcctgattcaaacaggctgtcggtctcctctcaccccttaatactgtgcagcccaaactcctaggactcttgaacatctgagcagttttgtgctttgagccactttttgacaaaaatggctccatttttccacagcgtggttttcttaaaatagtttaatgttttatagtctcatagtagtagtgttgctttctaagctataacagtcgactttattcttctactctgaaaaatcttgacttgtttgagtgtatataatatatataaagggagccttaatggattggttttcataatttaatattttttgtatttgctcttgtataattgtttttaacggaaagtattaaagaattgagggtggaattcttagaaccaaagttattcttaataaaaatcaccacatgcttggaccatgcaaccatgtttgtctgatctgttgaaggtgtgcatctggaacagaacggggctgggttcatttcaaaggtgagagttggttccagggtctcccttttgatgactggtcctcattgacaaccttgcccccaaatcacttatgtcctattgccttgtggcagtcaagctgacagtttgtcatatcaaacagagtcatctcaggtatttatggcactgtaaattacacattgcagtaggccatatggcccttcagcagcagccatcagtcagtcctcagctcaaagtattctgcattttagatagcttggtaggacagtgggagacatgttttgggaagggccattgttcagtgcgtttgaccccagtacatacggcatgtctgaagtgtgattatgaggttttttttgcttattcaagtaaattaatgttattcctcaaagaagttactttggaaaggtatacgcctgattgcattatactactggtatactttggaggttcaagtctctttataattatgcctttatttttcaactacaaattattactcagtttgatcacccaacttctagtgtctttggacttttttaaaatattatatctactcaggagagtaaaaatttactatctctaaggttataccatgaactctaaagccagtgcagaagatagattccaaaaatcatttgaggagtagctgcatccttggaataactaggcagtttgtcccggtgactgtgttgaggctgtcaatccatttaattcgaccacttccccaatctctctctctttctctctctctctctctctgtgtgtgtgtgtgtgtgtgtgtgtgtgtgtgtgtgtgttttacagtagtggtaatagatttgaaagaagacagggcaattaaagtgtttagtaagatttaaaatactgtaggacagctaaaagaagttttaaaataatactacccggcatacatttcctagtataataagagatgaagtattttacttccagggtcttcggataaataaaatctttatgagctagcctaacaatcacagtttctacttcgttttgtctcatgagaaaacatagtctgattatcaattggggatcctttgaatatcttcccacttgctcctagattttctagcaagatgataattagcacttgccgtggcacaaagggcactcgctcactcatttattgaaagtgtatccattgctactgcagtcctgctattcctagaaaccctcaaactatatatgtgcatgtgtgtctaagtgtaaatatgtatgcacacatttgtattgatgtttatttttatatctatatagaatatcatgaggtcgggccaggtatggtggctcacgcctgtaatcccagcactttgggaggccaaggcgggtggattgcttgagatcaggagttcaagaccaatctgaccaacatggcaagaccccgtctctactaaaaatacaaaaattagccaggcgtgatggcacgtgcctgtaatcccagcaactcgggaggctgaggcaggagagaatcacttgaacctgggaggcggaggttacagtgagccaagatcacaccactgcactccagcttgggtgacggagcgagactccgtctcaaaaaaaaaaaaaaaaagaatatcatgaggtcacgttgatacctccaatcccaacctagtggcatgttcttttccccctttccgaatttgtcactccctcctcctacagtgacaaccctggcttccactgtctccactcatttattttctcaatcccctgaccttcttcagccgctttcacctcccaggcactgcctagtggctttgtgactgaattaggaaggaagggagaaagaaaacaaacggcaatttttcttgagcgtttaaacatgtattgctaattaaattaattaaatcgcctcaaacagcctaaagtgcggctatagattgagtatacctgattgtttgaaaccttgtaaactccttaaacattatgtaaactatacttgaacacaatggttagcacattttaaaaataacttacccatttaaaaaatcaaaatcaagttttatgtccattattactgtttttgaaatagagtctctctgttaccaaggctggagtgcaatggtgtgatcacagctcactgcagccttgactgcctgggtcaagtgctcctctcgcctcagccatctaagtagctggaacaacagttacacaccaccatgcctgctaattatttttttgtagagacaaggtctcactatgttgcccagactggtctggaactcctggcctcaagggatcctcctaccttggcctcccaaagtgctgggattacaggcatgagccaccatgcctggccatttttccattagttttatacttttaaaaacactttcctactactatgaccatgtttattttattttatttttttattattatactttaagttttagggtacatgtgcacaatgtgcaggttggttacatatgtatacatgtgccatgctggtgtgctgcacccactaactggtcatctagcattaggtatatctcccaatgctatccctcccccctccccccaccccaaaacagcccccagagtgtgatgttccccttcctgtgtccatgtgttctcattgttcaattcccacctatgagtgagaatatgcggtgtttggtttttttgtccttgctatagtttactgagaatgatgatactccagtttcatccatgtccctacaaaggacatgaactcatcattttttatggctgcatagtattccatggtgtatatgtgccacattttcttaatccagtctatcattgttggacatttgggttggttccaagtctttgctattgtgaataatgccgcagtaaacatacgtgtgcgtgtgtctttatagcagcatgatttatagtcctttgggtatatacccagtaatgggaaggctgggtcaaatggtatttctagttctagatccctgaggaatccccacactgacttccacaatggttgaactagtttacagtcccaccaacagtgtaaaagtgttcctatttctccacatcctctccagcacctgttgtttcctgactttttaatgattgccattctaactggtgtgagatgctatctcattgtggttttgatttgcatttctctgatggccagtgatggtgagcattttttcatgtgttttttggctgcataaatgtcttcttttgagaagtgtctgttcatgtccttcgcccactttttgatggggttgtttgtttttttcttgtaaatttgtttgagttcattgtagattctggatattagccctttgtcagatgagtaggttgtgaaaattttctcccattctgtaggttgcctgttcactctgatggtagtttcttttgctgtgcagaagctctttagtttaattagatcccatttgtcaattttggcttttgttgccattgcttttggtgttttagacatgaagtccttgcccatgcctatgtcctgaatggtattgcctaggtttccttctagggtttttatggttttaggtctaacgtttaagtctttaatccatcttgaattgatttttgtataaggagtaaggaaggggtccagttttagctttctacatatggctagccagttttcccagcaccatttattaaatagggaatcctttccccatttcttgtttatgtcaggtttgtcaaagatcagatagttgtagatatgcggcgttatttctgagggctctgttctgttccattgatctatctatatgtctgttttggtacaagtaccatgctgttttggttactgtagccttgtagtatagtttgaagtcaggtagtgtgatgcctccagctttgttcttttggcttaggattgacttggtgatgcgggctcttttttggttccatatgaactttaaagtagttttttccagttctgtgaagaaagtcattggtagcttgatggggatggcattgaatctataaattaccttgggcagtatggccattttcatgatattgattcttcctacccatgagcatggaatgttctttcatttgtttgtatcctcttttatttccttgagcagtggtttgtagttctccttgaagaggtccttcacatcccttgtaagttggattcctaggtattttattctctttgaagcaattgtgaatgggagttcactcatgatttggctctctgtttgtctgttgttggtgtataagaatgcttgtgatttttgtacattgatttttgtatcctgagactttgctgaagttgcttatcagcttaaggagattttgggctgagacaatggggttttctatatatataatcatgtcgtctgcaaacagggacaatttgacttccagttttcctaatcgaataccctttatttccttctcctgcctaattgccctggccagaacttccaacactgtgttgaataggagtggtgagagagggcatcccaatcaatagaaaaagagggaatcctccctaactcattttatgaggccagcatcatcctgataccaaagctgggcagagacacaaccaaaaaagagaattttagaccaatatccttgatgaacattgatgcaaaaatcctcaataaaatactggcaaaccgaatccagcagcacatcaaaaagcttatccaccatgatgaagtgggcttcatccctgggatgcaaggctggttcaatatacgcaaatcaataaatgtaatccagcatataaacagaaccaaagacaaaaaccacatgattatcgcaatagatgcagaaaaggcctttgacaaaattcaacaacccttcatgctaaaaactctcaataaattaggtattgatgggacgtatttcaaaataataagagctatctgtgacaaacccacagccaatatcatactgaatgggcaaaaactggaagcattccctttgaaaactggcatatttatttttatattctcctacatattctgttatactgtcctttctgggcttgcagtaattttaccaagactaaaaggaaagaaatcccccctcaggctaactgaaggagcaagatctgggttcttgactgattcttaggatggagggcctggcagcacagtccacgctgctgcagtcatgggccatgggccctggacaaagtccttcgttaaaattaattcttccttgctttgtcatggaatttttaatatcttgccatttcttctttcatttaggaaacttggtgtccttcccagaagtggatgctttcattttgcatagtcagcctgacctactcattgtcttgcctttttatgatctgttgatcttgtccgttagtgtaatcgaaaacttacatatgcctgtgaatatctcatgtaactaggatcattttgagattttgtctagtagaaccatcaagtctgtgtggtgaacgcttgtccctgagatatttggctatttattatctttggacataactgctggatcctcttttatttgtgatcacatatgatcaagtagactcctttatttgtatttattatatgtgaccactgatgacgattttattttgtttttttgagacagagtctcagaattctgttatccaggctggagtgcagtgacgcgatcttggctcactgcagccttgacctcccaggctcaagcaatccttccacctcagcctcccaaataactgggactacaggcatgcaccaccatgtctggctcattttttttttatttttttttgtagagacagggtctcactatgttacagctcaggctggtcttgaactcctggcctcaagtgatcctccttcctcagcctcccaaaatgctgggatgacaggtatgtgcaactgcgcctggcttcttttgtctgtttgtactatgtttttctagtttatcttatgattttgtttattcctataaggatagctagaaacaaacacatgtctatggtttatgaaaatgtatattcttcatacaacatataaaatgtccacacatatatgaatagtcccttagctatatcctataatcatcttaattttgtattacaactcctttttctcttggagtctctatgaatgtgtgtccctttatagactcaccttataattttcatctccttttttggatgctcagaatattacagcttgactggtggaagtccttcaagcttattcttttgtttttgtggggttttggtttttttaaaagtaaaatattgcttttgacagttatggcagcatccttactttgttacaacaataggatgtttggggccatcctaatttttttttttttttttttttctgacgcaagacataggactgtgtgcctttcaagaagtcctggtttcttttttgatgaagagtagaaacagagatgatctggcactagaggtgcacaagagagttgctagtggacaaaagtgtccttgcacctgtagtaatgacagagctaaagaatgtgaactcatccttgtttttccatttcaaccctttatgtggttctaccttatttttcttatgagatcttattaaaccagaaatatttccattacacttagaaagattagttgcgatattttctttacagataagagttatgaaagggaatttaccagaccagataccgaaacacaccttcaagcaacagtaatttaactggcccaatattgtctcagagaagacaaattgttcaatggagtggcataaaaagtccagaaaatgactgacttgcgtgtcaaaatttacaatgattgaggtgggattttatttcagatcagttaggaaaggataaacaattcagtgaaaagttttggggcaactggaacgaaacaaatatatattcctctacataagaatcatttccaagtttattagtgttcagcataaaaataaaactgtagaattattagaagaaattataagggaatatttctataatcctagtgttggaggaggctttcctaagcataacatttagcccaaaatctataatgaagaaaactgacagatttaactagtgaaaattaaatgcttttgtacaagaaagatgtaagaaaggttaagtgtcacagactaaggcatattacatatacagcaatacctggattacatacagaatgtctgtaaatgttaatccagtaaaaatatatatatatatgaacaggtaattcacagaagatggaatacaaattgtcgatcaacatatgaagagatgctcactcactactatcaggaaaatgcaaactaaaccaacaacgaagtaactttatacaaatattcacaaggcaaatatttaaaagactgataatagctatggttggtgaggatgtagagaagcatgtattatatatacaacatcaggggaagtgcaaattagtaaagccaatttaaaaacatattttcacatgctctagaatggatataacaaaaacgatatacaaatacaagtgttgactaggatgtggaaaacttgaatcccttgttttattgctggtgaaaatgtaatggcataggtactttggaaaagtttgacagtttcttaaggagttaaacagatttatcatatgacccagcaattccgctcctaagtatttacccaagagaaatgaaaacatacaaccacacacagagtcttgcgcacaaatgtttatagcaagattattcataataaagtgtggaagaaccccaaaggtccaagaattgataaatggacaagcaaatgtggtatggccacacagtagaatattcttcagccataaaaaggaacaaagtaccaataaatgctacaacatggataaactgtgaaacaataaaacttaaaaaagtgcacatatcttttgacacgccaattgcatttctaggaatgtgaccttaagaaatacttatgtgcatagagattgttcttcaaagacatgtgtggccaggtgtggtggtgtgcacctgtagtcatagctactctgaaggccagggtgggaggatcacttgagcccaggagttccagacaagcctgggcatcatagagcaaacatttgttgggcaaacattttttgtctctaaaaaagaaaaaaagaaatatttacagcatttatcataatttatcttgcaagcaccctgcttatctagtagtagtttgctagattaagtctagtacattcccattctctttatggactataatgcagcttttaaaagaacaaaatatattattatacatatacataaataaggctttgaagctataccccatgaatatgtacaactattttgtatccaaaataattaaaaataaaaaaattataaactaaaattcctgaaaataagtattgacccaaatagcctataaactgaaagagaaaatgatatttctcttagaacacactttcatttttctccctgaagaaacctgaaaacatttatggacagacctttttgtttttctgtttggattgacctgaaataaaatttttattatcaacaacaaaaagcaagctgtggaacaatagacatatgatctcatttatatgaaaaaaattttaagtattcatatccatacatctatacaaatgcttgcaaataggactggaagtttacccaacatattaacagtggctacttctaggggagggaaggaatttaaggccagaaatagagtggcttctgtatgtaatctgcatatttgtgatcttttttttttcccaagacagggtctcactgtcgcccaggcaatgagttgatcacagcccgctgcagcctcaacctcccaggctcaggtgattctcctacctcagcttcccgtgtagctggcactacaggcactcgccaccacacctggctaatttttctattttttgtggagacggtctctgactatcttgcccaggctggtctcaaactcctgggctcaagcaattcaccctcctcagcctcccaaagtgctgggattacaggtgtaagccaccgcgcctgaccaatatcagtatgtatttaaaattgtatacaatcagaatgagtccctgaatcacgagtgtttaaaacggcataaaagcaaagcttagaaactaagtctgcttaatacaaaactatcccttaaattctaaacactgttaatttcataattattgacgtgtacagtgaacaccccatgaaagaatacaagagcggtttcaatgttccccaaacatgcagacctatagttgaaatcatcgaagggaaaaaagatctagcgaaaaaatagaagctctgactccagagcggcactgagaaatgtttcgagcttttgccaaccccgtaagggtggaacaaagacctgagctggggctcctcgtaagtgacccgaggggtgtaggtttcgccatgaaaacagcattgccctttagagttttccgctgctcctgggactccagtgactgcggttacagccctctggttttcctcctattgttttcattggccggggtctaagcgacttggaagtgaggaatcgggagctctgtaatgaaatactgctactcggtgcgcgcagggccctgggagagctccagcttggccagtcaaggtcttcttggcagatgttctttcttggatgacgatggaattctctttcccttctcccttgataccaggtggggccttcatcgtattactaagagtcgatttattactctttccgctccttctggttgaatacttgagatagacgcttaggaaaggagctagccaagccctggagaaatgctgactctttggatttaatttatgaggcctaatagaagccgtcacagaggctggctaagggtagaattagcagcagagagtagaggctgcagccttccctgctgtgacttcatggttgaagcttgaggtgcaatctcatggggacctccttggttggttgtccgtggttatttactcatttaagaggttccaggaaataatggcacctgtgttagccagg

SEQ ID NO: 681 - DNA, 2785 bp, Homo sapiens
ttctttgtggggatggttaattcttgttttgggtgcttttcttcaccgctctaaggaactaccacagtcagaaggtgcattcttactgcgatctttttatttgctaccttgggcttaaggagcctgcctatatctactgaggtgaggttaggtcagtctctgtaaccgttcgtcacttaggccttgatgggtgacatggatggggatgacttcctgggctaactcttctcttgctaaaggatgatttttcaccaccttgaatgcccatgattaaaacataaacaagaaaatagatatctgagacagcccacctgaggatattgaccataaggactcatatctcattacaagaagcatcatggccgagccagactacatagaagatgacaatcctgaactcattaggcctcagaaactgatcaatcctgtaaaaacctcccggaaccatcaagatcttcacagagaacttcttatgaatcaaaaaaggggtcttgctcctcagaacaaaccagaattgcagaaggtgatggaaaaaagaaaacgagaccaagtaataaagcagaaggaagaagaagcacagaagaagaaatctgacttggaaatagagctattaaaacggcagcagaagttggagcagcttgaacttgagaagcagaaattgcaagaagagcaagaaaatgcccccgagtttgtgaaggtgaaaggcaatctcaggagaacaggccaagaagtcgcccaagcccaggagtcctaggctgaggctgcaccaagacctcgtgtgtcaccccacagagctgtctgtgggtgccttctcaatctcagggcaaaagcccctggagaatattccagccagcagagaattttgacttgcagtaggatttggtttgattttcctacgatctgggtggatgccttgcctgtgacagttgcagttcctattcgccaaatgaagggcagtgccctgcacgtaagttggaatgatggacctgtgttcagagacttaacagaaccaacaagcaaaacaagtgagaacaggaaaaaggaagaggacactggaatcaattcttgagagttgcactacttggtttttcttccattccaagtttcgtgggacccagagccttttttcttttaaaagctaaaaaacaaatgtttaattcctctttttgttatctgttagataattgagatcacctagaaatgcgtttaatctgttcactcactgtaaattttgaggacccagaattgtcttgtttaatttatactttcacccctgttgcagttaacaccagagaaggaacgtgaatgtcgagcacagccactacccttgttggcacttaatttagaaatagggtgagaagtttaaaagcccatcttgattttattttcattccttttggttctctgtgtaataatagcaggctacatagtgacattccagttccaagaaggtacatcctgtccattcattaattgctttgattactaggagggtttctgttcagttttgtttttaaatgtcttgctgatctagttctttcagatggaataaccttccagtcccttagagagtggaactagtccatataacccagcttcagtagcaaaagtagaagccgccacatcttttcatttctccaagaggagagtggggaaggttcccatgaccagctgggcagtcaggatttctctaggcattctaatgtgaaataagtgtagactgctgtcaaggaggcttcatcagaagatgtatagcatttgaatgtctaatgataatgcatatcattagaatccaagctttgaaaatttctgattaatgctcatgtatttctttatctttgtttttccttgtgaagaaagactttcaccactgtctgagtgatgatgctgttgataaggatgatgtcgatgactactatattgcatctctcaggaacagctgatgggaagggaggggctgctgagttcccttgttctagctagcagcacgctcctcagagagggggccgagttacagacagcagccgcattctcatgcaaaattagttttaaactgctagtgtgggcatcggtaccttttgcctgggtgataccgaagaattgttgaggatttagtatgctccgtagagacagttcagccagtcatttctgcattggagagacttctcatactttctttgaagactcatagaaagctggatctagagcttttgaatccttaattagcacagtagaaattagctttctatgggaatgctttagtgttagcagttgacaattaggcccatattcaatctgaatgggaacaaaagtaaatgcaatgataatatactgctagttagagaaacatgttagttgattatacctgaaatggattatttatctcatcagcaagtattatttgaataaaatgagaaatgcttaagaaaaattgttgctctacagtaatttggtttcgaagaatggaatggtaactattttttcccatcgttcttttgagagaaggaagtgtgatgactgatgatcttgaaaagcccatttctgattgcacgttgactggaattctttctttgtgtctgtggactagcgatgctgtttgtaaaatgaagattcgggactggctcatatctttttatctaactagatgtcagatcttgaaatctgtattctcgaagcaattctgccacttgatcgtattcacaggggccctggtaggctcctttagaaggaccatttctgttcctagagcttaactagaattcattcttcactgaaaaaaaaaaaa

SEQ ID NO: 682 - protein, 131 aa, Homo sapiens
MAEPDYIEDDNPELIRPQKLINPVKTSRNHQDLHRELLMNQKRGLAPQNKPELQKVMEKRKRDQVIKQKEEEAQKKKSDLEIELLKRQQKLEQLELEKQKLQEEQENAPEFVKVKGNLRRTGQEVAQAQES

SEQ ID NO: 683 - DNA, 2762 bp, Homo sapiens
gatctttttatttgctaccttgggcttaaggagcctgcctatatctactgaggtgaggttaggtcagtctctgtaaccgttcgtcacttaggccttgatgggtgacatggatggggatgacttcctgggctaactcttctcttgctaaaggatgatttttcaccaccttgaatgcccatgattaaaacataaacaagaaaatagatatctgaggagaatgcagttgaaactaattttgtggatagagaaactgttggaactgctttacaaagtattttaacagcccacctgaggatattgaccataaggactcatatctcattacaagaagcatcatggccgagccagactacatagaagatgacaatcctgaactcattaggcctcagaaactgatcaatcctgtaaaaacctcccggaaccatcaagatcttcacagagaacttcttatgaatcaaaaaaggggtcttgctcctcagaacaaaccagaattgcagaaggtgatggaaaaaagaaaacgagaccaagtaataaagcagaaggaagaagaagcacagaagaagaaatctgacttggaaatagagctattaaaacggcagcagaagttggagcagcttgaacttgagaagcagaaattgcaagaagagcaagaaaatgcccccgagtttgtgaaggtgaaaggcaatctcaggagaacaggccaagaagtcgcccaagcccaggagtcctaggctgaggctgcaccaagacctcgtgtgtcaccccacagagctgtctgtgggtgccttctcaatctcagggcaaaagcccctggagaatattccagccagcagagaattttgacttgcagtaggatttggtttgattttcctacgatctgggtggatgccttgcctgtgacagttgcagttcctattcgccaaatgaagggcagtgccctgcacgtaagttggaatgatggacctgtgttcagagacttaacagaaccaacaagcaaaacaagtgagaacaggaaaaaggaagaggacactggaatcaattcttgagagttgcactacttggtttttcttccattccaagtttcgtgggacccagagccttttttcttttaaaagctaaaaaacaaatgtttaattcctctttttgttatctgttagataattgagatcacctagaaatgcgtttaatctgttcactcactgtaaattttgaggacccagaattgtcttgtttaatttatactttcacccctgttgcagttaacaccagagaaggaacgtgaatgtcgagcacagccactacccttgttggcacttaatttagaaatagggtgagaagtttaaaagcccatcttgattttattttcattccttttggttctctgtgtaataatagcaggctacatagtgacattccagttccaagaaggtacatcctgtccattcattaattgctttgattactaggagggtttctgttcagttttgtttttaaatgtcttgctgatctagttctttcagatggaataaccttccagtcccttagagagtggaactagtccatataacccagcttcagtagcaaaagtagaagccgccacatcttttcatttctccaagaggagagtggggaaggttcccatgaccagctgggcagtcaggatttctctaggcattctaatgtgaaataagtgtagactgctgtcaaggaggcttcatcagaagatgtatagcatttgaatgtctaatgataatgcatatcattagaatccaagctttgaaaatttctgattaatgctcatgtatttctttatctttgtttttccttgtgaagaaagactttcaccactgtctgagtgatgatgctgttgataaggatgatgtcgatgactactatattgcatctctcaggaacagctgatgggaagggaggggctgctgagttcccttgttctagctagcagcacgctcctcagagagggggccgagttacagacagcagccgcattctcatgcaaaattagttttaaactgctagtgtgggcatcggtaccttttgcctgggtgataccgaagaattgttgaggatttagtatgctccgtagagacagttcagccagtcatttctgcattggagagacttctcatactttctttgaagactcatagaaagctggatctagagcttttgaatccttaattagcacagtagaaattagctttctatgggaatgctttagtgttagcagttgacaattaggcccatattcaatctgaatgggaacaaaagtaaatgcaatgataatatactgctagttagagaaacatgttagttgattatacctgaaatggattatttatctcatcagcaagtattatttgaataaaatgagaaatgcttaagaaaaattgttgctctacagtaatttggtttcgaagaatggaatggtaactattttttcccatcgttcttttgagagaaggaagtgtgatgactgatgatcttgaaaagcccatttctgattgcacgttgactggaattctttctttgtgtctgtggactagcgatgctgtttgtaaaatgaagattcgggactggctcatatctttttatctaactagatgtcagatcttgaaatctgtattctcgaagcaattctgccacttgatcgtattcacaggggccctggtaggctcctttagaaggaccatttctgttcctagagcttaactagaattcattcttcactgaaaaaaaaaaaa

SEQ ID NO: 684 - protein, 131 aa, Homo sapiens; identical to SEQ ID NO: 682

SEQ ID NO: 685 - DNA, 2875 bp, Homo sapiens
tcaaacgaagctccaataggaaatgtcacaatctcctaccccaggggactggagatccccttccttgggtggttaaaaatggacttgatttgcgcttctgagaaactgacatgtgaaatcttgttcctgatgtgggaggatggacgccgtcattcattcattcattcatcgaatctttcctttgactgttaattgtttaaaatctcacaagtaaaggtggaaaagagttttactgattttctttgggaatggtggaggggtagaagacttctctcctgatggaaagaggaaagatgaggaatatggcttaatgttattcctaacttaccttctgccccttccctccagaattctgtgtgcaagtgttttaaggaaatgagttgggagtttggacagcccacctgaggatattgaccataaggactcatatctcattacaagaagcatcatggccgagccagactacatagaagatgacaatcctgaactcattaggcctcagaaactgatcaatcctgtaaaaacctcccggaaccatcaagatcttcacagagaacttcttatgaatcaaaaaaggggtcttgctcctcagaacaaaccagaattgcagaaggtgatggaaaaaagaaaacgagaccaagtaataaagcagaaggaagaagaagcacagaagaagaaatctgacttggaaatagagctattaaaacggcagcagaagttggagcagcttgaacttgagaagcagaaattgcaagaagagcaagaaaatgcccccgagtttgtgaaggtgaaaggcaatctcaggagaacaggccaagaagtcgcccaagcccaggagtcctaggctgaggctgcaccaagacctcgtgtgtcaccccacagagctgtctgtgggtgccttctcaatctcagggcaaaagcccctggagaatattccagccagcagagaattttgacttgcagtaggatttggtttgattttcctacgatctgggtggatgccttgcctgtgacagttgcagttcctattcgccaaatgaagggcagtgccctgcacgtaagttggaatgatggacctgtgttcagagacttaacagaaccaacaagcaaaacaagtgagaacaggaaaaaggaagaggacactggaatcaattcttgagagttgcactacttggtttttcttccattccaagtttcgtgggacccagagccttttttcttttaaaagctaaaaaacaaatgtttaattcctctttttgttatctgttagataattgagatcacctagaaatgcgtttaatctgttcactcactgtaaattttgaggacccagaattgtcttgtttaatttatactttcacccctgttgcagttaacaccagagaaggaacgtgaatgtcgagcacagccactacccttgttggcacttaatttagaaatagggtgagaagtttaaaagcccatcttgattttattttcattccttttggttctctgtgtaataatagcaggctacatagtgacattccagttccaagaaggtacatcctgtccattcattaattgctttgattactaggagggtttctgttcagttttgtttttaaatgtcttgctgatctagttctttcagatggaataaccttccagtcccttagagagtggaactagtccatataacccagcttcagtagcaaaagtagaagccgccacatcttttcatttctccaagaggagagtggggaaggttcccatgaccagctgggcagtcaggatttctctaggcattctaatgtgaaataagtgtagactgctgtcaaggaggcttcatcagaagatgtatagcatttgaatgtctaatgataatgcatatcattagaatccaagctttgaaaatttctgattaatgctcatgtatttctttatctttgtttttccttgtgaagaaagactttcaccactgtctgagtgatgatgctgttgataaggatgatgtcgatgactactatattgcatctctcaggaacagctgatgggaagggaggggctgctgagttcccttgttctagctagcagcacgctcctcagagagggggccgagttacagacagcagccgcattctcatgcaaaattagttttaaactgctagtgtgggcatcggtaccttttgcctgggtgataccgaagaattgttgaggatttagtatgctccgtagagacagttcagccagtcatttctgcattggagagacttctcatactttctttgaagactcatagaaagctggatctagagcttttgaatccttaattagcacagtagaaattagctttctatgggaatgctttagtgttagcagttgacaattaggcccatattcaatctgaatgggaacaaaagtaaatgcaatgataatatactgctagttagagaaacatgttagttgattatacctgaaatggattatttatctcatcagcaagtattatttgaataaaatgagaaatgcttaagaaaaattgttgctctacagtaatttggtttcgaagaatggaatggtaactattttttcccatcgttcttttgagagaaggaagtgtgatgactgatgatcttgaaaagcccatttctgattgcacgttgactggaattctttctttgtgtctgtggactagcgatgctgtttgtaaaatgaagattcgggactggctcatatctttttatctaactagatgtcagatcttgaaatctgtattctcgaagcaattctgccacttgatcgtattcacaggggccctggtaggctcctttagaaggaccatttctgttcctagagcttaactagaattcattcttcactgaaaaaaaaaaaa

SEQ ID NO: 686 - protein, 131 aa, Homo sapiens; identical to SEQ ID NO: 682

SEQ ID NO: 687 - DNA, 3278 bp, Homo sapiens
gagagccctcctcaggggctgtctctgccttcccttcttcccatgtgtatctggggcagctgaggcagggctaggagaagagcccgggttcctcctgccacctccaagcgatgaagcagccctgggccaactccagcattctcgtgtgaactgcagaggagccctgcgcttccagctacttgcagccagacagcccacctgaggatattgaccataaggactcatatctcattacaagaagcatcatggccgagccagactacatagaagatgacaatcctgaactcattaggcctcagaaactgatcaatcctgtaaaaacctcccggaaccatcaagatcttcacagagaacttcttatgaatcaaaaaaggggtcttgctcctcagaacaaaccagaattgcagaaggtgatggaaaaaagaaaacgagaccaagtaataaagcagaaggaagaagaagcacagaagaagaaatctgacttggaaatagagctattaaaacggcagcagaagttggagcagcttgaacttgagaagcagaaattgcaagaagagcaagaaaatgcccccgagtttgtgaaggtgaaaggcaatctcaggagaacaggccaagaagtcgcccaagcccaggagtcctaggctgaggctgcaccaagacctcgtgtgtcaccccacagagctgtctgtgggtgccttctcaatctcagggcaaaagcccctggagaatattccagccagcagagaattttgacttgcagtaggatttggtttgattttcctacgatctgggtggatgccttgcctgtgacagttgcagttcctattcgccaaatgaagggcagtgccctgcacgtaagttggaatgatggacctgtgttcagagacttaacagaaccaacaagcaaaacaagtgagaacaggaaaaaggaagaggacactggaatcaattcttgagagttgcactacttggtttttcttccattccaagtttcgtgggacccagagccttttttcttttaaaagctaaaaaacaaatgtttaattcctctttttgttatctgttagataattgagatcacctagaaatgcgtttaatctgttcactcactgtaaattttgaggacccagaattgtcttgtttaatttatactttcacccctgttgcagttaacaccagagaaggaacgtgaatgtcgagcacagccactacccttgttggcacttaatttagaaatagggtgagaagtttaaaagcccatcttgattttattttcattccttttggttctctgtgtaataatagcaggctacatagtgacattccagttccaagaaggtacatcctgtccattcattaattgctttgattactaggagggtttctgttcagttttgtttttaaatgtcttgctgatctagttctttcagatggaataaccttccagtcccttagagagtggaactagtccatataacccagcttcagtagcaaaagtagaagccgccacatcttttcatttctccaagaggagagtggggaaggttcccatgaccagctgggcagtcaggatttctctaggcattctaatgtgaaataagtgtagactgctgtcaaggaggcttcatcagaagatgtatagcatttgaatgtctaatgataatgcatatcattagaatccaagctttgaaaatttctgattaatgctcatgtatttctttatctttgtttttccttgtgaagaaagactttcaccactgtctgagtgatgatgctgttgataaggatgatgtcgatgactactatattgcatctctcaggaacagctgatgggaagggaggggctgctgagttcccttgttctagctagcagcacgctcctcagagagggggccgagttacagacagcagccgcattctcatgcaaaattagttttaaactgctagtgtgggcatcggtaccttttgcctgggtgataccgaagaattgttgaggatttagtatgctccgtagagacagttcagccagtcatttctgcattggagagacttctcatactttctttgaagactcatagaaagctggatctagagcttttgaatccttaattagcacagtagaaattagctttctatgggaatgctttagtgttagcagttgacaattaggcccatattcaatctgaatgggaacaaaagtaaatgcaatgataatatactgctagttagagaaacatgttagttgattatacctgaaatggattatttatctcatcagcaagtattatttgaataaaatgagaaatgcttaagaaaaattgttgctctacagtaatttggtttcgaagaatggaatggtaactattttttcccatcgttcttttgagagaaggaagtgtgatgactgatgatcttgaaaagcccatttctgattgcacgttgactggaattctttctttgtgtctgtggactagcgatgctgtttgtaaaatgaagattcgggactggctcatatctttttatctaactagatgtcagatcttgaaatctgtattctcgaagcaattctgccacttgatcgtattcacaggggccctggtaggctcctttagaaggaccatttctgttcctagagcttaactagaattcattcttcactgaaaaaaaaaaaagttacttaagaaagcatttctttcctaatctcactcaaatctgcagaattatttgtaattagtaatacaaaatctggccaaaaggagacttgtaaatagcgtaaagtggtgtcttatgctaaacggtggaatgtataggcagagaagctctttgaagttgtcagatgagctgggctcacaagcctgattcaaacaggctgtcggtctcctctcaccccttaatactgtgcagcccaaactcctaggactcttgaacatctgagcagttttgtgctttgagccactttttgacaaaaatggctccatttttccacagcgtggttttcttaaaatagtttaatgttttatagtctcatagtagtagtgttgctttctaagctataacagtcgactttattcttctactctgaaaaatcttgacttgtttgagtgtatataatatatataaagggagccttaatggattggttttcataatttaatattttttgtatttgctcttgtataattgtttttaacggaaagtattaaagaattgagggtggaattcttagaaccaaagttattcttaataaaaatcaccacatgcttggaccatgcaaccat

SEQ ID NO: 688 - protein, 131 aa, Homo sapiens; identical to SEQ ID NO: 682

SEQ ID NO: 689 - DNA, 103661 bp, Mus musculus
  misc_feature (1)...(103661): n = A,T,C or G
atggtcttaaagagacactatggaaattcactgtgtgacccttatgaagcttacagttcaggacaggggctggcagatgcaggtttaagtcctagggattttgggtataattgttcaaaaggacattgcactgttggattataatgaactaaagactggatcacatggaactgactgtcctgtgtcctgcaataagctcatgtcaagctttcttcaagtgctcaccactggctcatgggcctgctccagggaagcaagggttcctgcctaactcctcttcacaagggcttggaaggcttgcaatggccaggaaggaagacattgtttggtccttccgacctatctttccccagactatcaagtggtctgatcaccacacatccaacagaggctccaatctgttgttaacagccaccatctggtccctgtggtgggtttcaatgtgtgccagtgagtaggccctactagccccatcgcctggtatgactgcctcaccacatccatggcccggttgttgaggaagcttcctgttctctcagcttgggtgaataaatgagagtggtcagtcatcccagcctggatgtctcagggagaggaggatgttgtgggtgccaactctttgaaggtttaggtttcaggttacaggaggatatgtactcttattctcaaggcttttccaccatggggctcaagcccatctgacctaaatcttgttttctgtaaaaccagacaaagttaggcctggatctgcttgctgcctacacacctacctgctgaggctgggcgttgtggtcatcaggaatgacagaagccaccacctagtgggggcaggaacacagctggattagggccccactggatctgctcccccaggtccccaattcccggcacctccatggctttatgctgcggggtgtgggctacatctagctcaagcctgctgaaccactgcagctaaaacaaagcaaagcagcccaaaggtgtgaccaagagaaacatttgtgctaataatatcaacttaattttattataacttgttaactatttttgtttcttataacagtcttctgctgtgataagtggactctgatagatgcacaaatacaatttcctctccacctgtactgagtttgcatcagggcagtttcacaagcagtgtgcacctcaagtggctgctcatggtcacacagtgttggcagacccagcactagtgaccacaggtgtgtggccagcccaggggtcatcactgcaatgccaagaggacccttctttgtgacactgctagtaactgttttcctgagttcctcttatatttggaggtgggatactccgacatagcctgtggtttagggggcatgatatggcccaggctggccatccacttctggcatctttgctgtctatggcagaggtatggaaacagacacatgtgaagatgcagacactggcaacatctgggagaagagtatagggtgagggagagcaccaccagggattcccatcaaaagacctgagccctcctttgatgttgacttctggtaagttctgccttcagtctacagcctcgtgtgaatgaatgctcaccccagccctaggagccttgtgcccactttctaccttctgactttcaaatggcctagactatacctaactgtcctcataaacatactagatgtccagtgcaggggccagccacaccattagcttgacataggctacattttggcagctgagtccctgagctggaaaataccctagcgttttaccttagccttgccaaggaaatccatgggctccagatgttttaggtatcgcctgggaggctggaagacctcacccttgggcacttgctgtagctgtaggggtacctgtttctgagatggaacatgtaaactgggttagccacagctgcaagagccctgagccttgacgcagaaggggctgcctggactccattcatacatgatgatacaggaagtatgaggcacccaggctacccacctctctccatgtcttgtagttcgttttgaaggagtaagctagagaacctgaccccgtaccaatctgactgtcacctgccctactcacctgcactttgtccatggcaatgtccaggatgtcttgagccccctctggccatttggagattgcctccactagagtattggcagccttggtccagagccctgcctggcactgtgctgatgccatgttgtataggacctaggaacaaggatggacatgactggcactgtgctgatgccatgttgtataggacctaggaacaaggatggacatgactgcaggggccaggacccccaggtagtcctcatatgagttccccagttacagtagctgaaggttcgacaagaccacctgctgcctgactggctcagttgtcatgccccttatctgtttagtcctggaggggccatgttttgctttggacttttctgtttgaagcagatttcccttttaaagtgtcttccttatgggggatgagggggcagttggagggatggctcagtggttaagaatacttgctgctcttcccaagtcttgggttagactcccaactctcacacagtggctcacaaagtctccccttatctgacaccctcccaatttctacaccgtgccaccacctttagctgaccctatgcctctgagtctagagtatgtttaagggctcccattgacaatgcagggacaatcaggaccccacatacaatggaacacagcattctcgtgggcaaagaggactgaggtaaggctatcttaaaccctctctgacaggcagataaactcacacaatgctgtgaccccactcttccttcatcctggagatgtaagcacatagcagacttagctttgctacaaggagagaaacctaccttctcttcctactgctgtgttccaactgtttcctctggctcagctataggtactgctgagccaaaccctttccccctaaaccgtctgtcaccttgtcatgaccttcaagtatattctttttttatctgtttttggagccctggatttcagggatccaaaagtctttggctggacagaacgcctcattctgcatggctgaccatgacagcaacaccaacataaaggtgacaagccctggcagactccagacttcaccctaggactccagtcaggacctcagactacattatagggcccttattgcaaatcagggccatggcagagccttagacctttcataaaccccagacccacagagagcacctctaagctcagtgacactgcttggcatgggacctctgcacaagccaatgctcacttacctcccaggcttgcaatttgaagttcagacccagttgtgtgtagtcaatgacagcattgtccctcagctgtgccagggccaactggaagtcagacacagcctcctggaacctgtgggcatcaggggtctctcagtagctacaaaggagttgctgaacctctgaagggtgttttgggatattccacccatctttctctctgtgtcagctctgggagacctggaggcaatagcagtcaccttcatgggtactcaagtccagaggagtgtgcttaactgaagtttactgtctaattctgcttggccacttgaacacctactctctgcacctgacaggggaccatgcctatatccccaaaccccttctaactgttctggtcatttctttcctgccccttaggctctaatcttatgaggccttcactaatctctgaacttccaactgtggatgaaatctctgtccctaaccagatattccactttccccagtcacccttccttggcactggggcctgtaaccctgattatctctcctcccttcctcctcttggaagctgggtagccatgggtatcttgggataagccctggttttcacatctgcaaattggctataaatacagtgaccttactattacagacatagggagagagccagggatgttgagaaagtactataaattttgacagggacaagaggcatgtatgggggccccaggctaaccagagcattctcactgaggctggaggggatctaggtgcaagcatgggtttgcagagacaaagaaccatccaataaggaacaggggataccgctgtgttctcacctctgcagctggaaattggccactccccgctggaggaagccaacagccatgcaggtgtccttagtcactgcttggtcaaatgcctagggacaaaaatgtgtgtggaacactaaactcagtaactgaggaacccaaagccacaaacatacatggaaatgtatcaacagctgaggaccactgtccagttaaagcctggaaagtgtgttactgcatagatttctcagctgccccaagcacctcacaacagactcagggcacagccccatggcatagaaacccaattcttccacaaggagcacagagctagaagaaaacgccccccagtatcaataaaagtcatctctgggagacaggactgtgtaaattttggactttaaaaaatctctttgcaggagctagagagggctgctcttccagaggtcctgagttcaattcccagcaagctcatggtgtttcagaaccatctgtaatggaagaactcacatacataaaatccattaataactgtttttaaatctcctttggtagttcccacgaaacggcacacaagtgtgtggattagaatcagaacacagaagtcttctgtacacaggcacctgctgcggtttcctaccaccttgcctggccaggcgagggctgactgtgagctgggtctgactttgaagctttctcatgtccaggaaatggcatggctgctcacagatccatccaacactacagcttcacaccgacacgttcaagtgcaacctcgtgagacctgtacacttagatttccttattgcagtcagttataccacccacttctcaacgtttccaggtctggccagtgtgcctgtgcttgtacacaagtaagttttattgactcaaggcagtgcctcttcttcttcttatgatagagcatttcaaactctctagttacagtgtgaggaggggagcgtgggacttactcactgttgaaccagctggtaacagatcattacgttccctttcctgaacaataacctttttgttttttggtttggcttggttttggtttttaagactgaatttctctgtgtagccctggaactggaactttcctggaactcactttgtagactaggctagcctcaaactcagagacctgtttgcctctgttggcttcaaacttcagatgtgcagagcctacctctgtctccagagggattaaaggcaggcatcactattcgtggctcaaacaaaacccttctaatgaagaaacaataggtacagataaatatgtaagacgtaatagaagagagctggcaagatggctcagtgggtaaggatacttgccaccatgcctaatgacctgcgtttgatcactaggttccacatgggaaagagaaaactgactcccacaagtttcctcctgatttatacacacatgtaaataaataaataattaaggcttccagaaagaaataataaagagaccatctccacacagcccaggtttctgctctcacccttggtcttgggtgtctttgctttccatctgtggtgtccaggtaggtctgcgttgtaggcagagtgctgagggcttctatcatacacccaggaatggtgaacatgaaggggggatgccctgatgctcactctacagtgtgctcccctgagtaggtctgctttgagaagcaggtggagattcatgtgagtgctcactcagaaccggaatgacagactgtgtgccaccatcccatcacaagcatctgctgaaatgcacactatcagaggacgtgcagagcccctgactgctctgacccagccaccagcctgccttcgggtatgctccttcctcagtcctgagcaccagagagcctgggcaggccaggtctggtacagttgccgcatttggcttatatggctatagagactgaaggcgccctgcttcccattctggtctcaacaaaaagaggggtcttctaaccacaaagctccaacctgcctcaggcaggcactaagagaggacattagttgaacaatctctacgtaaatgacagggtaaagggcagggattcctccccttcttctatgttgactataaggtgcggaagagcgtctttttccaggatgcccattggaagataaggttttatgttcgcagtcacatcttcatctgcattcccctaaagcctccaccagggatgtgagaggggaatctgttatccagtcctggggtgcttacccgcagcgcagcctcgggatcccctgccatcagatgcacacagcccctgttaaagtacatcctagccagcggctctcggacatctgagaagaagcacagcgcagagtcccagtcttcgcgtgccacggccagcacaccccggtgccagtcccgtatctgatcccctagagagctcatggagcggggacgcctgctttgaggcgaaggaagttagcgattctagctggagcgcgtgggacaggaggagggtgccccacagaagctgggaggccgtaggccagggccaaggggaccgggacagcaatgagaagcagctggtagcaagacaactggagttgtgacagtcggtccttgaaactgagtagatggcccaaggcttaggcccctctctcacgccccgcctagaactacttaaacaagtccctagcactgaggagagggtctatgatcacatagccacacccctgcattcgtcaggcctatctgtccactccctggcttagctcaacgccaatgaaaccacggttatctcaatatggacacgccttctccacctcctagttcttgccaggaagcaggtgtgagcacgccccttactcaagccaagcccacaccatcttttttctggcaagttcagaacttcagtgtgccctagatgggcccccgacgtctattatgcaaaactgcagagtgtttggggaaaccccggggaaagtgctgcacgaccgggccaaggttccggggtcagtatggacggtgcattgcagagctgcttgctcagaggtcagcgtggtcaggcaagtgggcggcctaaaggagaaacaatctaaaggctggtagagctcgacctccagacccgcctcttcagaagtgaccgggtgggcttggagactctggagcaacaagatgggccggactggatgccatgtggctaggccttagaagccggattggggcctcggagtcaggtgtatcggtcggtggtggggcagcccgcgagggctttctccactagtgggcgctggcctggctgctactctcccttgcgagtgtggccattgggactgagtcttctacactgctctccaggtggatcacagctatccagaaaaactagcggttggacagggattgtgtcttgtatagacaggtggggcagcccaatgtagactctgcaggacacccagaagttgatgtccaccttcataatcttgctcgaataaggcccatccacagtatgggagtcatgtgccttccccaaactgctgataccaacattaatctctactgaagttttctccctgacatttggggcaccatggcttggcagggttgacacatgaaataacaccacaacacccaatccaagtagctaggctcagctgtatcgtgggctcattacccttccttgcctggttgttgatcccctgtactcagagtcacagctgattctccttcctgtgtgacgcaggacagctaacttttcattcctccatacgtgtaacaatggcagcaatcaattctgtcctacgaaggcttttctgagagctgaatgagatctcatagtgtcagcaaacagttggtgctcagcagtgcttgtcatcctgagttcccaggggctgtgtcccttggcatttctctatgggctgagtttccctaaactgctgcctggagtacgtggatgttgctaacctgacttctttaagtcctagtgcagccattctgccccaatacccagatcttgtattgtctccgtgcaggctggtcactttcccttgtttggctcctctccctcttgctactcactgccccttcctggaagcccagcctaaactctatccctgccttcccagccccatctgcccattttcttttccataggtcagaattctttctagaatgttccatagcccatatggtggtttgaatgaaaatgacccccatattctcatacatttgaatgcttggttcccacttggtggaattgtttgggaagggcccggaggtatttcctcagtggagggagtatgtccctggggattggactttgaggtttcaaaaagcccacaccattcccaattagctctcttgctccctgtttcatgcttgtagatcaaaacacacactcttggctacaactgtagagccacatctgcctacctgccaccatgctcctgccctggtggacatggactcactcttagaactgtaagccccagatcaattttttcttctctaagtttccttagtcaaggtgtctatacagctatagaaaactaaccaagacagcccattttcttatgttgcatggtgtagaacatggtcccaagttctacaaggaattcctcctgttctctgatgaaccccaagtgtcagccacagtgactttcccctgagcatatatgatgtgctctccatacattggtttgcatggatcaccataatggccaggtagtttatgtttaagtagacaggaaccctgttaagtcttggtgtgcggtccagaggtacgccagttggacagacacatgcttttggctccatgtaggtccatagcccttgtttgactggcatctgagtggcaggacatcctctgggaatgatttcaaattcactgatgattcttaaaggaaggtggattatagaagttagatgctatacaggctcttatctccatgtttgctgaagggtccaagggaacttctataccagcttgaaaaggtcatgtctgagggccaagcctcaatttccttttaagagaggtcactcaagaaagtgaattggacatggggtcatttaccctctcctcctctggccttgcaggatctagaggggaggtggggtgagcaatggaagggtacccgaggattctcctttgtgtacatgagccaatgctgtcccgggagcacaggtgtgggccagactttccacagagggccagacaagtgtgggtgaagctgtcggaaagtaagatctgtgtactgcaaatggaagcccaagatgataccaccatcgtagtgaaagatagtctagtggttcctcagataaatagaaatgtatccacacaaagctggcagagtagctgggtatattgttggcactggttgatgcaggatagtgagtcgactggcttgcctcaactagatagcaaggcactgtcttaaataaataaataaataaaaatgtaaaaggaagcaaacaaaacatacatacaagtgttccaagtgacactatttataatagcaaaaggaggtggggagaccaaaccagatgtctgattactgatacattcatgctccatccaggcaattatttttcattcggttataaaaaggcatgaggctctgatatagcttgggtatactttgaggagacatgccacttgtaaaaacacagatattctatgatcctgtttgtggaaaatatccagaacaagcaaattcatagaggagaggaggaagtgtggggtgatctctggcagataatgagatgtcctttagttgaactgtgcagaaggcaagctttattgtatatgagttacgctgataaactgtgggacatttctgagatgtgtgcagactcagggtgaggagttgtgagtaagtagtggtgtttacagaggaggcctgagccagcctggctgcagaggcccagttatgccagccagccttctcaatccctcctttgtcctggctgccttggtgtctctggcatctgagggctgctgtgttctgttcctagtaggctccaggtaccagctctgccccactgtgcatctcttccctccccttgtctcccaggctatatggcaagtccagagtcacgtgtaaccctcagctagggcctgaaggacctggagacctaccttggaacctacacgggaccagatccaagtcggaaccagcaagtcagaatacagagggaactgggaacccactcaaagccagtgctctagactgagccaggagtctcccatccctcaccccacggtcattccccatgccagacccagaaagaggacaggagggacacaccttgacctaccagtgttccctggagcctgatgcttcttccagacagagccagcccaaggtgggctggaagcgagaaagagaagcagcagagagactgggatgggcactgttctcagtggacccagtgaggccagattctgctccagttaggacaaacagatgaactgggccctgggtggttcccatgctctgttgtatgctatcacagtggcggctgagggcagggcctgcctggtgcagagagttcctgggtgtgcaagcaggaaggtgctcgggggtggggtggggtggaggcacagtaactttcagccagctgatctaagaacagtgctgtcctgctgatggagagtgactgggaagagactggacttggccagcagaggggcccagagaccagtttctagtggctatctgtggccttagcatagaaagcctgtgtgctacttctttggggctgtacgactagcagtgagttttctacggtaacttttgaatcctccagcccttgagagaccagaggctacatcccacttcccatatgtccaacatgatcactgagggcatcccgagggaagttcaggatggccttggccatctctggaaatctaaccatacctgattaggttcccctttacctagccctgctactacccgattgcaagaaaagtctgtagctctctgctgggttttttaaaatcttgtgtgtgcatacgagttttcaatgtgcacattcatgtgtaagtatagaggccccatgtggaggtcagaggacacctgttaaccatcttctgtcacctggcttgctaccgcatacgccaggctatctggcccacaagcttttggggactcctatctctgtcttctttccattcataggtacagactggctgtacagggacacacaccagggtatctgacttacaggaacacacactagtgtgtctggctgtacaaggacatatcagcgtccctgagcacattagctagggaagtcactgaactccctctgctgtgtctgtggaatggtcttccttgtgcagaggtgaggggatgggagctgaggagagtgtatcagtgcagggaagcagcaggaagtgtctgtgggcgtgagctgtcaccctggttacctccttgctgcctggattagttcatttgtttcttcacttgtttgttcattaatattcatcaaacttgaatattcatcaaacatcttaggcagtggctttgatgccagaatggagcatgcagcttgggaatggtcaatggagactgctgggaagctgagtaagaagaatatcagcgtatcttcctctaggtcatcttcacagcccacttggtgctctgttcctgatgacttggtcccaggcttttcattttattttttgcaagaggttttttttttttcaggaaacgtgatggaggctaatctcaaattcctcctaccttggccttttgagaactggaaccataggtgtgtgtgctctaatgccaaacttgcttgatacttctgcctagcatccacatatgggcatggagatttgtctgtgagcaacagatcccattgagggaacccaggactctgataggtggaagacaagttacagagccccacggctgctggcataggaaaaagccaccttgctgggttaaatttatcatttgctgccaggagttgtagctgcttcatagcgggtcaaagaaaactccttttgggaatggtctagggacaaccaatagcaaggagtcaagcacatactattttatgtagagggagctgtgtccataataaccttcttcttgttgaggcttctattccttccatcacaagacataaacagtatactgtcaggagtctggaaaccatgtttgctgggcaatggacggtttccctggccactcctcactggatatggggaagacctggctcataggtttctccagcagctctggatgctcagagatcttggtcagctttgcttgtgagcacattcacactgtgtctggaggtcttacaagttgcagagggggttgatatgaattcaagacctggccaactggttgttagtagcaggatcttggagaggtgtactcaatgaccattaccagagagaaagctggggggaatgtgccttccaccggggggtgctgaacatctagaggtcagctctgctgaactatagtgcaggtagagtggtcagggctaatcgtgacaagagattcatgcttccatgtgacagtgggcctggccatgaccccacaatggagtccttggtgctgcctgtagatggaatgacttctaacctggggcttctagccaaagcaagggaaagcttggcataagcaggtaagatgctcgagagtgtttctcatttgctgtactttcgaaccaagagataacaaagaccaggacctgacagccaggggatgcttgatgccagtgaaggaagtaaggagtgaatttgggtgccagctggggatagcagactaaggctgtggctgtccaggctggaatagggcagaggtgtgcagctgtattactgtgttaggagagatgtggtgctatcagagtaccaaaggcgagaggtgtgcagactgatcttaaggacacagcgtccatctttctgcactctcccttagatcttatgtctgtttatctatgcccagattcacgactccggccatctccaactttatgttaagctagtgctgaactttaacacattttttaaaaaattgtgggagtttgtggtgtgtgtgtgtatgtgtaggggtggatgtgtgtatgtttgtgtatgtgtgcacatgggtgcatagaggtgtatgtgtacatgtttgtgtgtgcatttgaaggccaataatcaactttaggtgtctttccttgagtgttctctctctctctctcttattgtgggggggagagggagagggagaaaggtggagagggagagaggaaaagggagggagagaggaaaagggagggagagggggagtgggagagagggggaaagggagaggggacagggagagggagggagaggagcgggagaacaacttgtattgatgcatcctggagtctggctcttagctgcttctgtgccacaggttttctccatctgttctggtcacggggatgactatccagtccaggctggccctcccacatctcaactggacatgagattttaggtcactgatttctggataagaagtagtgccatgcccagtcagttctctctgcccaccatatgggtcttggggaccaagctcataaggtcagatttgtcagtgagagtccttacttgtaagctgggccatctccctggccctccagattattgtttaagacagggtctctcactgagcctggagccactgattggctagacagttggctagctggttctggttctgcctgtcttggcccctttagcccaggggcacagatgcatgaagtcacacggagcttttgcatgaattctgggaacctaacctccggttctccttgtacagcactaagctacctccctgggccctgaaatattttttttgagaattcccatttagtttctatataattttatataatttccattactcccattttgtgcactgagaccatgtttgcctttgacttctggaccatgttttttttctgttcctctttaaacacatgtacagctgtactctggcctttgctacttcatgtcaaagctttattctgtgatctatcttgcctcttatgcccctggttacatgacatattttcctacttctttttagatctcctgatttagtttgagctgatccattttgtttggttttgtttttcaacacttttttttttttaaatagctctggctgtcctggaactcacggtgtagaccaggctggtctcgaactcagaaatccacctgctcctgcccctcctgcccttgcccctgtgtagaccaagctgctattgagctcacagagatctgcctgcctctgcctcccaagtgctgtaattaaaggtgtgcacaccacatctggataaactgatcatttttaattaaaccttacagactgtgggttccactgttatcctgtgaaggacactggcttacccctagaagataattccctttctagctggctctctggtctaggagtgtattgaacattaatagcctctcgggactttatgtttttctccctttccttcattctgtggggctattctctatagaagccttttgagaatttgtgggggacttagctttggatggagcaacttcatgttcttagtgtggtcaaaggcgtgaccattctattactagtcaagagtcttccctcttgtctgagctggattctaggcttgtcctacatacatagttgctcctgggagacttggaagtcttgtattaagcccactcgggctccctgtggcccttcctatggccactgccctcagatgcactacctctttgcttctgctcagggattcaggtgggagatagctcacaagtggagagggcatttatgacctacctgagagtcaagaagcatggtcctgcactgcatcttctccagaaacccccggcctaaattacaatgtctggggaagggccatcctggccagagcagagataaagagaaacctgtgcgttagcagctcagctgagagccatgctctaggagtactgtgtcataatgagtgttgagtgacagcagatcttatagaacccttccaggctgtgacttcaagtcagccaatacaataggtgacttctcaccttgtacagaaagtaattgtaacatgtgagctagaaacccaagaataacctgtgagtgcatgatttagaaacatgagcataagtccagcgcccttttatctcaggctctgcttcctgcagtttcaatggatcccttggccaaagcatgtgaaaggaaaatcccacaaattaatagttctcagcttttactttatataccattctgagttagctgaggtaacgcatatctccatttggttccactggggtagcatcactcttttgtccagtgtgttttcactgtgcatgttatctgctgttgggtctccctagccaggtgggttttcattctgaccataatttgcatcccaataacctctatcttatgcaatagattttatgcaatagtggccttaaagcctgaggatgataatctgacctttccaaaaggctagagaatcataaagtgctccttttaagcaggaaggcaggaaatttcagtaaataagtcttaatggcgagggagtcaagagcagtgtcaacaagccactttccatgaaactgtgaaataaatctaaactagttctgctgttgaacttcacactgaaaaaattccagccacagggcataagtgctctgatggaaaggagttagatttgtggattgagcactgactccagtttcagaccaccatgagggacttggaccatgtccccaggcaccaaagtgtctaaggttatggctgtggcaatgcttgcctctagtggggactaggagaagcagctccctgttacatagtcagggatccagaaggcctcagtcaactttgttaaaggcagactgaagctgcatttagagatagcatcctttttacagtcttgtggaacagatggagaagtaaaaccgtttacaccgatcccatattccctcccctgggaatgccatggctcttgccagcctgggtttagagtgggcccttcatgtgtccctaggtcctaaagaaaccaagactcaaactcaaaggtgaagccagcagtccaggactggccagctttggacagtagtggtttagcctcttatggaggcgcttcttccttggggaacaacgttgctatagatgctggaggttgagggtcagaatggttgctagccagcttcagtaacgtaaccaatttctcatccctgggaccttctcctaggcatgggacactgttcacagaaagatcaaatccttggtctgccctgttgctcccctgggcgcctgcactcatgacctaaataagttcttgcttacttgagtgctgtgaacttccacagccccctgccacctcccaaggtggagacatagactcctcagcctgtgtggagccaaggaacttattgtccttaactcctagttcctcattcctccagctgtgtacctccaaccttaacccttgaccctgccaagatggacccaggagaccccactgccagagagcctactgctgaaatgctcactgctgccggagagtctcctgctaatgtcccctctgctggcattagcatgctgctctacaagtgagtctgtgccctaagatgtctgagtccagttgaagatgtttagtagagctgtgtgtgggtcagtggggtaatgacttgtctctgcacatgggtaataagggtttttccctgggatcctgcaagacctgaggaccgatcctaagggatcatagcctacgcttctgtgagcctaggaggccacccaggactggggtcatcttgagccacagaacagacagatggctctgagtagagactacaggagggggcgaaaggcaggtccagtcaggggtggtctctgcaacagtgttcagcttcttctagatgggacataagggctcctgttctcactgtcctgctgtctcccgagacaccccaggcaagggcttgaagcttgtctggggtcgggggagacgatgtccacctccagcagattcaaggagcccacaagtttcttaggtattccctggcattcttacaagttccctgcagtttgacaaaaacaggccatgctttcagtcccccccaccccccatacacacacacacgctaaaaatcatgcctgccacctcacaggtggagattgaaatgacaaaaagacagttactatatttctgtgggtgaagtcttgggagtcccagagtgcttagcagtcaagggctggattctccatatcaccagatgtattcaggcttcccccttcttcctaaagtgtctccacttcagtttaaaaaagagaactacatgagaagatgccatccccactgggacatgtgtggttccatgctcaaggctgttaggaccttggcttcataaaagatttgtcttccaatcgaggtctttgcagttcttctggggggtcctcccttctcttcacttctctaccttaaaaccatgcaagatgaacctgagcagcactagccactgaactgagggtgggcgggggtggggtttatatgtgcttgcctatcttcaggtagacaaggattccaggccatgttcctgtacatgatatcaacttatatgaacctgagcaggactagccactgaactgagggtgggcggggatggggggcagtgggggtgtcccaggcatttcctcagcctgatactgctctccacagtgagtccttatctgtatggctctgacataacataaaagcattttatccatcctgccagaagggacaagaagggacttggagacatgcctgaaaaacaagagtctggccaagatctgagtatgggaatctaaaactggttcgtttccttgctcccatcctgccttgacaccgaggcacttcctgcaatttccagtgctctgttctctcgtggattgcctaggtcctgaaaggacccagaaacctgtaccagggctgggtttctagcctaggtgaggtctgatcaagccaggagctgtcctctgctgtcatcttgtgtgttgactacagcagtcccagagtgcctctttccttctggcagccacccaatactaattctcttcatgacactctctaaactaagtcattgtatctggccatgaggctagctcgagcaaaaccagtagaggagcctcaggccttgggcatcaaagagtgaggaaacgtcccagcctgtgtgtctgctacctgtccatctgtctcatgtggagatctagccagggcctatgaatggcaggagcaggacctcccctgatgtgcttgcctatcttcaggtagacaaggattccaggccatgttcctgtacatgatatcaacttaatctacctgatctacccacgtgtctagctcaacaagagacctccagctaagatggcccctagcagacatgtatcagggcctggccagcacgccctgttctcccctctaagtgcctcttgctgagctctgtgctgtctcatcccccccatacctgagttcccttgcagtcaactactcttaggtcagtgttggtttttcctctctggctgcctggaatgagggtcacatgtaccgtaacactcctacccaggccttgttgccagctcagggaggttttctgtctctgaggccataggagagaggttcaacctggcttcctaataccataaggccaagccatagagcctccggctagcagagagggctggtggtccttgctgtgtggccaagggcaagttacctaacacccccctcattttattgttttgaacagtagtgataatatcaatatattgttccactgctttgtgaatatcaagcaaattattttatgtaaaactagccagcaccaagtactgtctgagtcggccccacatggaattctttttgctgtgcaatatgaggttgggctcagctcaactctttttcccagaccactcagatatcctgatgataaccaatgaggagtgagatacctccttcctgggccaatcccagctgtgtctcagtctcttcttggctctgctgtgcccttaacagactgttccaagggctgtagactggcaacactaaaaacagtttctttgctctttgtcttctcaggcccctttccccattaagcatcagagtgagcctgtctgggttcacaaagagcctcctgtcatttttactgagaattcctgtctgcagcttatcttaggtgctctgatgttctccgggtggctaacaccttgcctagggtgtaagtgccccaggtgtccctctgctggacaggatctgatcctttgcatgtccatctcaagactgttatagacagggccccatgggatgccacaggtgctggaaaagccagagtgggttcatggctcccacctaccttccttgggcctctcacctggggatacaagcaccatgcatgagttctatagacagataagttttcaaaggctggaccagccttcctggagtcttgagccctatctggtaaggggtcccttgacaggtctgtaatctgaggataacaggtgacctgtgtgttcttagtacagctatcaaagggacccttgaagaaagacccttgtttttctttggtccttaggtgctctgtgtagcttttgatgctgtgtgtctttcttgttgccttcttccaagtgtcaatggattttccccttgctacagtttttcccagactacaaatagacctgaggggtatgtgtgcacacacatgcataggggtgcacgtatgtatgtgtgtgtctgtataaaggccagaattggatgttagatgtcttcctcagttgttgtctgcttttgcttttgttttgtttaagacgggtctcactgtgtaaccctggctgtcctgggactcaactatgtagaccaagctgcccttaaacttacagagatctgcctgcttctgcctcccaaaagcagggattaaaggtatgtgccaccacacctggcttctcccttcctttttgagacaggatcgttctgtaaaccaggagctcagcagtttggctgggctgagcagcaagccaaagggatcttccttccacctcgccagtgctgggattatgggcttgctttaccacatttagctctgtccttaggcactaggaatggatcttgggtctttatgtttgtgtatctccccaaccctggtcctgagtttcggtgtccctcttctgctatgcagaatctatcctcatcccgacagttatgggttttctactgcgtcttctgagaaatttgtctcttccctggccttcagcctcattttccttttctccctgacttcgtgaatggacatgcacctttgtagattggtctgcaagcagcagcaggctcaggtacagatgggctctgcttcaggctcttggttccaaggacagagccaagcagcagctgtgcaacaaatactatgacttccaccagtaggcatccagtgagtgttatgtgaaccatagcctgtagtttagcagcaacctgggtatgactgtggccagtgggtgtgcaatgagcagtaagtggtcatggtcaggacaatgagtagtgtaatgaccagcaagaatacagagagctgtgtgtgactgtggccaacaggtatgtaatgaatggaaggtgatcatggccagcaagtgtacagtgagcaatgtatggcaatgtctggtgatgtgcagtgtgtagtgtgagacagtgcctggtggtgtgcagtgtgtagtctgtgaaagtgtctggtggtgtgcagtgtatagtgtcagacagtgtcttgtggtgtgcagtgtgtgtgtaagactgtgcctggtggtgtgcagtatgtagtgtgtgacagactgtgcctggtggtgtgcagtgtgtgtgtatgacagtgcctggtggtgtgcagtgtgtgtgtatgacagtgcctggtggtgttcagtgtgtgtgtatgacagtgcctggtggtgtgcagtatgtagtgtgtgacagtgcctggtggtgtgcaatgtgtagtgtcacatagtacttggtgctgtgtagcatgtagtgtcagacagtgcttgatggtgtacagtgtgtgtgtgtgtgtgtgtgtgtgagactgtgtctgttggtgtgcagtgagtgtgcatgacagtgtctgttggtgtgcagtgtgtagtgtttgacagtgtctggtggtgtgcagtgtgtgtatgactgtgcctggtagtgtgcagtatgtagtgtgtgacagtgcctggtggtatgcagtgtgtagtgtgtgacagtatctggtggtatgcagtgtgtagtgtgtgacagtgcctggtggtatgcagtgtgtagtgtgtgacagtatctggtggtatgcagtgtgtagtgtgtgacagtgactggtggtatgcagtgtgtagtatgtgacagtgtctggtggtatgcagtgtgtagtgtgtgacagtgactggtgatgtgtgcagtgagtgtgtatgattgtgcctggtggtgtgcagttgtagtttgtgacagtgtctggtggtgtgcagtgagtgtgtatgattgtgcctggtggtgtgcagttgtagtttgtgacagtgtctggtggtgtgcagtgagtgtgtatgattgtgcctggtggtgtgcagttgtagtttgtgacagtgactggtggtgtgcagtgagtgtgtatgattgtgcctggtggtgtgcagttgtagtttgtgacagtgtctggtggtgtgcagtgagtgtgtatgattgtgcctggtggtgtgcagttgtagtttgtgacagtgtctggtgatgtgtgcagtgagtgtgtatgattgtgcctggtggtgtgcagttgtagtttgtgacagtgtctggtggtgtgcagtgagtgtgtatgattgtgcctggtggtgtgcagttgtagtttgtgacagtgtctggtggtgtgcagtgagtgtgtatgattgtgcctggtggtgtgcagttgtagtttgtgacagtgtctggtggtgtgcagtgagtgttatgaatgggagtgttgagaattgagaatggcttcctgctcttagatgccatgctgggttctggcctcagatcaagcggcttccctaaagacaccagggtgggtaatcatatgctgcttgctgctctcttcacaagctgccctgccacatgcctgagcatgggggcattttttgggtctattaacacagcaccgtagacatgagactaaagagggattggactagagagccccagccttggtagaaaggcaggaggctggaaggtgatgccatgtgcagctctctgaggggatggcagttccaggcatcgtaggggtgctgtgtgtctccaggaccttatggcactgtcctttctcaggaccttctgcagactcccatcagctctgtcatgggttgcccagtgatcatcaaacagccctgagagtggaacactgggttcaggtcactctgctatgaggcaacgtagccagcatactgctgtgctggttacagttagttcagacccaatgagcagagtctgacaagaggtgagcggagctctgggtggctctgtggagatcatgtgccaggggaccctttgaggcagtcaggtgtccagtgtagcatagccacactcagccacagtgcccagccctcagagacagactttcatggtatctaccactaaccctatgtggtgatattgcagttgactttgggaataacttttcaacacatgtccctacctagatctgtaaagtacttaaagtgtaggaagctgagtcagctcagagcttaattgataaagtgacaaccatgtgttgccacccaatgtccctgtgcctcagccctatccctccatggttcatctgagagcctctcttgtgattcccagagccatgttagcatgaagacatctggggagacaccagtggtccaaatgtccctaagttcccaagacccctccctcctacaattcctccatgtggcacttctgaagaattcattatttgtctgttctgactttcagtaagtctgcctccctaggttgtagctttccatccccctccctgtgttcctgagaagcagggtttggggtcaaggttcaagctctggccagaggccatctgtcttactgtcccagacctgctagcaaggcctcctgccagcaagcccaggatgtccttatagcaacagctgtcccaggtctggtgtggagagggatgtggccagagcccatgagggaatgtggataaactgagaggcaggaaggactggagcagaaggcttcagcagtcagcagtgttcagctggcttcccagctctacagctcaggatccctgcccagggagtactcccataaccactctacatagctctacagcccgggagtgctctcctaaccacctcctggagcctaccctcttgtggctttgcagaatgccacagaacttgcttatctcatccattcagatgaacgcctctctgcatcctgttgttcttatgtcataagaacaggatgtagcaattgtttgcaatgtgcgtcagcatgcccctggacctggccccatctcggtggtgcccagcgccatagagacccactcctgcccataggcgtgacccacggccgatacagactcctagggctctccactgacacatgactgcccacagtgtgcatgagggagactgatcattagggaggttaccatggagatgtttgtcatgcactgggccacatcctccagaaagacaaggctgttagtgccactgggccccaacactggaaaggacagtacacaacaggcccgtggggaactatgggaggaaacttctagcaagaggctggaaggtcacaacaaggggagtgccttcaggctggaacccagagtgtctagtgacagaatgaaggagctaaaggattgaatgtcctttagctttggtgccaagtccactggggagttaacaggcaaaggctgctctctgctttgttttcgtggagttttccaaagatccctcaaacctttgctaggccagccatggttggcagggaacgtaggaaaacagcaaggtcccttggaaagcgagagtgccaggcatgatggtgctctccatctcttgggatgccagccctggggaggcagatgcaggaggatctctgtgagtttgaagccaacatggtctacacagtgagttctaacacatccagggctacttagagagaaaactaaggaaaaaaaataaagctagggaaacctgatggggaggggcaaggctgctgagcagtcagagcggacagacactgaagtaagtggaaacgggtcgggaacagaaatcgcagtcactaacctggggacctatatggtcagcttcaggtccaccaccagcatagttgtgccgatctattaaacttaaaaaaatatgaccctttttattatttcttggttattctttatgcatttaagatgggtgtcattctatagttctgaccagaatataaaccatactgacctcaaacttgtaagaaatttatttctgcttaccaagagctgggagtataggggtctgctattatttccagctcctgggtggtttctggggttttctttctcctaatttatttaatgtgtgtgggttttttgttgttgttgttgtttgtgtgtgtgttggctccacatacttgcactacacaaggaagcttgaagaggaggccattgaatgccctgggactggagttacagatggctgcaagccaccatgtcagtgctgccagttgaacccaggtcttctggaagagaagctgatggctcttcaccaccgagctagctagcgcccagtttttaactgaggcaaacaagaccgtccaactgcttgtttgcagtgtactgcatgggtatagatgctaacctgctgtcttcatgctctctgttcacagaactgcttcacccttcagccttgaggctgctttaaaactgcctcaagggctggagagatggctcagcggttaagagcgccgactgctcttctgaaggtcgcaagttcaaatcctagcaaccacatgatggctcacaaacatccataatgagatctgatgccctcttctggggtatctgaagacagctacagtgtacttacatataataaataaataaataaataaatctttaaaaaaaaaaaaaactgcctcaagacctggcatagtggtggatacctttaattccggcactcagtaggtagaggcaggtggatttctgtgagttcaagaccagattagtctacataaacaaatcctgctcaaaaataaaaacgaaaaagaacaagaacactgcctcaagccagtggcacatggctatgagtccagcactggggaggttgaggcaagagagccaccagagctgaaagcagagtaaaacttgatgatacatagtaagacctgtatataaaacgtaagtagtgctaggctggagagagggctaagctgttaagaacacttgctattcttccagggcacctgtttttgattcttagcacctatgtggtggctcaaaaaccatctgcaaccctaattccaggggatttgagtcttctggtcactgcagacatgaggtaacacagacataatatatacaggtaaaacacccaaacacaaagaaacaattttaattacatttaaaataaattaactacaaataaagaacagataagcaaaaacaaatcctacctgttttatttttttaaaagatttatttattttatttatattagtacactgtagctgtcttcagacacaccagaagagggcatcagataccattagagatggttgtgaactaccatgtggttgccgggaattgaactcaggacctctggaagagcagtcagtgctcctaaccactgagccatttctccagccccctacccattttattaagtacagaacattaaacaaaacacccagaatccaactcagtgggtggcatatgggtgtatgcccacagaacacagtccattcaccctatcagttcccatctcaggagccactgcccatccagcagcccagatacctttacacaccatctacagcaaactctgggacatccgtgtggtgaacaagcacagaaggctgggaaatgtctttcctgctgacccacaggttctgtagtagcattctggggtcactgtagatacaggttctgaaatattataagccctcactgatcactaggcctgaatgctgggccacacattcacatatgctaagtccatgctggtgacagcgcttcatgtaatgggactgcttggcagtgacacgcctgtacttagcagccctcaaaccatcagtctttccccaaagtattgggccttctcttgaggtaagcctaattcttgcccatccattctttctgatttataggaaatcttcatattgctggtcctttaaacttctcaacaccccagggccccctagatatccccattgatattcgtatagagtatggagcagggtgcaaatttcagtaaggatccactttccctggtctgtagagccaccctgaggtgtattgatgtcctatgtgtgggcagtcttagctggggtggtcattttgtaccactgtctgcttctcttgccacttccccttctgtggcttgctgtgagttgggtctaggcagcacaacccacttgcaagtctgtctgagccttttttctctgtgcccagagtcagagtgtaagaaacacataacaatgtccctaagtacaaagatgcacacacgttcacatacacacataggtgcaaacacacacacatacattcaaatttgtatatatagaccaggtatacatattgctgttttcatggacatagtatgtaagctatcgatctcaaaattaggaactttgtagataatatggtgcacccttaactctgcctttgaaagagagattggaaactggagtttggagaattcccaggagacactgccatataaggaaaggacaaactgacagggatggagaaccccatagcttttctttccgagatagggggtcggggtgtccactggggtgagggtcaggatattctgaatgcttgcggaagtgaatggaggattgatctggggttatggtaagggtcagtgctagggcatattattctttttatttttacttttttaactttttccaattttttattaggtattttcttcatttacatttcaaatgctatcctggaaagttccctataccctccccccaccctgatcccctacccacccactcccacttcttggctctggcattcccctatactggggcatataaaatttgcaagaccaaggggcctctcttcccaatgatggctgactaggccatcttctgctacatatgcagctagagacacgagctctgggggtactggttagttcatattgttgttccacctatagggttgcagaccccttcagctccttgggtactttctctagctcctccattgggggccctgtgttccatccaatagctgactgtgagcatccacttctgtgtttgccagggcatattacattctgatggatcaagaggaagtagcatttgggtgaagctgggcaaaggaagtgaaacctactggaaacacagggatttggttagacatgttttggctgttgctatcacccacctcactatgagacctggatgtgctatcatctaagaacactcaagccaggcttgttggctgctgcagtcaggaagatcttagttttagcaggtccctggggatatctgatacactcaacctcagggcccagggcctcttaggaggcatatgcaagaggatttagaccacacagatctggccagctgtttagctgcctggggggaggggaggttttcagatcagtggtgtcactgctgaataacaggcatggagtgagggcaggcgtttgagtgtaggtaactactcgtggtccaagagcaaggggagcgggagtagttgtttgggcaaggctacagagatagggtgcaaggaactttcaacactgctctaaagtggccaggataaggacagaagctgaatggtcccaggatatgcagaccacactctggcgggtgagatccaggctgctactggggtgttactgcagaatgaagtggccaggaaggtctgtggacacaggacttggggagagggctactgcagtggcttcaggggctaggggaggcagctcccattagattcattcaaaacaaagttatttagtgtaagacctgaacgattagcagaaagcactcaaggtattattatcatggcaagcaccttttgcaaaggtctccagctgctcagggcatgtaggactgaatgagattaaaaagcctcctcactgcaaaggaaacaataagacaaagggggagggagacatgagacatcacacaaccccctcatcagttacagagcacactgctcatgcaaggaccagggttcaggtcccagcacccacgtcaggaagctcacaacctcctgtaactgcaggtccaaagaattgaatgtccttttctggtctccacagattttacatgctcaacccccccccccacacacacacacacatactaacacacatacactcacatactcactcatacacagacacacaaactcacacaaccctcacagacacacacactcacacacaatcacatacactgatgaggattaatatctagactctataaagaaatgaaaaaaattaaacaaaaatccaatcaaaataaccaaattaattgaacacagttctcaagagaagagataaaatgactaaaaatccatgtgaaatgttcaacatccttagatcagaaatgtattatcaggagtacaccgagattccacctcccccagccagaacaaccaataccaagaaaattacctcagggctggagagactctgttgcagtaaatctctccaacctaattatgccccggcaatgaaaacacaacacagttaatatgaatacatgttgtgcgtctagattgggcagatctaccgctacgctaccatcttccacatttatgagaccccttagaacttgcagtttctccaggccatgtgcttctgctccgcttttcttcttcttcctcctcctcttcctcctctccctcttccattttctccttcttctctcccctctcactttctgctccaccttcccttttatctgcccaatcatcagctctcctttattttacaatttaaggcaggaagcaggtttacaggaaatcacctgagtgctgactcattccttgttcgcagccactcacaagagaatggaattaacatccaatacaattagccccagggctatccacaacattttccctctttctgtccaattaaaggactatttgatctcagatataattgaacataactattactattttgtaatttataaagtacaagagacctaatacccagtccttcatctttgttaattaaacagaacctctgtcatctatccttacttaaaagacttataattctacatctggctatggcttggctttagattgaatgccatctgaaaaccatcccctcaaaaccgtcgtctcaaagtaaaaagcctaggttagctaggagattatggagtttttcaaccccatcagaaatccaggaccaactgatattaactgaaaatacatagaaagcctaacacagcttccaaaacttaaccaatccatagaggccgctgatcacctggacagtcccttacttcaacacgttagagcatcagtattcagcctactggccagggtcatctgacagacttagagaaacaggaatattaaggactagcctactctgtctctgcagaatcaagctgtcctaacctgtaattgtgtcctttctttgggcaatattatgtctgtagatgaaatgatgaggccattcttgcctagtggccgttttgccacaactggagtaactcaaagatgctcagtttcttctttgaatccaagacagggaaagctgtcaggagcagactggtctcaacaacaagtgactaaacaaccttaaacgtcacattctgtggacttctgatgtttttgaaaaccaactatctatgtgaagtaatcttgactgttgtctgttaactactctcagccatttctaattaaaataactgagaataccctaacaataaactcagagccatgaatttcctatttttcccttaaatcacaggcttaaacatctcagatctgtttataataacagcaatagaaggactgggtctaagccctgcacttcaaagtttttagtatcaaagaccacctataataaccacccccagccccaaagcttagggaactgggacgacgactcttcataacttcttcaagctgaatatgggcgttgagatatttttgaagggagggagaagttggttgaccttaagaaggccacaccaatgattgtattaagtctctgatgtctgtgtcctgactggatccagatgaaaaaaaaaaaaaaaaaccaagacattaggggtctaggcaggtcagttcagcatgtctgatgatgaaattcaccaaggctgtatattctgtaatatataaatctcaaaacaaaatattagtatcatcaagatagcctttttgtttgattctctggaatctagttctcagggtgtctccctctatcagatctgatccatataactctggaaggtgtaaataccttgatcaccttttccaaaaacacaaatacaaaaccttttcgccaagtcagcatagccttcagccggtaaccagggaaacctgtagcttgccctctgccccagaggaacaataaaacaaccacattactcaaaatcacacacattttaccctatttaggcctttctaatttgtcatgtcaggatttaaacccaaaattcctgtggagcccatgttagacagaatatgagtatcctgtaagacctactagagtaatatatctttacgtcattgttaagtatcaaaaggttatatttctcacttttttatcaatgaattacctggtccggagtcctttgtacctttgtcttccaattctttatggacagggagaagctgagtgtaaaaagatgctcattgtctgtgtccctgtttggaggtggagagcaaaggatacagggaagcaaatacagaaagactctctcgggcatagatgcctctctgccgttctctgtaggtccctcaaacccagtcagctttgaatccatactgctacagcctaggtcactgcccaagcctcattcaaggtttggggactggggtgggcagcaaatttttatctcaggttagttaaattcaagtcaatacgttgggcgccattttgttgcagtaaatctctccaccctaattatgccccggcaatgaaaacacaacacagttaatatgaatacatgctgtgcgcctagattgggcagatctactgctacactaccatcttccccagctatgagaccccttagaacttgcagtttctccaggccatgtgcttctgctccacttttcttcttcttcctcttcctcttcctcttcatcctctccctcttccattttctccttctctctttcactttctgctccaccttcctttttatctgccaaatcatcagctctcctttattttacaatttaaggtgggaagcagatttacaggaaatcacctgagcgctgactcattccttgttcgcagccactcacaggagaacggaattaagatcaaatataattagctatccatagcagactcctcccactggctgctcctccataggccctgggctcaattcccagcacccatgtggcagcacacaactagacccacacacagacacacatgcaggcaaaacaccaatgcaaataaaataaaaataggaagaaaaaaaggaagaaagaatgtgacatcaacaaatattagctaagatgtagggagaaagaagctattatgcactgcttatagagatgttaactaaatgccactctagaaattaagttttgacatgggagagcaattagaagggacagagttttgtttggttagtttgggtttttgtttttgttttgtttgttttgttttttgatgcagggtctctctgtgtagccctagctggcttggaactcactctgtagaccaggctggccttgaactcaaagatcagccaccaccttaggacagagtagtctatcagaaacaacatgatgggaccttaaaggaagtgggggtggggtgggggnnnnnnnnnnnnnnnnnnnnnnnnnnnnnnntggtatggatgtgggggggggagagaacttagaagtactaaagaggtgggagccccccacccacactgaggagcctggtacagagccttgctttggctcaagggcaatttcaggacaggcatcggaccatttgcccctgtgagctgaatagtagggactaggaagcacatttgagaccctgccccagtgtagaaggatgccagggtggggaggcgggagtgggtgggcaggtgggggaacaccttcatagaagcaggggaagagggctgggatagtggggttcgaggggggacaggaaaggggataacatttgaaatgtaaataaagaaaatatccaataaaaaaaagtttaaaaacaaaacaaagttcctgttccctgcagaagacagagaccagttgctgcaggggaagatgctgtaggggagtctgtggtccagctctactacccctggggtagatccaaagaacagtaagtcagcacactgtagacacttgcttctccatgttgttgcaacatcttcaccatagctaagggcagagccacccattaacagaagaacgtataagaacgcatggcacttatatacaagggagtcttattcagaccacacagaagaaattttgttacttgcaggaaaataggtagccatggagactgtcatgttaaagctaccatggtgagtttatgatcagcctgagatacatgaaactttgtctcaaaaactatatattttcatctttgcagaaagaccgtttttcttgtatttttgatatatacattattattttcaaacatgaagaattttaaaatagtggttcaataacatttagcacaatatcgtgcaaacatagcctcttctagtttcaaaatatgtcaccaccgcctcccccccaaaaaaactatttccattaagaacaccccacccccagactccacaagtacaaaaatacctcttcctgtagacttcctggttctaggcaggctacccagacacagctgcacaccaagagacccatgtctgtctcctgtcactggacctcaagttcttagctctcgcccttgcagcgactaagtcttcagccccagattgtactctgtggtgtggacgaaccatgtactattaacccgttcatcggctcctggctctttgggttgtttcccccttttgacagttttaagcccctctgaacattcatgcacagttacttgtctgagcataaggtttgaatcatcaggaatacatgaagtgctggagttgctcatggctctggtcatggagcctccttccttccttccttccttccttccttcttctatccctccctcccttcttctatccctccctcccttccttccttccttccttctatccctccctcccttcctccctcccttcttccttccttccttccttccttccttccttccttccttcctcccttccttctttctttctttttaaaatttcagtgattatttttcatatttaaagttccctttagaagctcagtgattaagatctccaatgcctcttcaagaggacctgagttcaattcccagcagccatgctggcagctcacaactgcatttaactccagttccaggggatgtattaccctctcatggactctcaagaaaactgcactcacagacacactcctgcagacacacatacacacatgttatttaaaagataataaagatctttaagttccctttagttcttttgaagtcagtcccgtttttgaatatttttagctattttgtttgtttgtttctgagacacggtctcactacatagcccttgttggctatgtagcaccgtggccagcttgcttcttggtatataataatttctaattgacatttttcccttagtggcacaggccaggaagtctttgtcagtgggtaaataacatttgtgcttttactctataaataattatcactagagaagacttccaagaccccatgtacaaatgggattccttgttccaaggtgggatccatgcctactgtggtttcctttgatttctggagtccatgtaagcaggcagacttcccttctgccctcctgggtatccataggatgcctatcctcatatactacccctgagagttaatgcctccccacagccttggggtctcttccatgcttacattatcttgtcagattctctttcctggtattcagcagccattggtaagtgttaatgttggagcacgggtgtccctaaagtctgttttattgtcaagatcgctgcgatgttaaagctacattaaagccttatgggtactcttggagttcctttgaaagcattgcccccaccttgggcactgaggactacctttgccatagcagatatcatgtggcttctgcactggtgacagcttccctgacttgcccctaagtgttcagctccagcttgtggacacaatgaggcttttcttacagaaggcatttcatggaggtaggtggcatcagaaatccagatgaagaaatgcttttccaggtaagaattccaggctttgccaagtcctgaaaggcagtcagagatcagaaatgtgagagaggcagtgagtgaccctgggaagctagacagtggcacaaggcccgggtaccattcaaggtgtctctttgatatttatctccacccgggagccctctactgcaatcattggctcagggcaagtttttggcctagacttggctgccagtggggctctgggaaatccaccagagactatgtagtgcctcattagaacagagtaaggagacttctgagccaggaggaggcatgtgtccttcacagcagttttaggaaccatgttaagctgtttctgttctgggtattagagtggcctttctccagcttctcccctccctgtgtcctgagtaacttacccatgggctaatagctccccatagtagggatttaccttggcctgcagtagggatatagagaccccttgctctctgcagcccagggccctgaatggctgtcccaccatcctctaaggtggtgtatggataaaagcccaaggtacagctgaaggaacagtttacctctgcattaggtaagaccaaaaaccgtgtgtcttctgcaaactatcccctatgtgtagctggggtttgaaacgaatttacccagacgtatgcccagtgcctaggcatgggctttgttcttggtacattcagcatcaatgtgttgggtgtgcaggtagaattgaacacatatgcaaggccaacctgacaggccagcccagagcaatctctctctgagcttttccttctcataagcaagaaggtagtagctgttgcttaccttgcccctcggtcctccctccctagaaggtgaagccacacccgctctggcagagctgggttgcagcatgcaggtccctgctgctggtctcagacctcagaacaagtagctgctgctcctgtcttggaagcactgacaccctccctgggtctgaccggcaagttctgaggcactcagagacacccttccctccttatatcctgtggagctgccttgggtttctggtagggtgtggtcagttctgtgtcggtaaatatgtctacatccacatatcttgcaattctgtgggatgatctaccagaagctgccacggctcaaagtaatcttggcagtgggtgtccacagtgataaaggtacaaccaagatgtctgtacaacaccagctgactacatagaccctactgtataggaccacactggcagctgctttacattgctgcttggttcttctatgcaaatggaagccagtggcctaattattctcaattctcagatctacaggtagggatttgggtcagtgacaggcggtttcaactcaggttctggtagctctgtttactctccctttatcagtctgggtattgtggatccaggtatggctggcacatagtgatttataactctgtggctatctatcactgcccctcagacaagttcagccctttgtctaccttagaccaagctcctatctttatgggaacaatgtgtgtgaacaatggccagggcccaggaccttggggctcagaggagcagcatgaaaagtcacgggtggtggctgaatagtgacaattaccttctgaatagataaagttttaaaacctctgtgcaggtggggaagattgggaggggcctctgaggagggggacaaagtgacaatcaggttttgtgactcttcagctccaggaggaagcctggcagggttggctacactgatgagcctctggccagatggttggatatgacttagagtaggcaggactggtagccaggggctccctcgaggcttctgtagcctgggagccgaagtgttggctgaagccacagccacacttacagtcaggacaggaggggaagtgagtcactcccttgccattccctagtgttctgaaccccttgccaggctaaccagcactccactgtcctctaaggtagacaatacctacaagtccctctgcctgtgagcttgactctcagcatcctgagggctgtgtagcctacttaccttcccacattctatctactggcccaggccagaggatctgaaccctcagcccaggcctgccccgagctccaagcctctccccgagctaagtcccacatcctcatgggctctggacagtgtctcactggaagctgggttttgggcagtcatgcatatctgcagaccatgtagtcaacgtcctcccagagagctccccaaggctgttggggtcacactctggagctcctgtcagcccaccaagaggactctccatgcctctcatagccttcaggaaagggggctgggacactttttctgcctcttggtgtgtgtgttcagtaggacaggcagaagccagaaagaggctgtttgtagtcccatatagggctgtatggggctgtgggccttccagagttagggcctcagagactgggctcagaagcccctcatagtactttatctgagaaaaggtatcaaagtgtagatcccaccccaatgtcactccccagaactctgttcattgcatgcccagaggagcccttctgagattgcctcctagcccctctcagctctggcgggccaatcttgccgatgagctccagcaagactgtgtagcacgtggcaaacatccctaagctggcaggccactctcctgccctttgtccatttgtcagttgatcaatctgtctgtttgctgagtatgtaggcaggcaccccagacagaaacacttaaatggctgagaccgctcagcctgtgctgcccggataccctagggcaggagtctccggaggagaacttgtgtgctgttggcattatagtttctgggttaactttgctagcactgacatctttggtgcaggcccagaaggttgtaagagtctagtcctaaagttctgtattcagagtcccagacccagctaggaggcccaggctgtgaccagatctgcatgaggtgcctggagaaggaggggcttccagtcactgcacaactagagttctgtcatgcagcctaagagatacagaccccagctcatggctagaggatgcctcaagtggactctggcccacacatgcctgctgaactcaatgaggccatcactcattccagcatcatgacttccaccctgttgccattgagagtcaaagatgagcactcgttagggacagaacagtgctctggaggcctccactcctacagctgtgatttaggtatttgtcaccagaagccagccacctaagccccgtagaccttggttggccctgggagaaggccatgtgtcagcagtaccacgactcacatagcttcatttcctgtcacacctgcctctcaaaactattgaggggcacggagaaaccaagatggccacacagccaggaannnnnnnnnnnnnnnnnnnnnnnnnnnnnnnnnnnnnnnnnnnnnnnnnnnnnnnnnnnnnnnnnccccgcccgttcttaaggctgaatggcggctgtgcctggagagagtgctgcgaggcagaaggcaagctagtgtttcagcgtcttctgttacactgaagcttttcaaagagtgtctggggctgctgaatgtgcctctcttgctctccaaggcagacattctacacaaagggggctcttgtcctgcacaggccccttctgggaagaaaagccattgtccaggacagggccgcccagcaggcggtgcatgctccactgcccaccaccgcgcccgtccaaaggggcctcattcaagcttgtctgcctggattagcaaggactcacgactcaatgtgctgcgatatttcatgtcgagggcagcggctggctctgggcagaatcaatgcctgcttttgtctgccgagttattttatttacatttttaaaacagcttatcaaggtaaaaagatagctttgcaaaaaaaaaaaaaaaaaaagtgtttggcttcaggccagcacagaggtaggagtacgggctggcactggggtcctaggccagccatgcagtctggtcctaagccagcctgggcacctgcccagccctcctgcagttcaggggagtgggggagcaggggaaacttatacttccagaagccacaaccctagcccctctggatttcttgattgttttcctgaggttccctccgggctactctgacccagctggctgtacagctctgagtgtcccacctgggcagcagagggtcaggaaaggggtcctattacctccatctgttttcagcctagtcctgacctctccctcctgtggaaccgtatccaagcctttgtactggacaggcagggatcttcactgagagcctgggcttgccaggtcacccatgcactggtctatcatgatctcagagaagattcagcagaaatggccagagacccatcctaggctggtctgaccaaaataataggccacaaagatccctgaagctcaagctaggccaaagccagggcccttcctggaggaggtggctctgggttctgctgcctcccctcacccagcaagggcagctgacagtagctaaataggagtgggaaggcgtctctcttgccctagcccctgcccaggtaggctatgaaaataaaacaaacaaacaaacctcttccaaaacaccccactgcctctacagatccacactgtggataatgggacttcgaacctaggagtgctggctgcacaccaggccacctggccactagagggcagcctaggtgcgtggggagagcctgcctggcatatataaactagcctagtgacccccatatagaaagcataaccgtgcacctctagctcccaggatgctcctggtcagcccatctacctaacagatgaggcttgagcctccacacttaagaagcacagcccacctgagacaagcctcccagacagggggtttgggtcccattaagagccgggcttagggaagactgaccatctggaacatcgctaggacactaacaatgcagttgaagttgtgggaagccccagacccttcacccactgcccctcaccatctcactcagacttccttctccctgagccacttggcagagagtctgaacccacagtcagaagagaatagcccagtccttggctcccctgtctctgatgaagccaggtcaggcccaggggagggaggggccttaggggactctgagtgggcctgatcctaacatgatgtgtgtatggggtgctgcacatccctagtttccctggatcctgcagcttctggaggatctgtgacccagaaggcccttgtgtgaagctgtaggtatctcctggtgatcacgttccgtcctcctctaagccctgcatgcagatcctaagactatcctcatattctgtatttctcttcaaaccatgcataccttccccctgccctgagatcatcccacgctctgtgccccatgggacctggtgaggccaagccccctggataagagccagctatggaggcattgggtcagcacagggaaagcccagcccggaccccttgggctagatgccgccaagcctttcccaggctgctattttgggctctctgagccttgggggtggggtgccagatagctttgctgctgctcatgctggttatttttgctcataatgggagtacgatatatggaaattattaatagcctccccggctacggtacgtgctggtactcagggccagcgtgtgctctgtcccgcggtgggaaggtctcgctgcacagcaggtttgggggaattgcctctcagctacacccaatccccatcaaatgcttcccaggctgcgagtaccattacctacaaagaagttggtctggttatctcaaataaccatggcaacctggggacagatctgaccacaggtctttacatttgaacttccttctacttcccaactccttggagctggatgagagtctaagggtgcccagtctctttagataaagctctgagggattacaggaagttgctgtgggcccccagatctccaaggcatgcggtgcaccttacccctctgctgcatgctggactggctatgttgaccttctagacctgtagaagctcctgcgagagatggggccactgtgcataggtcactgttgatctcttgtcccaactgcctgacccttgcaagccctgagccgaattctggggaactggggtaacagatgagttctcctgccatctcctccacccctcagagactagattatactgtaaaacatgaattcccagggtctcagcccagcaactacactgctggacataggaagctcctgagtatgtctgtagtgaccagcgacggtagagatgataggagcctttctgtagcactgtgccccgctcccgagcacgtgcaagcactatgtgttgccaggcaattgtgtagggcatgaagttgaagctgcagcccgggctggttattgaaaaggtaaaaatgtctttctcatgcaaatcatttaggttcaaacttggataaagctcaggtctccagaaacagagcttggtggggggtgggggagagtctctcaccaccaagctctaggctgccgccaagaccgagaaacgggagggcagagcccaggaggaggctgagaagtaccagccaatgcactgatcgaggcctgcaacatagtgtgcagaggccactaagctgacttcctgttgtagggaagccacaaccagacacagcagtgctggtcacctagagcctataatttagctgggcatggtgatgcacaactttaatcccagcacttgggaggcagaggcaggtgggtctctgagttcaaggccaccctagcctaaagatccagttccaggacagcctgggctgcacagagaaaccctgtgtgtgtatgcccatggctgctgctgagattttaagtgaggtgggctgggcttaagattgctcagtccagacctgcagacaccttggggcagatgatgtagtcttgaaagccattaggccatgcccaccagcacacacccacagtagctctgagggcatggcagtgctataggaggctgagggcatccaatggggcgtatccagaatgtgagatctaggcccgaaggctggggctctgtcccttgtgaactgagtagcctggcaaatgtatgtgtcacagctgtgaggggaaaggtgtcctggcagtcaaggaataccacaaagtcacactgcacaacaaacctcactcaagacatttattgggagggaaaataatggctggagggtggctgcctctgcttgggtgagaagcagcagagacctgggcagaagacaggatttgggggtggggggtgttcggggtggagatttccagggtgaagattggtgggatttcaagtccagaacttgggctgagaccagggattggtgggatttcaagtccagaacttgggctgagaccagggattggtgggatttcaagtccagaacttgggctgagaccagggattggtgggatttcaagtcctgagctttgtctttttactttatagggtggaggctgagtctagcagttaggccagttagagtgttctggaggttggagatcctcacgagaggagcctgcccactgatgtgcctcaaaggctttacactgtctccatggtctgaaggaagcaaacaggacccctctgcagagcccatggaaggggtccactgaggtcttagtcttggggaatagcccaagggtcctttgagacttctccagcagccaatgggtgcacttcgtcctctatacactttaaggaaatgtctcttagctgccagagcaactgctgtgttgtccccacctctgcccagcttggtgagcagagctggtagcacctgaggctctgaacatctccaattcttggtcatgggatgagcgggctcataatgaccacagggctctgaaagcatcggcctggagacaaggcccacacgtgcagttgtgcatgtgcagggtcacagacacttactggcttctgctatgagggcagtgcacaggttctttcaattttcaccatctgggtgggaggagggatgtggcactggccgtggccctgaggttgtgcttccctgcaaatgagcaccccacggctgctccatattaagcactatgcagctgtcttgccagagctctggagaaagctgctcaccctcatggattcctggtgtagcctggccttggcatcatgggcattgacaagtacaccccataaattctagcagctgatgctgggtggcctcttacgagctcaagatgagggcagcagacatttgtacactctcaccttgagctcctcatctctgtcagggccacagcagagagcatagacaagtagcttcttagagggatgagtgtgtgtgaaggagtccccattccacccagggcactgccagagcaggttggcatgttgatagccctggcactttctagtcctgccttcattcttgaagatcaagtgttctctgatacccagtatttgaagtcagtctagttgttcagcaaattgacagtgtgcccataggtgtggatttactggagttttgtgtgtgtgtgtgtgtgtgtgtgtgtgtgtgtgtgtgtgtgtgtgtgtatgtgagagagagagagagagagagagagagagagagagagagagaatatgagcatgaaggtactgtgtatatgtgcatgcatgagtctgagcatgtttgtgtgtggtagaacagtatatgtgcctctatgtgctagtgtgttaatatgcatgcatctagtgtaaatgtgtgtgtctatggcctgcgtacctgtgtgagtgtgtttacatgtgtgagtatgtgtctgtgtgaaggtgtatgcaggagaggaagctgaggtgccccctgagggttgctgcatctggagaagactatcccaccatgttctcattgctggcctaggtgagtagtgcataggtctgaagtgccatgactgtgtgtcaggcagcagtggtgagacacccgtctcaagcctatgcagcaacttacttaaaaggaaggaagtcggaccccgcatcagacctccttagacctgttcttgatgaccttcctccttaggattggtgtgcagtgatgatagtcacttctaagtttctgcatcctaagaatggggcactatagttgcctacagagtggctacgattgatatggaggagacaaagcacgcagggccagcctgaggcaggcagatagtcggctgccctggctaacttaccatattaaacaagccaacagaaagtacaaagctagggaaggagcctgctgctgatcagctggaaccagagcttctgtggagagaggggatacaggtctgcaaattgggcacacggggagatttaattatagatgctggttgcgttaacgacttaacatttttccctagctttgttcccccagaagactagatacaaggacatcccatagtgacaagtgggcctagcaactgatctgggtttctgaatgctagttaccagtaaaagaaacagggactctgttgaatagactgaatatcaaagtggtggtgctttgaacatttaaaactacatgaaacgatggtggtgtgcaagggaaatgcaaagtgccttatgacatgtctcagatgaatgaaaaggcatgaccaggcactgtgttctctctgactcccaaggaagcaattgattcaggaacaaattgttaaggaaaaaaatccaaattactaatacagggttagagaagagagggatggtggctggaatgatggtgcggtcatcctttgctgcttaattaaaaagcatttgacagaagagattgaatatttaaaagacagttggccgggtaaatgttgagcagttctgtttgttaaatgaatggaatctgtattttaaccttttgtctgcatcaaagggagacacagtctacactaagatggcgtggattctttctaatatttaaaaagagaaatcacaccaattttaggtaggatttttaagagtttgaaaggatacaattttactttgctttattcagccaccaaaacttcttaaagatcagtttatttcatgaatataaatgccaaaatactgaccaaaagagctggagctcatacagggctttcatgaggccctaaagccaaattccagtatttctaagaaaaaaaaattacaattgaataaaaaaatagcaaacaggtcaactaacaactaacacattaaagagatcagcacagaacaagaagagaaactcacatctaaaatgtttgccaaagacaggagctgatacaagaccatcattcaaaatatacaaagatctcttacaacccaacatgacttaaagctgaacaaaaaacaaagggcagtcacctcaccaaagcatgataataagatgataagcagggaaatataaacattagagaattacaaattaaaacaacaagacagtactgcacgtgactgaataacagaaatcatagggttaaccctgtgtgaataagtcagggttctctagcatagcagaacttagagaatctctctctctctctctctctctctctctctctccctctctctctctttcctgctctaatatatataagatttattagaaggagttgcagactgacaggctgtggtccagctaatccaaaaatggtgcttatcaatggaaggctcaagaacccagcagttgttcagtctgtgaggctggatgtctcagctggtcttcggtatataccagaatcccagagaagtaggccctaatgccagggaaggagtggacttgctagcgaggcaaggccaaaaaggcaatgggtgaagcttccttccatgtgctttgtataggcttctagcagaaggtgtggtccaaatgagaggtgggccttcactgctcaaagacctggattatgggtgaaatcctcctacttcaaattaagcgagaaaccctcacaggtgtgtccctccactttggggtattagttaattccagatgtagtaaagttgacaaccaagaataaccatcacattatggctgccaacaaaaaatgcaacagcaggaacttgcactctgttggcaggaaaatagactcatacagccacttggggaaacacttccatttccctgtaaccaacccaatgtgctaacttgccttaaccagaacattaacttggagctgccaagatgtcctctggtggagcatggtctatcagaagggtagactacttagtggtgaaaagaaaagggagaaacagcaaggcagtggtggctcacaccttgaatcccagcacttgggaggcagaggcaggtggatttctgagttcgaggccagcctggtctacagagtgagttccaggacagccaaggctacacagagaaaccctgtctcgggggaaaaaggggggggggtgggaaggaactccagacagatgctgctacacttgctggtaagacttaagcccaataactcaggggccagcctgggtaacagaacggggcctgaatctcattttttaaaggagttatcaagatcaaaagcccctgaaagaaacaagtacatgctgctaactgaaagaagccaatctgaaaggctgagtgctttctttattttaaccaggggaccttctggaaaaagaaaagctaggggcagataggaaggctaatggtggtttcttcaaagcataaacaccttatttatgcttgtttctagaattctgatggctttagatttttcatttttaggtaattttcatattctggatgaggcacgggtctgattgttcttatgatgtgtctctgatttctctcccaatgaattgcttttgtgagacactagaggcctatgggtggattaatccattaatgggctcatgacttgaaggacttttggaactggtgggaaactgaaagacaggacccagctaaaggaaatgggtccttgggacctaggtatcttgttgttagatggttcgttcactcccttttcttctctgctagtcaccatgaagaacatctctgctacccatgccatcctcatcataatgtcctgtgtcttagtcagagtctctgttcttgcacaaacatcatgaccaagaagcaagttggggaggaaaaggtttgttcggcttacacttctatattgctgttcatcaccaaggaagtcaggactggaactcaggcaggtcaggaagcaggagctgatgcagaggccatggaaggatgttacttactggcttgctcccctagcttgctcagcctgctttcttatagaacccaggactaccagcccagagatggcaccacccacaaggggccctcccctcttgatcactaattgagaaaacgccttataactggatctcatggaggcattttctcaactgaagctcctttctctgtgataactccagcttgtatcaagttgacacaaaaccagccagtacaccctgcctttcacagttccacagcaatgggtcacacagcctctgacatcatgagccaaagtgagtctttaacccttttaaattgtttcaccatagccagagaaaactgcctagtcaatcctcaatttttaatttcctgagattgtgtaaaatgttgtaattttaattacaatgtgcaattttaaaaatattctggctattcaaggcttgctcgtttaatctggattgtcaaattcactaggtgttaagctctttataatgcaccttggagttttatttatttatttatttatttatttatttatttatttatttacagctgagtcctttctgggtagcctaggctgacctgaaacttactaatctccaagccctaggattatagatgtgcactggcacacctggccttcttgaaccttctgtcaccggcaggatctgtacggatgtccctttctcactcccagtgtttgaaattggtgttcatgtgttgtcacacaatgctttggttgagtcatttctagccccatttctgtggactttctttcccttttcttcacgccttatatttctactggaggacagacaccataaattttgcctttagggcacttgatatttttaaatgtttatttattaaatgttatgtatgtgcatgcagcaccctcagaggtccagagtagtatcagatctcttggagctagaactgtggacagcgtgaggcgatgagaactgaaccctggttccctgcaacaactcagccatctctgcaactggggcttgagaattttgtctgttttgttttgttttgttttgtttttgttttgttttgtttttgaaacagggtctgtctgtgcagccctggccagcctggaactcattctgtagctcagaccagcctcaaactcaatgtgcctgcctctgcctcccaagtgctaggattgaaagtgtgtgcaaacatacccaaaagcttgagggtttagcatcatatttttattgatttatttttattgggaatctcacatcatgcacccaaccatgctcaccttccagtccttccatatctgttccttctccctgtgacctccccccaccaaaataataaaaaaaagaaagaggaggcggaagaggagaaggaggagaaatgggagaaaagaagaaacgattccattttgtgttgtctacatgatcactggagcatgcttaaactcccagtgtccagttccctgctgggaagctgagtcgttctccacctgcacccctgccagacgccatcaagtgtggatagccacacctcagcatccccaacatgattatttttagttctcctttgtggcttcctctctaggatgtcaatttggggagtgggagtgagggtggagggttgtcacagaagtcttttatgtccctctttttcaactgcatctgcagtcactgctccctcacccttcacagtcagagggagcatgaatccagggcttctacatggtttccagcaacagtacagaccacaaacatccacttagtctccagccacagaaccaaggacctctgcctggtctcccgtgcagtatggcctgcagacatcatcattgccctctgttgaatcacaggccactgacctgagtggtctccaggagaagcacagaccatggaggtcttctgaggaggtctaactcagcaaatggaccactcttcatctcaaaacttctgccaccaccgctcagagccagggtgatcttggggctgagtccatgcaggcttcaggttgctgcatgtcatcctaccaaccccactgggcaacgacctgccccctccattaacccgagccctctctcacatctgccacagctgtcacatctcttctgcacatacactgttctgctcttccatcttctccacctctccatcatatattcacttgttgtagtcacactggaagctgtggtgtgtcacacagtacacccttttactcaaacatgcaatgttcattgtaaggagttgttggtctgatttaaggcccctggccactgctacaccatactagaccctcggagagactcctctcagatagcctgtcattgcccagagccatggacatcctactgctctgattctacaagactgagcccctcgtgtatatcagcaactcatagatgttagggttggcaactccaaaccctgggtctgggtctaggtggtagctgagttggtcagcccagtgttacatcagggatgggggtgggggaacttgaaagttttatttctctagacactaactttacttttcttctttccttcctccttcctttcctcccttcttctctttctttttaaagacatggtctcactgtgtagccctggctggcctagaactagacatacagaccaggctagcctagaattagatatacagacaaggctggcctggaactctgagatccacctacttctgcctcttgagttctagaattaaagatttacactgccatgtccagttagaaaaactcatgagttttgaacctgtgtgtatgttgctcaaagtagttcgactattccttggctttctgttggctttatttgctatgggcagagcattgttgaatagaccatttctgagtcaagaggcttcttggatctgtaatcaatgctctacgaattatgaaaatttttttctaaatactggctcttagggacacaatattctaagtttgtctttgtttgttttgtgtttggaagctggtaactttccctgtggtcttcttttctagctttagagtttcctcacatgaatgctctagttggtattcaagttcattcttgagagaaccctctgcagatgtttgggacatctctggcacttcgtcctcctctactctgagcaagagctctgatgaaggaagaggcgggtgctccattgtgtgtggggggggggggggttgaggcaccactgttacaagccgcttgctgcccttatctgaggactgtctctgcaaagctagtggccattttccaagttgtttcaggctagaggacacgcttggtcctgatatgcaggcatagcatctgtggaaataaaaaatgatagcatttaccctaactttacacaataatgactgggggcccgccctggtgcacaaagcaaaagaaatttaaaaaaataaagattggtgaggggaaatagatgttttttcagaaggtatgattttatatgtagggaagaaaatctacagataatattttagaattaataaataaatcttcaagatgactggctgtaaagctaatatataaaaatcagctggccgtgctgctgcacagctttaatcccagcactccggaggcagaggtaagtggatttctgtgagttcaaggccagcctggtctacaatatacacaatagttgtttcttttctcgtggaatatacctataataccagtacttaggaggctgaagcaggaggactgctgagcatttgagaccagtttaggctgcacaatgagtgctaataacccagcttgaactacataggaaaatgctgtgctgacgagttctatgtcagcttgatacaaactgaagtcatgtgagaggaggaacctcaattaagaaaatgtaggctgggctgcagagatggctcagtggttaagagcgctgactgctcttccagaagtcctgagttcaattcccagcaaccacatggtggctcacaaccatgggatctgatgccctcttctggtgtgtctgaagacagtgacaatgtactcacatacacaaaataaatacatctttaaaatgaaaaaagaaaaagaaaatgtaggccagcctgtagggcatttttttaaactagtgattgaggggagagggcccagcccattgtgggtgtggcaatccctgggctggtggtcctggattctataagaaagcaagctgagcaagttatgaggatcaatccaataagcagcaccctctatggcctctgcatgctcctgctccaggtttctgccctgcttgagtttctgtcctgacttctttcgataatgaagtgatactgagcagaagccaataacccttttccttcctaggttgctttggccatagtgtttcatcacggcaacagaaatcctaaaacagcatgaaaaagggccagagaggtggctcagcagttatgacttgggatgactctctcagaggacccaggttcaagtcttagcactgttgttagagggctcacaaccaaagagcttgaactccagttctgctggtattcaatgccctcggcctccagggcacttgaactaacacgcacaagcccagacacagacacctacaagtacagacagttaataaaaacagagctggatgtggtggtgaatgcccttaatcacaggagtagggatgcagaggcaggcagatctctgggagtttcaaggccagcctagtctacacacagggttccaggataggcagggctacatagagagacactatctcaaaaaaaaaaaaaaaagtaataaaaacaaatctttttaaaggcacgaagaataacataagagattggcaatttttattttatttatttattttactttttaaggtaaagtcttattgtgcatccctggctggcctggaactcactatgttgaccagctagccttgaactcacaaagatgctcctgcttctgcctcctaaattctgggagtaaaggtggcggaggtgacttccagagccactttgtacagtctcaacagctgtccccagctttagggagagtgtgttctctgcccaaacctgtgtgtcgccaagatgagggactcacactgtcaacttgtgcccgtggctctcacagacaatcgttgaaggccctcaggctaacctttgggttcatgtgtggtcaggaagacactgaaatgtcacaannnnnnnnnnnnnnnnnnnnttgtcaaatttaacttcagtgacaaaagactctcacatgtccacagaaataggatggagggctggagagatggctccagaggtcctgagttcaattcccagcaaccatatggtgactcacaaacatctgtaatgaggtccggcgccctcttctggtgtgtctgaagagaacaatggtggtgtacgcatatgcataaaataaatgattgaatcttttaagaaaaaaaagaaagaaaaaaggaaggatggaagaaatcggatggtgaggacactgcagtcacagggttataaaggactgagcatggtcacttgtagtcacaggatggatggcacagataagcgctgcatttggacattggaaattttgtggtgctggaatgctggggggttgaataggcatggcccctgtagactcacgtgtttgaattcgtggccatagggagtgacacgataaagaggtgtggccttgctggaggaagtgcttcactgtgtagacaagctttgagattacatatgctcaaactatgcccagggtggcacacagtctccttctgttgcctgcagatctcagctccttctccagcaccatgtctgcctgtgtgcccatgcttcccaccatgatgataacagtgtcaacctccaaactgtaaactcaatcaaatgtttgcctttataagagttgccgtggtcgtgtcgtctcttcacagcagtaaaaccctaactaggatcgatgttctatattgagatagtaaattcacaagtgcatagacacttgtattttgtgtaccttaccatggaccagttgtgtcccaacagataatttatcttaaaaaatggtgcttaagtcctaaagaactgattggaaaacaacatttattgcctctactttaaagtgaagaaaaattcttttttgctgttattgtttttgttttttgctttttgtttttcaagacaaggtttctctctgtagccctggctgtcctggaactcactctgtagaccaggctggccttgaactcaaaaatccatgggcctctgccttccaagtgctaggatcaaaggcgtgtaccaccactgcccgggatgaagaaaaattctaagacgggagtgatagtgacagccattaggaggctggagacttggaagcaagaagtctggcattgacttcaaagactacatatgcaagaacatgtcaagacagccatggggcccaggaggactcaggaaccagaagccaggtttagttgttttcttttggtttttttttggggggggggggctgttattgtttgttttgttttgttgtttggttttggttttggttttgaacaaccagaatggaagcaagatcttgggtgaggtgacagaaaagctaggggtgaggctgggcacttacaaagaaaaagaagtgtcactcaagttagcgttgaaggctgaaatgacaagttccagcagccccattgtttctgcacctctctggggagggaagggttcctgcagtccacatcataacatcatagagaagcagacaggaaagcacagggccacacacacggtagctgtactacaactaactccatcccagagaccaagccgcactgtttttgaagatttatttatttttatgtacgtgtgctgtctgcatgtacacctgcatgccagcagagggcatcagatcacattacagatggttgtgagccatcatgtggttgctgggaatttaggacctctgggaaaacaaccagtatatccttaactgctaagccatctctccagccccaagccccacctctcaacagttccatacctcagcagagccactccagaatctaagattccagcacacatacccatcatccaaatcctagcaggctccatgctgaagagatgcccagtccccacccatcctccaggagggcagaaagctgacagacactgttgctcttgctgggccttgccttgcagagcaccagttgtcgtgcctcagggtcataggccaaccttatacgtactagcacagaccgctcaaactggagccagggaagcagaagaaaacagagacacaggaaatctctaaataaatattgctgtctttctcattggtattaaaaaaaaaaaaaaacaaaaaaacaaaaaacaaaacaaaaaaaaaaaaaaccccaaaggcttaacaaaatcaacttagaaaatcaacttgaagatgtcttctataaagtactataaaagaaaataagtaaattttttaaaattattattacaaattttgtcaagaaagccaaacatctagataatgatagccttagggaaaataagcagaaatcagtcacaggagaagagtgaggatcgtcagactggccctggaggagaggatgcagtagcccagcaaacaggcctgcctaggcatgacatcatgaactgtcttaacacgatgtggagagcttccaaagttccaaaagagcaggtcacaccaggggtcaagtgtagcagtggttctcactcccctgtcacatgggagcctgtgtccaggagctgccccgcactctggatctcagctccgtatccacagctccactgagcccacagagcagccggagagggagctacaccttggatggacaccacagcccagacactgcatataagatatgtctaaaggctttgttttaccataacctgagagatgaagccgcgtttgcaggaagatgggccattcttggtggactgagaaaaacctcacgtcagaaataattagctcggaggatgtggctgggttgtgtgccacacgttcgcactcacagtgtgatgctttaacttggacctctcctgctatttattacttttgggccattcaaacctcctgagagtgaccacactgggtgcatgctctctccaagttgacctgcactggctgggtcttgggaagggggagggagtacagttctgtagaattcctggtcatgagcgtgactttgaggaaagtaaaaaccttaaaatatagtaacttgacatcagcaacagacaggcaagactctctccctacagcagtatcccaggatgacctctgtgagactagaaaggctgagccccaaagtcctcatttggcatctgcagcagcaatgccacatggccccccagtgttttcagggaaggggtttggagggatgctgtactggctagttttgtgtcaacttgatttatcacagagaaaggagtttcagttgaggaaatgcctccatgagatccagctaataggcattttctcaattaatgatcaagggggaaaggccccttgtgggtggtgccatccctggggtggttgacttgggttctataagagagcaggctgagcaaaccaggaaaagcaagccagtaaggaacatccctccatggcctctgcatcagctcctgcttcctgccctgcttgagttccagtcctgacttccttggtgatgaacagcagtatggaagtgtaagctgaataaaccctttcctccccaacttgcttcttggtcatgatgtttgtgcaggaatagaaaccctgactaagacagatgccctcaaccctgccctgcaaagagcccagggcactggggcatgctctgtatgctctgtgctccccagccctgtcgccaccgtctgcttctgaaggcccgagattttccagccaggccagcaggctctgacatctgcagaactgagtgaatgaccttagctttgagttttctcttctccactgagtatctcctctcccctccttcttctttcatacctccagaagttgttgccaggttttgagcaccaactagaggtttgtacctgacctaaaggatcaaccggctctgtgtcctcagccactggtaatagtctaaaaagctggcacagttgtggggctgggaggaggaggaggcagagacacctgaggctgctctagggaaatctaggcacagccttgctgtgaactgccatcctggtacccacagctacccaatcccctcctgacagccttgcctctggccccttctccaagtagtgtacatcctatcagaccctcagacgacatcctgcagtctggagttgggggtcgaggctggaagcaagggcagaatcttgggggggcctctgggtaagtgagtgccaaccatcgtgtgaagacagctggccacagcaccaagaggtaaggggtgggggtggctgggggttgcaatgatgtgcttgttctccatgctctccctgaggaagacaggagtgagtcagagtgaagcaagtgtctatacataaacatcaggccttgatgtttgctctgaggcctgatccaggcatagtagaaagtactcacccactgctgagtgctttctacggaggaatcactgttttatgggagaaggcagcaagcagaagtcatgccacaatgtcaggaaggccctgccctgaaaagagacataaaatcccttagcagggctgctgcccccaggtcaccgtttgagagctaaaggaagggcctctgctgtgcacataacacatggcctgtctgaaggagaagctggggtgggcttccgggaaggcaaagcaggactctgcctctgagattagtgggactgagccaggagagagagcttggagagattgtatagcccagagtagacgttggaagacacatgcctctgctgcccctcctgtctttgctcacaggaggacagggacctgttttgggtgtcccaaagtcccctgcctctctttccacactttgtcccaatgtcatttctcagcagtgcctaggggtacctgtgctacaagtagttcacagaggtgtatgtattggtgcctgggctagttggtaatcagtacgcggtagcctccactagcagctgagccctaccacctcttatggcctcaggtagacaccgagtaccactgaaggccaacactcatgcaccaccacatgaggtgcctgcctgagagaggctgcatcttacctcacccataggcatccactcacggcagccctaggcataggctggacctgggcacttctgcccatctgctaggctgatatctgcctggcctccacaccaggaagctgaacctctaaggtcaacatgttagctgcccatgatgggccagaggggcatgtgggccactgtgccaaagacatggttctatgtaggggaccagatgcaggcctgtgatgagggcagctcagctcacagcttcagaaaagcatgtgttaagatctggactgaccacatgctgaagagttatcccaggttgtacataccgcactgcttcgaagctctggccaattcctctgaggcctagagcaatcctggaggaggtgttttcctgtgtgtgctgtgtgtcttccataagcatcaggtgaagtgcacatgctggtccagagagctttcccgatgctcacagtccaatggagactctatagctgcagggctggtgtgaaaccatgaagggtgcaaaggagagacaggacaggtatatgcacacacatcttccaagagcagccgctttgtatggatgtgtctgtgttgtaatttaatccattcttaggtgtgcaggtggtcctggagtcagatcccagagttgtctcacgagtgcaaagctgtccttagtctccagctacaacatcctgggagaatggaagagttcttgagctcttgatgtgacacacacaggaggatggctgaccagtgacactagccctccacccccacctggcagagggtggcatccagccagggcagcagcaagccactgggaaggagagacagtgaatcaacagagaggaatgcacagcccttgggtgaggtccggaaggctagtccccccctgggtgccaaggccgagctggccggaagggcagcggatatcctgaagaatgtggaggagtttccacatattgtcgtccacatgggaacccatggccaaggggaaacagacacctcaggatgcagggggcactgaagccatctgggcaggcagcccggtggaggccagcatgatctccttgagggacatggaggtcatggaggccagaggttatgagggcagggagttgtgactattggggatccccacacttaagtcatcctgtggcttcatggacttgaacttttacagtgtctgttccttgatgaaacccatgatgcccaactgtacccttgtcctagatttcccaaagatctgaggggtcctgctagggtcatagacactcctgttcctgtactgtgcacaaggtgctggaatagagtagccaaattgggaggactcagctcatgaggagaaggtcactactgtgctggtgctgagtcctactctctggcccaaccacaagctacctgaacactcttggtctccccctgatcagagagatcacagaggataaagaaggggaaagtccagcatattgtctacagggcaagggtcagagaaaagaaaagcaggggacaccttgaaaaaaaaaaaaaaaaaaacaggaaacggataggaaagttctgaccagacaaaagggctgatgaacatccctagccacatagccgtatagagttacagcttaagagatgcagacaggcctgggtagaggtggctgcatggcaacctggtctctcaggatcttcggacaggagaggtcactgtggacatgcaaggcttagccagagctgctgagatcagctgagcccccctctccccagggctacgtaattcctcatcgatgaccctcacaggacctggtaaagcagagactctggcttcccagtgcgcccaggatttctcactacccaaacagtagctgccagttgtggtatctgagaaactgaaccaactcaggctccaagggaggtgagcaccttgcctcagggtgaagttctgcttggggtggtgacaacaaatggcacaatctgccacctatctggataggatgtgtcctatggtcagatccatggccaggctgggacctaccccagagcattagatgtctcatagtcatagatggccaactgtgctccccactaccagccctaaggagaagcccaagaagacagaccttgtgagtcccctctgtcaacaagccaaaagcatgccactgtcccaggacacgtgggagacatgacacatgttaaggtacaggacaagaatgtccccagtcctgctccttttagggtaacccaaactgattcaaacctgaagaagctgcagaatatgaagaagggttactagcagctgcccatctagcatctacttcctggccccctgggagggcgtggccaagcgtcaggctacactgctacagatgggtaccttggttaggactgtggacatgctacccactagcaactctgtcttagcgggtggtatttgtagaccaggccagacctctataccatgcacagcatacctcactctctgacctctacctccagaccccctgtgagggtgacatgttccctatgacaataatagagaccctctgaggctgacaaggcacctggacttcttgagtaccagtgcttataaaccattatgacagactgcaaaaggtgcctgtattagtctttttattgatgggaccaaatacctgacaagtgcaacttaaggagagaaaggctcattttagctcacagacagagggtacagttcattatgccagcaaagacatgacaggcagagtatggggagaacggccaacgcatccacaatcaggaagcagagaggtgggcgctggtgctcaggctcactcttttttccctcagtccaggacctctgctcatggggcgatgccacacacagtcaggatgagtctcccattgcagttagcctagtctaaaaactatctcatagacatgcctagaggtttgtaccctagtgatgcatgatcgcgagaaggtgactgtatcagtcatcacagtgcccaacgcctccttgctcccctgctggggcctgagatgcctatggacagacagacaagcacctcctacattctggccacacagctaggaaggctgcctcttccagggccttgatccctctggctgctctgggtcatagtccttgctgatcagtgctacccctggccataatgtctgccattctctctccattatagcccgacaggattggtgtggactggagtggaagggatctccatttgctgtgctgggccagccttatgcatcctttctgtaagcagccaatgtgttctgttgggtgtgcctgaactctctccgacctggagggcagaacacaggctttctctaggctacagcttctctcagactactgtatcaccaaactaggtgagagcagctcctcagaccctgcccagctcacacctctacaccacaccctgcccagctcacacctctacaccacaccctgcccagctcacacctctacaccacaccctgcccagctcacacctctacaccacacccttccgctccacatgcacttaggaagcaccaggcaagctcatctgaatgccagattccctcaggcagatctgaagagactgggcaatgtcagccctgccctggccggcacagaaccgcagacccgggcagtgtagacccgctgctggtgcacaagtaggaaagcatccatgcttgcctaaccctgaaaccgtctccttgctgccaagtgtcccagaaagcaactggccaagtgggctctgtaggatgatctgtttgacccttcttccttggctggattaccatcaagttggccccccaaggggcagggcaaaatccacagaatttaaggaagaggtccctgctgcctgcacaacaccctcaaccctcctgatgtgaggcactctcttggctgtgtgctctgaacaggagccctagtaggccaggtatcttccctgaagggcctaggaagctggtgactggtggctgcagcctgtggcttacacacagccatcctcagtgtccccggcacctccttctgcaatggcagggtgaaggagatagggggttcactggcacaggaataggatgacacaggctggtgtggcaagccatcatccttcagggccagtgtcttaccccaacagggtttctttgacagatggggcacaacattgtctgtggataatggagactggagagccatgaggcctgaacctcctggtataacaagaacggggcaagcccttgagcaaagcacagcagctctccacttgtgaggaggagcttgtctatacgggtgtagtatggaggagcagggctgtaaccacacacacgcacacacacccacctccttaccttcttcacaggctagttgtatgtcaacttgacacagactagagtcatctgagaagagggagtcccaattgagaaatgattccataagactaggctgtaggcaagcctgtagaacattttcttaattagcgattgataggggtgacacccctgaggtcaggagttctataaaaaagaagctgagcgagccaataagcagcacctctccatggcctctacatccactcctgcctccaggttcctgccctgtttgagttcctatcctggtttcctctgatggtgatgacactgctgtagtgtgagccagataagcctttcctccccaagtcgctttggtcatggtgcttcatcagagcaatagtgaccttaactaaggcacctctccatacgctgcaactaaagctgtctctgcccacttggctgcagatgcctcctgctcagtgaaggtgcacccagccctgtgcagaaagcctgaccacttctgccactcatgggacctgggcaggagacacagggagagaccagcatcacaggatcccacaccacaggtggccgcaaccctccccaggaaggcaggtacttgaggctccttactcaggactcttggggaaaggagtcagagtctaagcctgggacacacagacatgaggcagcagcttttaccctagatcatggtaggtctttcctgaaggcagccgttgaatttctccctcccctccattacttcccactctgtgcacctacccaaggtcctctgtggagcattgtttgtttggcctgtgtttctgaattctggagttcataaagctggtgacactcttatgtaaacagagctgacctttcactacacaggtgactcatggctgggactttttgcagatgcctgtggccaccagggaagttgctatgtccaaggtccctgccagggccttccatgtaatatgtgacagcatgctctagggacttgcacagagccttgctgtcttgatgcaaacgtagatctgtttgctggacaacagtaaggtgcaccacagggcagctgaagtgagtgttgagaggggtcctgggtcattacgatatatgcctgcagccagcactacacctcctgctcgtccacagatcatccacagtaaggggctgcgaatgaagtaccagtggggaaccactgaccagggagaggctttccacctgaaatccagaagacgcagagggggctgtcactgatggcctgtgaacaacaaccatagcagacatcacagtgctgggcctgggctgctataacaaacttctgggcagtactctagctcaccccttagctctgtagcccagggcccaaggtcagcttctcagcagcacagtccctatgtcccagggatgacctagaagacagctgaggagcctctttcttcttgcctgttgaccttgcctcggtgggcacccatgttccttactcccaggttcctcctccaagtatcactccatgtacctgtccccgctctggacagtcaaaggcctcgtgtttgctccgatgaaggcctcgtgcaataccaagccaagcacatttcttggtgagcacaagaaatgatcacatggcaaaaactccagggcagcccgctcttccccagtaacctgctcttgaagaagctaatgggttccatgggaactacaccagtcccttccgtagctggttctctcacatctgactgcctccagcaggctctcctctcaagcccagaactttagcattgccacattagggaccaagcttccagctaatagatctttgggagcgtagacgtcatatgtagctttctgccaaaatcaggcgtcaaagcaataagagccttttccagaggcagagaggctagcgggctatggtgtagtgtggtgtagttgctattcctggttgtcaacttgactatatctggaatgaactacaatccagaattggaaggctcaccagtgatcctaatctgaaggctgggagatagaagttttctgacctggatcttggcatggagatcttgagacatagtggctatgaattccagattaagaaagggagatctctgagttcaaggtcatctggggttaaaggtgtggtggcacacacctttaatctgggtacaccttctgctggagaccttcataaggacattggaagaagaaagatttactctctccttttcctgcttgccttgtgggactgagcaactgctcgatccttggacttccattcacagctgctgctgaccttgttgggagttggactgcagactgtaagtcatcaacaggttccttattagagactacccataagttctgtgactctagagaaccctgactaatacatgtggtgaggtgtacattgatcaaacttggttgatcaataatctccagtgggtgcaggacatggtggtgcacggctttaatcccagcactttggaggcagaagcagatgggtccccatgggtttcaggccagcgtggtctacagagaaaattccaagccagcttgagctacacagtgagaccctgtctgaaaggaaaaaaaaaaaaaaaaaaaaaaaaaaaaagaaaaacaaagggaaaggaaaaaccccacccagtgggtatcaaagaagcagccttggatgtttaagtacctgctcctgcagacgctctcgtgggaatgacaagcttagatcctgagtgtgccatcctagccctaactccacatgaaggaactggccttgaagttaccttacctcagccaagcatggtgacaaataaatgtgaatctgaaaccagtctatgacctgagactctgtctcaaaattttccagctggacattttagcacatgtctgtaatcttagctctggggagtttagagacaagatcaggagctcagggtcagcactaggtaaatatgaagttcaaggccagcctggtctacatgagacctgtctcaataaacaaaccaaaagtaacttttcctttttgtagtgctgggaatcaaacccagggtctcatacctgcttgcaaacactgagctacatcccaggccttcagagtaatttctcttaagtgctgtgacagtatgcttgtctctagtgcctctagtcttggtcctcatcaggggatgacagggctcaattttaaaagagagagaggaaagtcctttgtcacttacagccattcctggctagtgtagaacagaaattaagttcatagttggcattagtaaactgtgttcccaggcatgctggttttattttactgcatgttgttgtgtctttccttgtttttgactttgtttgtcaattgtgacatttcagtgtcttcctgaccacacatgaacccaaaggttagcctgagggccttcaacgattgtctgtgagagccacgggcacaagttgacagtgtgagtccctcatcttggcgacacacaggtttgggcagagaacacactctccctaaagctggggacagctgttgagactgtacaaagtggctctggaagtcacctccgggagaagcaatgttctcatgaactgagtattttcagtctctactctgatgccatccaaacacatttagtaatctctgaaagactgtgttccatttgttgagatttttctcccaagaacttttttttccagtgcttttacatgcactccactgttcttgttttctgctcattgcagagctgtggctatctcctctgtgacccactcatgcccactggcttcagggaaagttccctagctcattggagtacctccatgaagaggtattatctacaaagttaggctttttcctttttgtccagtcctatcttctactgtttttcttatctcgcaacattggtgaagatctcagcagggctgacggtgctgtctcttcactcctgattaggaaaaaatattttttggaggcctggcgatggcaaatgctctgggcttggtgttggtgtcgagtaacaggtactcagctctctgccccttgcgagtcactgttgtcaatttataatcttcctggaagatgtcagtcatgtcacacccagagggacagggtcactgagcttgttggccctgcttcaggatctgtagcacttcacgggtcctcttttctcgttcttgctcttgcttacctctcctctttttttttttaatccaaagaaggatcatttaaacaccttgtttgtttgtttgtttgtttgagacagggtttctctgtatagctctggctgtcctggaactcactttgtagaccagactggcctcgaactcagaaatccacctgcctctgccttccgagtgctggggattaaaggtgtggcgcaccactgcccggcttttttttttccccctattttctgcacattccagttttggcttttatttaacattgactattcaaaactctggaactaccacatgtttataatccagaagatgtacttttacattagtgtctggtaaagagagatttaaaatgtgtattttaacacagcattgagcagagagcattttatgtaatgtgctggggcttacctacgtacttccaatgacctctcaattcccagccactttaaactcagctagaaaccaaccaagagaagggaagaactgagtgaagcagatgctgcctagagatctgtttctcttgcaaggcgttctttccgtggccagaccacccagtgcaaagtagcaacttacatgatgtcagcatacacatttagaaacaccttcccttttacaaaataatttatgccaacatgacataagatagccccccgtactatgaacacaaaggataatactaaattatctcactgtagtgttgaaaacgcacaatttaaaatcccttaacagcagacctgtggttctggctctctggtccagaagttgaccattccaagataaaggtataaaagcttaaaatgtgcaatattaaacccagccttcttccttttcctatacagtaaggcaagaatgcagcctataacacaaaatgtttacaaaaagaaaagcaggtgagcgcgttgattacacaagaacagttaagaaaatcagcaggtatgccacagtgcaaagatggaacagaatccgctagtgtttcaattaaacgtcttaacaggttcttcttaccctctttcttgcctcttgcccccttattcccaattcccttcgcccccaccccccgccacgtggccatggccggtccccatttctctcctctctcctctctgcctttctctgcctctgctaccctcttaactcccctccccatgctctggataaactctattctatattaaaaaccaaaccaaaacaaaccaaaacaaaaaccacatcataagagatggcctatactctgtgtgttagtttttttctgtcagaatttcaaaccaaacctaaggctaaggctcaaacaaaagtgctccatcactgactgccagcccagtccctgtcctgttcatttctgttcttgcctttatggtctcctcactctgctttcttgggggttggcccaaacagaacacctaaggcttcagtggtaagcctccctcactttgtgattggcactcaccagtttccctgaaaccctgtcttcacagcacaccagcagctatgacgtatcatctttcattacagttcaggctctaatcatttgtgactgtccatcatagctgccctttcaagaaaggcttcttgtttgtttgtgttttgagtcagggtttctctgtgtagccctagctgtcctggaacttgctctgtagaccaggctggccttgaactcacagagatttatctgttcctctgcctcccagcactgggattacaagtgtgtgccacctgccctaaggcttcactttttttttttggtttttttttttttttttttggttttttgagacagggtttctctgtatagccctggctgtcctggagctcactttgtagaccaggctggcctcaaactcagaaatctgcctgcctctgcctcccgagtgctgggattaaagacgcgtgccaccacgcccggctttttacttttttaatttcaagtcttgacagtagtttcttttcaacagattagtttaaaagctctacttattacaataactgatggaaattggaatttgtgtctcaatttatgctcttttatttgtttatttgtttgtttttgagacgaggtctcactatgtagccttggatggcctagaattcactatgtagaccacgttggcctcaaactcaagagttcaaactcacagcctgcctctgctaggatagaagagtgtactaccacacccagccttcaattcatgccttttgattacttttcacccttatggctaagagcgattataatattttctgttctcctttccttcttcatgatagtcgtttagcttttacactaattctgatttccctgttagtctgcaattcataaattgtgtttctgttctttgggaactacaccagaaatgctctggtttacttgaactatatttaaagtctggctgcagacatggctcacttgttagagggcttgcctagcatgcatgaggccctgggtttaatcaccaacagtgcataaaccaggcatggggctacaagcctgtaatcccagcatttaggagtaggaggcaagatgatcataaattcaagatcaccctctacatactggaggttaccttgggctgcccgagaccctgtctcaaaaacttaaaataaggcccggtgtggcacacacctttgatcacagcactgggaggccgagtcaggcagatctgtgagttcatggcttgcctggttcacatagtgagacccatttcaaagaattaaaataaagtcagtactttcaactatagcacgattcagctttcaacttaactgatgttattttctagcatttaaatgctctgattgtgtgtgtgtgtgtgtgtgtgtgtgtgtgtgacatctacaaatcagacatcaccatacctaattttatgcatttggtgtcatttagagctagtggttctctggggactgcactgctgtcctctaagcagcaaatgtcttcctgtgtctcctgcttgaactaggctgactttccctcagtctctgcttgctgtcctagaagactatatacacagcgccttgaaaagaccctctgttcctgccttcatttgcccttcagatcaaggtgtcgccacctctgtgggcaggctggcagaagctgtagagtttttgtttttatatttttatatttttgtttcttttgtgtgcatgtgccctgatgaccaggtggaaactgtagaacaacctgaataaatcagttctctccttccacctgtgtgtcccagacacagagcaaaggtctcttccacctgtgtgtcccagacacagagcaaaggtctcttccacctgtgtgtcccagacacagagcaaaggtctcttccacctgtatgtcccggacacagagcaaaggtctccagctgtgcaccaggtgccattacttaccgagccatgcccttggtccaagtttgttttcatttttgtttttaattcatcatataagtgtatttttcatttttgagatagggtctcactctgtagaccaggctggctttgagctcacagagatctgccttcctctgcctcaagagtgctaggactaaaggtgtgtgccaccatgcctagaatatgtatttcttttttttttttcttttgtttttttgagacaaggtttctctgtgtagccctggctgtcctgaagctcactctgtagaccaggctggcctcgaactcagaaatcctcctgcctctgcctcccgagtgctggcattaaaggcgtgcgccaccactgcccagctaggatatgtatttctaataccacagagtatctgtttattttcctggcaaaatatacatccataaagtttccagccaggcatggtggcacacactgtttgtcccagcactccagggacagaggcaagtggatctctatgagttggaggccagcctggtctacataaagagttccagggtggccaaagctacatagatgagaccctgtttcaaaaggtcgacatcatcatcatcatcgagatttgggggctggagagatagctcagaggttaacagcattgtctgctctttgaaaggtcctaagttcaattcccagaaaccatatggtgtctcacaaccatctataatgacatctggtgccctcttctggctgcaggcatacatgcaggtagaactctgtatacatagtaaataaaaaaataaataataataaagactcccattctaaccacttgtaggtatctgattcaatggcatgaaacaaccaacacagttcactactccatcatcttagacagaaacaaagtagccagtgagaagttgtgctgctcagtgctatggattctgctatccaaggatcttgcataagtgaagccatgttgtatttgcccttgtatgtattggtcccaagactccttgcagatgccataatctgcagtcactagagacccttgtataaatggtagtctgacacatcgtatctctagatgacttacagagcagaaacactatactatgttattaggaaatcatggtggtacacatagatgaccacaactatgcagctcagtagatatgggtagagcccacacaatattcatcagagggcttgatgcacctgttttgatttctgcagccctctgaaatttttaaagagcactttcagtatgtatttggttgaacctacaatgcagggcctgtggatgtggggagattataattgtatacagcacatttccaggattcgtccacatcctgtcatatgacaagacctccttccttggcatatttaggccattttctgtgtttattgctgttgatgaacacttgtgtcagctccctcttatggctactgtgggtactgctgctgttaataagagttgtacacatgtctgcttttgattccctggggcacacactgggaccctttaataggtaggtcccacaattctgtgtttaccttcttgaagaatgatcatacttcgtccagtgaccccactgcctgttccctggtttgtttgtttgtttgatatatgtgagtacactgtagctgccttcagccgcaccagaagagggcatcagatcccattacagatggttgtgagccaccatgtggttgctgggaattgaactcaagacctctggaagagcagtcagtgcttttaaccgctgagccatctctctagccctgttccctggttcttaaacactgtctttgtttattttgcagcccagactggtctccaactcatatcaatcctcttacctcagcttcccaaagctggcaatacaggtataggccaccacatgatgttgagtgtatttttgtgtatgtggccatttgtatgtcttccttgggcaaatatcctcttaggccctttgtcctttttaaattgggcactttcttctttcactgttgaagttccttttatattctggatgtcactgctggatcagatgttcaatctgcaagttgcaatctgcactgtgtgcattgtgtgtgtgtgtgtgtgtgtgtgagagagagagagagagagagagagagagagagagagagaaactgtgtgtacatgtgtcagtgtgtgtgcgtgtgtgtgtgtgagagagagagactgtgtgtacatgtgtcagtgtgtgtgcatgtatgcatatgatgtgtgtgtgtgtgtgtgagagagagagagagactgtgtgtacatgtgtcagtgtgtgtgcatgtatgcatatgatgtgtgtgtgtgtgagagagagagaaagagagagagagactgtgtgtacatgtgtcagtgtgtgtacatgtatgcatatgatgtgtgtgtgagagagagagactgtgtgtacatgtgtcagtgtgtgtacatgtatgcatatgatgtgtgtgtgtgagagagagagactgtgtgtacatgtgtcagtgtgtgtacatgtatgcatatgatgtgtgtgtgtgtgagagagagagagaaactgtgtatacatgtgtcagtgtgtgtgcatgtatgcatatgatgtgtgtgtgtgtgagagagagagactgtgtgtacatgtgtcagtgtgtgtacatgtatgcatatgatgtgtgtgtgtgtgtgtgtgtgtgtgaatatgggcatgagtgtttgtgaatgagagtgcacacgtgcctgtgtctgggaggaggctgagatgagtctgggtcccacacatcctggctttgatcttgctctgtaacaaaatgaccttgaagttggaaccttcctgtttctacctcagagtgctagaactacaggggtgagctagccacagtattgaggtcctaacccagcactctctgtgtgctgggccatgtctccagctctctctctccttctctagaaggtagcttttgatttgtaagagcttctgattttaatgaaaggtggtttgtctttcactctgttgtctttgcttgttgtccggtcaggggcatgaagtctccctgtttccttctgaggactttatcatttccacagccttgatttggcctcatgtttactaaagatcactgaagtcttgtaaggaatcctacacacagacatcctgtgtctgccctcctcacctgccccctttgccccctcactgatatacatggtatccaccactttgtccccattgtccctctcctagcttgtacatccctctcacacagaatttttgatttttgataacttccttgttgcttggtgcagtaaaatgctcctgtctcattcattttctgtattttgactccacaagctggaagcatccattcctcctcaaaggtctgactcctcctcacaacagacacttgaaagctggcaggcggagaggctttcagacacaggagtttgtcttgtttccaggcctcagcagtgggcagagtggtgagagacatctttgtttaaaatgtagtctagggctggagaagtaactctgtctgatagtgtgcttgcctagcatagcatgagaccctggacgcccagaactacagaccccagacttggtggtgctcacctgtaatcccagaaccagaaagacaaagacaggaggtaagaaattcaaagtaggggctagcctgggctacatggtacctgtctccaaagttttaaaaataatcaggatggtggtacaattctttaatcccagcacccaggagagagagtcaagtagatctctctgaattcaaggccagcctgattcatatagtgagttccataccagtcagagctacacagcgagagatcctgtctcaaaagacccaaattacttaaataaataaaaacagtgtacattaattcaaaatttctattcagatttggacatttttaataacatccttagtttaattcatattctcttcctcttagctccaaaccccagtgcccctaccatcaacaaaattatccatagtcaaggctgtagaaatgtcgaggcagctaaaggtattggcttctctggccaggacctgggcttgattctcggtatccacatggcggtacacaatcatctgtaactgcagtctcagggcacctgacacctgcatctggcacgaatgtgatgcccagacacacatgcaggcaaagcatctatatacatacaataaatgaatttaaatccctaatactgaggaaaaataggattaaggaagatggcacagtgggcagatgcttacaggcaagccaggcaaccttgacaccgcagcacccacaaaaaagagcacaaactcccataaactgccctctgacatccacactagttctatggcatgtgtacttgtatgtgtactctcgctctctgtctgtctgtctgtctgtctgtctgtctgtttgtttgcctctctcatacacacacacacacacacacacacacaatcattaagaagtttcagcatggtgggatcaataaataccatcaccaacactgatacttgtgggtactgtgtgtgtgtgtgtgtgtatatgtgtgtgtatgtgtgtgtgtgtgtatatgtgtgtgtgtgtgtgtgtgtgtgtgtatatgtgtgtgtatgtgtgtgtgtgtgtatgtgtgtgtgtgtgtgtgtgtatgtgtgtgtgtgtgtgtgtatgtgtgtgtatgtgtgtgtgtgtgtgtgtgtatatgtgtgtgtgtgtgtgtgtgtgtgtgtatatgtgtgtgtgtgtgtgtgtgtatgtgtgtgtgtgtgtgtgtgtgtatatgtgtgtgtgtgtgtgtgtgtgtgtgtgtatatgtgtgtgtgtgtgtgtgtgtgtatatgtgtgtgtgtgtgtgtgtgtgtgtgtatatgtgtgtgtgtgtgtgtgtgtgtgtgtatgtgtgtgtgtgtgtgtgtgtatatgtgtgtgtatgtgtgtgtgtgtgtgtgtgtgtgtgtgtatatgtgtgtgtgtgtgtgtgtgtgtgtgtgtgtgtgagatgggaggagggttacactgtaccacagtagcacctgaagtgctgatcctcacttccaccctgagacagggtctctctgttgttcatcagggaagctgagccagcggggacccccgtgggaatactggcgagcacagcctagagtgacatgaattttagggattcatatctggtcctctcaagtacttatccacggagccatctcttcagccttcttctgggtgtcattttatgattaatatgtgtgtgctgtatgtatgtggacacctgtgccacagtgggaagtcacaggccaactttgtggagttggttttctccttgtacctaggtttcagggatcaaattcaatttgccatgattgtacagaagatgtttttgcccactgtgcaatctcacccacatggcatttaaaagcttttcatctatcgcttactgccttagcagtgaattgtttctgacctctcaaaataatctttcttcatttgctggtcattttcttcaggtctttgggggattgcttttaaagtttaattttgtttgtaaccaaatacaatatctgtactgttccttaagtgtatctgtaaaacaagatgtgcttcaggccccaggattcgggccttggtgggaacaaaggttgataccaattgacaaagtagacaaccttgagtgtgtgagagggacagtggggcagccttacctgctggtattacagatggccagatgggacagaaggatcatctttggcctcttcatcatgccataccacaagtatagagttgggacctgttcccgtctaagccccatctgtctaccaagggacctcaggcccactgggttcccttaggcactcttcatgagagagggcttgcccttccctggtagacccagaagaagccaggaaagattctgggatatatgcaccccagcagtccctggtcatgtatctgcagctctgtgcccaagttggggctggtcgctgcctctctgtaaacagtaccctcaaggcccaacagcaagccaaaggcatgctcaggcacttcagtgtacgagtcattcatgcaggtatcatcagccgctgccaggtgggtcctgaatgcccatccccccaagtgggaaacaccctggcgggttggcaggaaccggtgtgtccctggatggtggtccctggatggtggtgggcatgtgtgctctgagtttctgttcgtgggagcagtggccacaggtcatcctccatccccacctagacacctgcacacaggctgcatgtcagggaagtcactacagcctgggccagtatttttacagaatttcagctaggccagcatgaccaaggtagtggcccccatggccactggtttggggaatttactctggcccttgaggggcttctgggatgaaccaagagaacgcggcgcaaagtcttcaggttctcagggcctggaggacctccagcacacacaactgttgactatgtatactggagcactcttcccacctgtgaaggagggaagatgaggcgcatcctctggttcccagatgtaaggggcctgatcctgctggtctggaattggcttcttggatgtgaattctccctagcgagcagtaaggaagctccaagcaatggtatttgtcttggaccctggacttgaaaaccttctatgggagcagtagtctgagcccctcaggtggccattaccaggtttcctacccacctccctggctcagcaggacagagctcagccccacttcccagacttgggcagactagctcacctggctggtgagggaccagccagaaccggttcctctcctccagcagcttgttttgtgtttctggacttggcagtctcctatagtgctgaaagtattcgggaggagaagcgctcttcaggctcctggagctcctgcccctgagagctgggatgcaaactggcctgctagcttcactgccccacagggacaggctccctccacggcactttggtgcagtgaggaagtgtgctcccaacctcttccttcagcgttgagctccaggggcgacaggaaccacgtctgtccgctgcctctctttgtctgagctctgcccggcaagtgttttaaagaccccaggatgtccgggacgcctggggaggcattttaatgagcttttcagaacctccgctgctgctttttcttgagaaaacaggaagttgggtagctgggaggaaacccctactggatcctgagccgcgtgcaggcaacagcctgctgtctggatctgcccggtgatcttcagacttgaagatgtccctcagcacctatgcatggacaatgtgtagagacgcagaacaagcccacagcctgcctgagcagaaagttatatttaaacctaaggacaggttctgaggggtaacttgggggcaatgttgcaacccgatcagggaccagcaaatacccagccagaaggggcagcagctggctatcctgggacagagaataagcatggcgcaagcgcaaggtggagagcagtgtgagggctttggttacagatgctgtgaggggctctggaggaccggcttggaaggaccattctcgaaagtgagtcagagcatggagaagacgctcataggctgcttcggtcctcgtccaactgcccagctgtggctctcttcagccccatccctgatcccatgcccagccttgggcaccccataggagctcatgctactaccctggtcagggagcggagctcactacggagccacactagaaaactgagatcaagacccttgctggtggaagaaacagcctttaaaagtattcatcggtgttcacagggactcacaggtcaatggtaggagtccagtgagtaggatcaaagtcactgagaagcagccgtgaagatgctgggcatagggggcaagcagaccttgctttttaacaagggcatcttctatagatggctctgatgttcaggctacagtccagaggcctgtatgcaagccaacttctggatctagaatcctaagagactctcagggcttgaaggatcaaggctgtgtctcagtatgtgtactggggcattgttcccagttcagcacaggccttgggccacatcctcactgcccttttcaggaacccttcagctgcagccctcccagccgacccgggatcttgaccagagcgggcagcttggaatgccatggacatcaaacacgtggaccagctaccctgataccctgccccagtggccagtgaagagcctgggacagtgtctcaaggtgaagcaaaagagactgtgtaggggctgtcttcaaaatggctgcaaacccctgctgtgaccacacacacacacacacacacacacacacacacacacacacacggcttcagccatggagaactgtacatataaatcttgcctaagcagattcccagagcccccacccagcctggcttctggaagtatgtgtcttccatgttgaacctggcccacaagaccccagctcagtccttggattggcgagagctggccacctccctggagagtttccactaacacttcttctcttcttcttccttcagctattttgatgctattctcaaaggggaaaagcctcttttgacaggcaatattcccagagcaatatgccctggctggtgcaggaggtccaaggaggagctgagcagttacgatggtagaaatatgctgtgttaccacactgcaatcgctaggagtgtcggtatgggagggagagtcctgggtcagaggagacccaacctgaagcccgagggagctggagcatgagagagcgtctcccggggaagtcacagccttggaagctgagtgacagtgggggtagaagctgaagctgtccattagcaatgtctctcagagggacattcccagtactgtccaccatgagaaaatattttatcaaagaaatttgagttttaaaaaataagctaaacatttagcctgaaatggcttggcgtaatatctatttttactatccctttggtcccctgacccatgattagggaatggactgtggccctgtgagggtatgttttgaaagagtgacatcaagccttcggaagtgtgtgtcccaagaggccagtgaccctaccacctcagggagctttcaggcagagccagcagagggctttccccgccactgaaaggagccacagtcggtgaaacaggctttaagggtccaaccaggcactttgaacaagagggggtcctcaatggagatgccagggagactatgttccctgccccagcctccacacatgggcacagactcctgccagctctaactgtaccctgtaggggacctgaggtccttttcatcagcgcctacgctaagaaaagactcaggaataaagaagaagcagagccaagctaggagtctcatcaacccggggtgcaggagaaacctaaccacagcagtgagggtcctagagagtgtaggacatagattgggcttcacgaaagttaggacctggacctcccccaggctcggggtgcagatgaagcaatggcttcagcactttttaaagccctgggtctcagagaccaacctaagttctttccaggtagcccccaggagactagacctgggctctgctggggaaagacctggcttctggtggcacagagtaggccccagccactttaggaaagctcttggcttggcactgttgggcccatgtggcagatattcgtctccctttcactgaagaaactgttcctgtgtcccattgccaccccaaaacctcagccttcacggcatggggcaggccttcctgaatcttagttctgtcccgacaatgtcatgagcagtccatagagactactcatgttttcaacaaagctacctggaggcctcctccatggcctaccctactattcccctgaaggacctctcatgagttgtctaggccgagggatccttcgagcacatctgggagggccggttgggacaagtgggccaccctgacaacagtaggcatacatgctatgctacccatgacggagacagttataacgtcagcctcagaagtggagaaatggggaagagaaacaaatcagagctaggagggttctttctgacccggtgacctttccaggactcacccatggtcactcagaaccattatactgcgtgctaccatcctcaagctgaggtaagagtcagtgggcacttggaagacagagccaggcagatctcttaagttcaagactaacctgatctacatagcgagttccaggacagccaagactataaagagagatcctgtctcaagatgacaacaagattcagtaggcagggtaggagagacagttcagaggctaagagcactggttgctcttctagaggacctaggttcagtacctagtaccacccttatggtgactcaaaaccatctgtaactccaattccatggaacctcctctggtctctgtgggcaccaggcacatgtgatacaggtacacgtgcaggcaaaacatccattctcataaaatttaaaacaaaaatgaaaagagggcaggcatcaagtagaagaccctatcagtgccccaaataatgtccactagcaagaaatgtcaaaagccagctcctaagtccccaccctccctgtgctctagacactaggaagggaagggagtttgggacctctcagagcctctgaccaggaagatctgccctccacaggggctgagcacagtctttccctcatccccagtgaagccaaactgctgagatcccagaagccaagagagcttgctcaacacagaaggcccattgccctcattgggtggctgagcctagaattcaggcgctttcactctgtgatgaagaaaggaaggaacccttgagactgaaaataaagaagtgagttgggggggggataggaagaaaggcctgggggagtgctgagggtgacaaggccaggcctgcagtgccactggagcacatcctgacctggatggacacctgacacaggcagacacagactgcttctacctgcacagggccccgagtctacccagaaaagacacagcccactgacaggtacatctggggtctctagaaccctcccaagccagttctgcccaggaaatgtccatggccaccttaaggaagcaggacagcctctctaggactccgggatatgagtttgtaacaaggcaaaggagaggcccctgttggtcacatgtcctctacgctgacaatctctatactgctagtctcacacctactcagcttgggcagtgggggagccctggagtggtccaagtggttgcctttggtcgagcccctgtgaatcagtatgctgcttctgatagtttgatgccaccaccccctcacaatcctcagccattcttggtgggtctctctctctctctctggtcccctacttcaagtctgagacccctgcccgcttaactgcctggcaagggattatgtggggtctaccannnnnnnnnnnnnnnnnnnnnnnnnnnnnnnnnnnnnnnnnnnnnnnnnnnnnnnnnnnnnnnnnnnnnnnnnnnnnnnnnnnnnnnnnnnnnnnnnnnnnnnnnnnnnnnnnnnnnnnnnnnnnnnnnnnnnnnnnnnnnnnnnnnnnnnnnnnnnnnnnnnnnnnnnnnnnnnnnnnnnnnnnnnnnnnnnnnnnnnnnntgggggggggtgggtatttcgtttgtgaactgggtggagtagggggagcccctgccaggcctgggaggaggcgtcctgtgtggcccagaccctgttttatttctctgacaagagtggcccggggcagcagagcctcagtcttcagaggccccagtctccacctacacttactgtcttgcgcctgcgctgaccactgactaggttggggctcctaaagcctgaccagttttagcaagtgcagatttcttctagataagaactcctgaaaacaaagtttcccccagggctggagatggagcttagtctgtggagtgttcctaacaggcagaaagcccggccccagtacaatcctcccccctccctcccctcccccacaccaagcagtgcataaaccccatctctgtaatccctgcacagaaagatcaaaagttcaagggtatcctcaactaaacagcaagggccaaccagggctacctcagagcctgggttttgttttgcttttctttaagatagttcacacgttgcttggcttcatttgtaagggacagtgttctgctcttgaagggagctgataacctgtgggctgtgtatggcccattgtccagaccgtgggccttacaacttgatccacagagggactgaagcacccatgaagtgtacagagctctaggttcacatgctgttcacagacaaggcagaccactagctttcaaacctgggagtcgaatggcccaacctgtaagaccctggcccccacaacttaggcctaagagcccagagaagactgagtaaagggtcccaccacagggccatggccccagcgtctgctttccagtgaggtaaagaagactgggcctggggtgagatggctcagtgggtaagagcacccgactgctcttctgaaggtccagagttcaaatcccagcaaccacatggtggctcacaaccattcgtaacaagatctgactccctcttccggtgtgtctgaagacagctacagtgtacttacatataatcaataaataaatcttaaaaaaagaagaataagaagactgagcctagttcccttgctgggaatcaacgttaattctgtaggcaggtgcagggtcaagagaggtcagactgatgctggcctcccctagtgtaggatgtgcagtcacatggactgccatgtgtagccctgcactcccatgcagacgtcaagctgagtgtgttgttcagcagtcaagtgcttgccctagcatgtgcctgagaccccagtttccatctccgcattaggagaaagggaaaagtggccctgggttgcggttcttttgagattctgaagcacccttgcccttcatcccgttcaccctgcctacctgggagacacaccagtgttcccttcttgacagccctacagtctgagcaccaaagtaccagctgagcccagctgtccctgacccctgaggggaccctcaccaggaaggcagaggcacatccccactgcccatcccccacttgtctgtggagacattgtcccagttgcacaaaaggactgggcagccggtaggtgggggaggggtcagacccgtgggaactgcccttcctcagccagggggcaggacaggggccagagggcaaagcccttgccaaaggctgccatcttcaccggctccaaacactcataccctaggagtgagtccccaacccccagtagacagcatagcttaccacgtaagaacagtatgacattatgactagactttagacaaatcctttacacacataggcagacctttacatatccccagggtcctaggacccagaccctctgtctatccttagcctgatgccagcagaaaatcagtcatgctgttaagctcccaagtgtgtttgtcagatgtggctcagcaatcaactcatttcccttgagagagagtgtgagcaggtgactctcagatcacattagggccctgcggttcccaggatgtcctgggaaagtgaggtgtgaagcagaaccagaccacgcaggctagcacctcactgtgttccccgggccctgtcccaccctgtctagcaaggtgtcaggccatctgtccagaaagtccctaggaacatgtcagaggggcaagtaaggcgacaatcaaaacctgtgggacttggcagcaacacaggttcccctcacccaggagccataccgattcccttgccagggtgggtgtgtccaggtattgcatctgctattgacttcctgccagacagtggggtgtgatatgctcacttcctctccgttcttttatgcgttgctattcccagattgtgggaaatggacagaaatggcctgccactctggagtgtgtgcttagtgtccaagttcctagtatcttctgggcgagggttaggagtgagagagcttctgagccaggcctatgtctgggtctgccagtggggtggagatagtggggatgcccagtccagggtatccctcggacagacctctcccagcccctttgtgaggcctaagtccagctggcaggggaagcgctggcatcaggtctgaccaagttagtatgcacctgcccctttgttcagaggcaggaggtcctaagattccctgatttcttggtccctcaccctatcccctagacttggggagaaaccccttacaggccatcaggtcacccatcttgtccccggctggtaggtggggcatagacctcatagctgtgccaggtacctgctgggcagggagaacaggctgtgggaatcaccggggcggcctgcctgtaggaggcaagctccggtcacctctgcctacccccacagacgcctggatcagttcccattagcaaaggctcccaacctgacaggccaccacttgctgccctgcaccttggggcaaatggctccagatccaattctggaaggaccagggctcatgccccactcttccctcagttccccactacataaggcatggggcctcaggaatgcctggggctggaggatgtttgagaggctaatggcctcttcaggtttggattctgttgcctttggcctagggaaggcctggtggactctggggaaaagagcagagccaactaaagctgcctttccagctctgctcctgtacccactgccctggcttaaggcctttttctgagcttgctccctatgcttgccatatctgtgtgccatctgtctacttttgggggacacagggcaagcatacctgtaagcacaaaatccttgctcgtggcccatataccaagtaggcataaggacaagtggtcacccaggcatacatggtcttgggacagtgcaggacaactgttgtgactgtgacagctggtcagctctggatccttcagccatgatcacccttatgacatcagctaacagtaggcctactcatggtaccactctagcactctggaatagatccccatccaacaatctctctttcagttggaggagcaggcagatggtgccccagatggagctacagggaagcactatgtgtttcaggctcttgttgcataccctagaggccacaggagaggctgtgactgctggaaggatcagtgtacacttcccaggagccatcttgggacacatctgaatgagctctttttctcattcttgtcaggttttgcagagagcaaagtcaaattgacgtctggctgtggctccataagtgccagtgcccaacaaggcaacaaaccatgactgtggctcagggcttaccagcaacactcacaggcagaaggaccctgagtcagagcaatgttggtacctcacagctgccaagagactcctgggacagagcagccgggagtcttcccaacttctgccctcccacaccctctaggtgttcttccctacctgtcaggctagcctaaggcatgcacacagctgtgctgatctaggttcaggcctttgctcagcctgaaccccccaacccccaccccccacccccacaggatccaatgacatcccaaagttgaggctcctggcttcacactagtggagaggcaatataaggatcctggtgtggggccttggacagtttgagagagtcagcggctacaagcctcctctctgaaaaaaggaggctgttggtctcccaagtgccaggaacactcggtattaggctaaattctccaggaatggtcactatcttaatggcctagtgtgtactttgtcatgatggccctggtggctggtcctttttctgggttgcaagcctgaaggtggagggcgggtgctgtgaacagtgcagaactggcttttccagaccaggcgggggcagggttccctgggccccacaagggtgacagcaaggcccaagagcgggcaatgggccgtgggaaaaccagcactcgtggttcccgaaggtggggccaggtccttgtggacagcaccaggcgtttgcatggtggtgactcagcatgagccggttgcctcacccagactgcacaccaggccagatcctaggagggctagaagcacagaggacatgaagcctttaacttgactgaaggataaagcagaacaggggcctctgcagtggtagagactcaagtgcccaccaatcctccagccttccccagcctagccttcaggcagatgcctggctctctacttgcacagctgctccaaggaagtccctatacccagagaccaggctggttgaagtgatggggacaaaggagatgccctccatgagtaaggggcgtcattgtgtgaaagatgggagctggagcaaaggcaggacaggtcctagctccctatcagccccagcccaggcctctggccagcgggggctgcagagctgaagtggcggctaagccacaggtaatgcaacctgtggtgtcgaaaggcccgtgggaaaaggatgtgtgggtggggcaggtgccgcccagcatggcacaccctgaggctccaaatgtgttcttccaggacacctgcctggctcacccaaagcccccaagaggggtgggggcacagcatgatcactagagagcaagctgtcagtcacctccctgtagccctcctctgtgactcagggaccctacctcctttcagttgctctgacaaccagaagtatacactttcaaagacatatacacatgcctgtccaggactcccacccaggcttatcctgaaactcagactcatttatttgtgtaggtagcaaccatttggaggtcatgagaagggtcatctgggattaagtcctaccttctttgtcctggtcaatggtagtaggttaacaagcacaggttagcaggtttggagctggggtatagcaaggaagtcctaacaggccttaactggaccatcagatgccctagaagaccattgcatatccaaggtccccaaaaagatccaaagtggggtttgcttctgacccaccatggacttcagggccacagcagaaccctgtagctttagcagctattccagatgttataaatatagacagcgcgcagaggatccggggaaacctacagctggtcacagtgacccttcatctcacacatgagccaggagggtgcagacctggctgctccctaaaggttctcggtctggaggtgagctaggcagtttccaaggccttgggaaatggaagaggcagctcatggcccagagaggccaaaagtgaaggagggctcctgagaaccagacagtgcataggctggagacaggccctgtgccctaaacttacatggaaagtaacaggcctatgtgcatatcaattcatagaaacagagggtatggttgacttaaccacagaggagtgctgagtgtcccagcttcttggtctgcagggtcaactgcatggggaataggccactgggctgcagcccttaccttgcacaccattcttcacacgcttattggtgaggaagctcacaactacgagcacatgggtttggagttggggtatagcaaggaagtcctaagcaggactcgaccccttttggctgcccaggcctagagaccagagagttgatggagcaactgacagagcttagtggtgatcaggggactggagcaggacaggtaaggggatccctgaagcagatgggagtctgggggtccttcagaggtggaccttcctggggactggcatggtaagggtggaggcccagtggcctgttcctcatgcaggtgatcctggactaagaagctgggacattcagaatccctctggagtcaagtcagccaccccctctgtttctgtgggtctgcatactgctgggtgcctcacatactgccacctgcctggcacagtgacaaaggccagtcgcttgctttaagttcaggacacagaacctgtccctcattgcagtgggtaggtatacagacacttcagcctgtctacgttagctctcagttctccataagtcacctgggagtaggcggagtgaaactttcccctctcgggatcacaagttgtggcttggcaggtagcctcgcgttgagacctccatcttgcatttccttgcaagaggacagctagacagattagctgatgtcacagagggtctgcagagtagaagtggagcttgctccacaggctggaagggagcaggtgagccagacagaggtcatgacctcctccaccttgtggggagccactgtacccattcatgtcctacctatagttgatctgggaccttctgtaaagaaatgttggacaaacaaataaaggggtcacaggagtggacaggctacccctctcatctgctacccagattgccttcagttgctctcagtcctgcaggaatccctcagctggacattggcctctctaccctctgttcacaatccggccaggacctgcaaaggccagcaaaaaccatccccaacgttttttgaggccctgggggccccaccctggtactggctgatttcgaaatgggctctttggcagtgggcttatctctttatcactacaaaaggtctgccccacccccacccactggttctcaggcccctggatccctaatcagcagatctcatgcccaggacttgtttcccagggacctttgagccctaagaatggcccaaagtttaagttccctggggaggaacccagaagtaccaaggcttctcagcctctgctctttgaactctccatttaggaggtgggggcagggcagtgagctaggcactgaaataacagagattcagctcacagtggccttctgggcacaggtgactctgtgctccttaggacagttccatcaggccctatcatcttttaataggcgatgaagccaccaggagcaaggacccagatggtaccagatgagttccacagaagctgctagagagaatggaaccttgggcacagctagtggatggcttgagcgacctgagaaagcaggcactgtctccctccctagacctggtcccagaggaggaggtaggggcaatgctgctcctatgatcctgcttgagactgggcaaagccggaggtcatgtaggccaacactttagctacactgagcaatggcacagcactgtggctggaaggggtcctatctggcatgctaaagcagccttggctgcaacatttctactgcgtttagcaatgtggcaagcttttctgggataactcccacctgggtctcaccatcacacacttccacaaggtcttggacagggttccaactgctatgggctaagccaagcccccagcacaaccagtagaccgttttgaagacaagacagccagagacagctaaacaataaacctaaaaaacattttgtgattcaggctgtagccttgtctgtttgcttagtctatcctctatgccaatgccaaactcttgcacatgccttcaagctgctacagactccaaagacaaatggatttctagatggccctggattcaggtgagacccataagatctctgtcaccctggatcaggcaaaagtggctctctggagagagagaagagcagccattataacctactgggaggctggaagcacctggctacctactaatacagcaggactctcactcagatgatgggcccctccatagtcacaattgcccaaaagtagatgctgctgcctttgctctctgaggaagctggggccctcacaaccaaagctagcttccctagaggatctgaggatgctgatgtcggggattgcagaggtaggaaacccaatgggaacgaaaggaagggaaggtcgaggaattcaggctcctgaattcagccagcctgcaaccaacacacttggtgttctagtagcctgcctcctcctccttgctcactccccaggaatgtgccacctccaccccttgctcacatccctttcctttgcttcctgcgtcaagcggaaaccagctcagatttggccaaagaacctaacagatagatgccttcaggcaacaaggtcctgagcaagtgtctgcctagtgcagggaatgcctacagatccaggtgtgtggtatcaggaccgtgtctgcccactacccttggaacaacccacctggggcctcctgagagtccatggcatgccactggtccaaatgtgcctgggatctgcctctcagcccattctgcctactgtaacctaggtaacacttcataaatgaggagagctgggtagagactgcagcaactcccagtgtccctctgagccacctctaatccagaccttccactcaacctgttgggcagccttgcagcctgagctgagcatcccagggttgaggggatcagggtggagtgttagcttcctccttcccctagctctatgtcctctcctggaagagttcctgaccacatccgtccccactcctggattacaaggaagcagcaaggagcctttaattgcttcccagcacagctgcatcctaggcagctgcaggacaaaggcgaaatgggaggagaagacctgaccatgctgtccaccttgattctcgggacagccatgcccactggaccatgtgtttcccttgcccttgcctcttctttgctgcccagcacagggctcactcacgcccgatgaagcatttccacttttgccatttcaaggggttggaggctgtttgccccattcaggttcaggcattggaagcaagcaccaaacctaggagactagctgcaatatgcctttctcagctgccacagagaggttgccttgaggagtgggtatggacacagcggctctggtgtccatccagtgttggcctgccatgctgagtggcatgggcaggagcctggtcacagtgatcgtctgctgcagttcctgcggcctccttcctctgctctgccggctggctggagctcagtgtttgttatttgattcctatcctctcttctaccaggtgtctgggctgctgggaagaaacactctcctctttcccacgctccccaacacattttaatgaattagctggaagccccgccccccactgcccactggcctccctcccctgctcagcgcctttaaggtggctgcaggcctggcccagctttggccagctgccctgtctgtgctgtcctcctatggcctctcagattgcctggactaccccacccagatttcccctgcagattccagagcactctacatgccaccccttcacagcattgctttcagagctgctggctcctaagcacccacctaagcaagaacgggagctgggcatctggagggaggaggatgcccttcccactgtctccttctaggaatgagcagatggtggtcaggatgctcctggaccagcattctttggatcaggcagggaataaaggtcagagtccagcatcacagccagaagggggtctcctagatctcaagcaagcatcacaaacaccggagcttaatactaggtcccctgagactctctgggagcccccttccctccctctctttgaaagcggggaacaaatgtccaccttttggaagtgtcctccagcaaacacttgggtggtgcttactaggaaccaaatgccccacagccttccccaagcccctccttatctgagacaggaaggcatgggtgtgggccagagcatagctgtggtgaaggagcacgagccagccgggaatcctgtaaccatcacctaagaagttctgtgggtagctggccatccagctccgtctcagctgcacagtggtggtggcaagccaggcacatctgtctgtcctttgagcctgacacagggcaaaatgtcctcaggataagcttttaccacgataggactgccacaccagccatgctattctgcaagaactagctgagccttccagctctcacagcccctgtggtgggggcctggcgttcccacactgagctcacacagggcccctttgtctgccgcctgctgcggatgtcaacaggacttttctcccaggctctgttctgggcaagcatctcagatgcccttcctcaggccaggctggagcccacctaggtaggggcctatccggggacccattcaccttcaaggaacatcactgggcttgatgaaagtaaggctctgctcacccccaggtgtggtctctgattcctgcctgtctaaagcttccaagccctatgcaaacgcatgaaaccatgggccagccaggaatcagatcctgtcctcttatgctcccagaactcccgtttctccctgcccactttgttttgggttagtgttctgtgacacagcctgcattggggcatcagtcagaacccccaactgcacctcagtctacctgcacggtggagagaaccataagggttcctctcaagatcttggaacagtagccaagcagtggtagcgcacgcctttaatcccagcacttgggaggcagaggcaggcggacttctgagttcgaggccagcctggtctacagagtgagttccaggaaagccagggctatacagagcaaccctgtctcgaaaaaaaaaaaaaaaaactctctgaacaatgaggtataaggtgtggctaggggaccaaataggcagaacccaatagaccaaggatcccaagaagactagagagctttccaagctgaatacacatgagattcaggttctcaggttagcagaaaaggagtgtgacccttaaacaagttggcccgacgggcggacatctggtggtcacagtggtggtggggggggggttgcctactttctccattcaatttagctatggtccctccccgtgaacatagtaaggttggggacatgccccggtgaatatgatacagttctgagtctggggcaggaacatccaccaaaggagcgtccccagatggagcctggctgggtgggctgcccagctgaggcttacagttgcctgcttggaattcccagttagcttcagaagaaatcaagccctgacgtgccctgcctcctgctctgcaagtcttaagatcattcctccttaatttccagcaaccacagcgaagctataagccgtaaaacataatgaggaaatgtggagccttgccttcccagccagcgccagcacctcctgcctcactcacggtcagttgttaagggtggtcaataaaacgtggggcttatggcttggaaatgagtcatttcagaactccctcaaagggcagtgctgttggtctcacgagccagccctgtgtcttatatgctgacactaagtaaaggaaacacataaggaggagtagtgacagactggccaccgagaaagagagagagacagagagagaggcagagagagagagatagacagagagagacagagacagaggggggagcgagcgagcgagcgagcctgtgccagcctgccaaaggaacccctacctacactgtgggtagcttaggggcatggagctccctccatcagtatggaggagccaaatgcaattgctgctcaagcttccccgtaaattacacttgagtagaaaggaccagagtgatggaggactatacaaccgagcagttcgtgaaattgccacctgtgaacgccaggtccaggcctgggagtggctgcgcaaggaactcgcaactcccgacatctatgaaggaagaagaaaactgccgaaggagcttatacaccggagcaaccagacccaggatcccgcagtggtgctggaaaacccccgaggccttctgaccaccctggccagaccagactagtgctggtcagaccagcgccctctatcctggagggagctgcagcacgaccccgcctccgccccgcccccacgtgggcaccacccaatcgaaagagccctggtgtgcgcgtcaagagcgtctattgttatgcaaatataagaaccgtaaaagacggcgagaagcggcgggcgaattagaactattttgcaaagggacgcgggtggagttcagctggagcgaagcctaacctcgaagggaccacgactgcgagtgtcgcggcctccggctgccccaggttctgcgaaccagcacccagccctgtcgcccgcccgcttgggcgcggctggatgcagcaggggtcccgcgccagcggccctcggccccgaacgcccggagtgcgcaggggcggcgtgcggggcccgagggcgcagcgccctccatgcgccgaggcgtacctcgagacacgccccgagacagcccggggcccgcactgcagccgccgcccgcgctaagccggggcgcggctcgcagccctagctctgcggcaacatgagccaagccgagctgtccacctgctcggcgccacagacgcagcgcatcttccaggaagcggtgcgcaagggcaacacgcaggagctgcagtcgctgctgcagaacatgactaactgcgaattcaacgtgaactcgttcgggccggagggccagacagcactacaccagtcagtcatcgacggcaacctggagctggtgaagctgttggtcaagttcggagccgacatccgcctagctaaccgcgacggctggagcgcgctacacatcgccgctttcgggggccaccaggacatcgtgctctatctcatcaccaaggccaagtacgcggccagcggccggtgatagccacccggactccggcccctggcccccacccgcgtcgtctctgctgtaccttcccgccaactacctcggtgtgcgccaggtttgctggtccgcgtggaaatcgggctaagtctctacgtccgcggccacgaccaaagtagcgcatccgtggaccccagggttcggctctccgcaaaagagcgcctccccttggcagtcctctgagccccgcggggccccagagccttcccacggccccgaccgcctagagggtgggggcggggcgcaggctccagtccgttttgaaatttgagtctcacaccgggagacttcggaatcccgagataccggatcctccgcttgaaatgttttctccggaaggtgaaaggcgcgggcggactcgcgctccagccgccgctcgtgagacccggccgctcacagtgcggcgcccgccgctggcagccgccaaacaaccattaccgggctccaccatctgcgcgccctcgcacttaggaagggaaggggacgctccgggttcctgatgtcctcaactatttatcacgtgtgtgtatatttgtgggtgaagtttgtgcgcctgagttttttgtttggaaatattgtgcgtggttatgggagaaagatgcattttttttcctttaaaactaaaaacttgagtctaccattttttggttgcactgaaaataccgcctagccctatggttttcccattgctagcccctcccccaccgagtccctaatcttccacacctcattcctcttttcctctccctggattctgagtttagagagcctaggatctgtctccctttcccctcccgtgagaggccaccattccccacacaggctggtttagcaaagttccaaagggctcttgaagcccgcgtggctgggacgtggggattctgagagcatggtacccttcctagtgacttctattatagttaatagtcggttgcacacttttttaaaaaagtaaatgaatttgccacgattaaatgtcataacatttatgacagaatataaaatattaacatattttaagccaagttttaggtgtatttttttgaatcttggttatgaacccaattttaaagggcgttgtatccagcgttgtgaaggctgttgtgtacccatatttatatttttataaaattcctataaagactgtgaatctctcatactattgctgaatgagtggaagggctgctgtgctctttctgccttccccaatccccatccccaccctcaaaccctgctccaaggccctattatgatctgaggatccagccatgagggaggggctgtgccaaggaccagggctggaggaggtgctggagcgtcactggctgtcccagaaaggagacttcctggtttctgtggttccaattttctatgcatctccattccccttcttgttttgatcctgggaaataaaagggaggctgaattattcaaatttaaatgaggtttccccttcgtagaagtgctgctgaccctgcgtgcaaaaatggggagcacttgaggacacaggtgggtggagccctttgtgccgcctggccatattcttcggtcttctgcgcttttatgaaccagtgtgggaggaatagtgataatgtcatgagaatggcagacactgagacaagcacagattacttcaaaaggagttctgtatggtttttctacacgcaaatgcctttttaattatgttaattaatgttaaaacgtactgggcctatgttgaagcttcagatgggtcctggttggtctcttctatctgtatgaagtctgtggcacactcctaagcgtacgatatagacttgtagcccatcgtgaaaaatttataaataaatttttcattggtctttttatattaaaaaaaaatactggttttaattttggcacaagtcctgggtccccctctaagggccatggcgtcctaccttcagctaatgaatgatggctgcttgggttgtgaatctattgacaagaccaagctgggtaaaatgtgaactcagtctagctcagctgtcaagtccaagtcaaccacaggaacccagatgccaccttagtagttcgtgtctcagctacttcctggcagagtggctgagacctccccagagagatctgcttatagctcatcatgcttcctacccagcctgaaagttgaaaccctggaggaacttctgcacagatgagggtctctttagatttgggggaacattcctgttgctcctggacaagcaaaacacctctagagatttgggcttctagggccaaattcaccaaaaagcagatctgaattagatccagggttctcatgcctgtgatttgagaaaatgcactggaggaccatcgacagcccattcctgggtcctgcatgggattcaggggaggaggtgcctgatgggaccagaatagcagcaaccagcagaggagatccaatggagccatggtataagtggctgttctcctgatacaaactccaagcagccatcagtcccacacacacacacccttcgggctcctactttaacattttctcctcagcaacagtaaggttattaaacttctgagcagactatgatgtgatactctgcagagagatgggaccttcctcaggaagtcgcaccccaggaattgtgtctaccaggaattgtagcccacagctagaaggatgtggccagttgagtgtttttagtccccaccctctccctagactgtccagtactaacctggagtgtgaggaggggaacgctcatcaagcctttacagcacctttaaaattcccccacctaagagaggctcgagggcttccaggtatacatttgctaactacaatcctgcaactccccaaagttctctttggagggagccaacagacacacagtgccatgaatgaaatgaagctaagaagagatggcaaacctgtgtggtggcatagacctttaatccaagcactgaggaagcagaggcaggcagatctctgagttcgaggccagcctggtctacacagtgagttccaggacagccagagctacacagagaaaccctgtctcagacaaacaaaaacacaaaaaaagatggctgaggaaggagctgtagaggaacccatgctgtctgggctgttgtgaacgcacaagcctcttcacaatgcagtactctaggaggcaggtacgtagacacatgctgaacgcttacatcaccatagtccttccctttggtgggctcagaactatggcgcgaatgccagttagtcagtcccaccgagtgcacagagccagccatcttgccttaaagggtactgtgggcagcgtgttcaggacccaagttttccaggaagagtgctctacttctatggcatggctcccatgacagagcacacttgtgcagtgggaacagacagaagtctctgctccctagatgtgaccaggtcaaggttgctatatctctggtgcccatttccctagaatgcagtggccagtggtccttacagctcaacaaagtacctgctgcagtggagcaggagtggtatggacttgatgagtctctggtaaatttccatcctcttcccaaactggtccaggttagggccggtgaaaagaagttatagatgatccaggtcccctctctgtcctggccttccagagctgcagatgtgcctgttgcacaagccaagaggcactgagaggacctggacaaggactgggcaccagaagcagcactgggaagccctgaagacagaagggacacagagaacgcaagggtcaaggcctgccccctgttctcagtgcttggctcctatccatctctgatcaaacccattacacagaaaacatttactgccagaaatgcagaaatattgtccaatcgtaagagtggactgggaagagccaacgggggagagccaggacacagagcaggacagaaagggaaaagagaagtgactatggggcagtctgtctccaaagctcatcacaagaatggtcaggggcgtgcactacagatgaaggaatagcaaccctttgacctgggaaagccagctgtgtcttggtactcccacgaggcctgaaggaaagaggcgacatccatgggccttgaaggacgggaaaggaggccttgtgcttaggactgctaagcaacaaagtccaagccctccgtataagggctcagaccataggaggggccgtcgaaggtctgggaacctcagcaactgctccttctgaggccttggcaagaccttcctggggctctagggtctctggaggccgccctcccccaccgctcagccccgcccccgtgcggcgcattcttctggttggatgtccttccgacagtaccctgcgcgtccgtctgtcggtctttcttctttcgcccgcaccaaagccgcggcccattcattccggaggcctctgccctctcctgagccggtcctcgctcggcgagcagctgctatgctaatgaggacggcggcgggtggggcgggcaagcactcacaaaggcagaatctttacattcaaagccagcggggcagttcctgcgagcccgccaggcgaggcggccgggagcggcgccctccggcgcaccggctgcccgagcacccactgcccggctcggtatgagggcagagaccagctgtcgtctgctcgaggtcacggcctgggacccgtagctacttaggacctgcctgtgccctcccccctccccccagacgcttctcttagtggctcgggtactctcggtactcgtgtgcagggctgcgagtgacactgccgccatccccaagacaaggaggttggatgagacccaagcagagtctggtcctgaccaaacaggagcagagatctccggtcacctccccgcgagcaggcagggttccccttcggcaaggagggacagggacagggcgtggggacggggcaaaactggctctctgggtaccggacgagccttgcccagcctggacctgatgacctcggttcttcctgtggagcttaaagcaagttagggggaaaggagtggaagctggggagggggcggctgcggctggcctgcgagcttatgctgcctccctgtggtcctcgcctgcactgtggtccccgccaagaacactaggtgtatggccgaggtggacacctggttacccaggactccaacctccctatatacatcgaaggttgggtgaagtgcttagatcatgaaggggcaagagctgacatgcacaggtcagaaaggcatgaccatctgggtctgccccaggggtggtaacccgacaaggtgggtatggaacagaaggagacttctccgaaccagataggccaactctgactacacagcctaggctaaagcaatggaatatggtgttagtgtatgacgagcaggatggatggagaaaaagaggaagggaaagaccagggaggaatgcacagagggccttggcagtgttgctgaaattgaaagattgatcatttgtgggatggacaggaaagcaacagatcagaaggaaaagcattaggtgggaagactacccaactgggacccctggaccactcctgcggtccctatgtcttcaccaaatggaaaaaggatatcccaaggcccaagactttaaagatggttagcagaactcctacagttgtagccctgcacccaagggccacacttctaatggctgccggatataggacacattccaaatgatcgttaggatagattcgagggtgcctctgagtgtagagcctggagcctctggtgggagtcatgtgggcaaggccctgtgggccagtggtggctggcactagtaagctgcctctccttctgcaaccttatgaatgataagcatatgaaaccatagccaattcaatgaattccctccctccctccttcctttcttcctgtcgccctcctccctgttctgtagccccagcggacctggagcttgagtctaggcctcaaatgtagagctccttcagcttctacctcccagtctcctgctgggattaaaggggtgcaccaccactgcctggcaattaagtggtttcttttgggctggtgagatggctcatcaggtaagagcactgactgctcttccgaaggttcaaatcccagcaactacatggtggctcacaaccatccttaatgagatctgatgccctcttctggagtgtctgaagacagctacaatgtacttattgggctggagcaagcagggatggaaggagagggtggggctgaccagagtgagcagaggtcctaaattcaattcccagcaaccacatgaaggttcacaactatctgtacagctacagtgtactcatatacataaaacatctttaaaaaaaatggtttcttttcatttgctttggcatagcaatataaaagtagttaagatatacatctatcaaaacctacctttgaaggctgctgagatggcccagatggcacttggctacccaagcctgccgaccagagtaaaaggagaggagaccagcagctccacaggtgtcctgtgacctccacacactggctgtggcacacactcacgcatgcgcatcatgtacacagctaggcttggtagctgtcgcatgcctacagtctcagcactcagaacctgtgagtcggaggccagccagagctacatagtgagacccagtctggagaaaataaattaaaattaaaaataactttttgaaccaggtgtggtgaaacgcctttagtcccagaacttgggaggcagaggcaagaagttctgattcaaggccagcctgatctagagtgagttccaggacagccaaggctatacagagagaccctgcctcaaacctgcacaccccccaaaaaataatttaatattaagattggtggttgtagcatacacctttaatccaagaactagggaggcagaggcaggttaatctctgagtttgaggccagcctggctacacagagaaaccctgtctgannnnnnnnnnnnnnnnnnnnttttaaaaaactaataaaaactaagtagctttggggactaggcatgtgtggagcatttgtttttgctttttttttttttttctagacagggtttctctgtgtagccctggctatcctgaaacttagtctatagaccagtctgacctcaaactcagagatcctcctgcctctgcctcctgagtgctgggatcaaagacatgtgctaccaccaccaaacttattttatttcttaaagtccctagaacaggtttctgtctgggtggttgatgggttcactatgggaaaagacaatagtatgtcttttgcttattttatttatttatttatttatttatttatttatttatttattgtgagttttactatatatctttggctgtcctagaacttactatatagactgcaagctgcctcaaactcacagagattcccgtgcctctgcctcctgagtgctggaattaaagctgcgggccactatacccaccttgaaacagcatttttgaaagttaaaaaaagaatgaaaaaatgttacagagctggagggatgactcagtggctaagagctcttgcaaagggccttggttcaattcccagcacccatgtctgccacccacagtctagctccaagggatcctcttctggcccctggggacaccaacactaacataagcataattaaaataaaatttttttaaatgggggttggagagatggctcagcagttaagtgcactgactgcttttccagaggtcttgagttcaattcccaacaatcacatggtggctcacaaccatcggtaataggatctggtgccctgtgtgtctgaagacaacaagtgtactcatatacataaaataaatatataattctttaaaaataaaatctggggctggagagatggctcagtgggtaagatacccaactgctcttccgaaggtcctgagttcaaatcccagcaaccacatggtggctcacaaccatccttaatgagatctgacgccctcttctggactgttggaagacagctacagtgtacttacatataataaaaataaaataaattttaaaaaattaaaaaaataaaataaaatctgggttggagagatggttcagtggttaggaacactggcttctctcatcaaggacctgagtgcaattcctagcacctacatggagactcccaaccgaatgtaactatagtccctaagaatcagaattcttcttctggcaccccatgcaccaagcatgcctgtagcgcacggccatataaccaggcaagacacccacacacataaaataaataaagctttataataataataataataacaaacctttaaaattatttcacaaaaatagtaatttttgcgagaaagaaacagtcttcttttgatgctcttcatcaaaatcttgccgcctccacctttgtcccttctgtctagctatatagctattctgtggccatgagcacattatatcagaagcatggatggccacatttgtgctcttctacactgttaagactttattacataaactcatgaactaggttagctgtggtggctgaaattctccaagttgtcctgatttcccttgatagctgactactaacaaaacacattttctgttccaatgccaataccatattgtacaggctggtgttgtgtgtcaacttgacacagctggagttatcacagagaaaggagcctcccttggggaaatgcctcagtgagatccagctgtaaggcattttctcaattagtgatcaaaggttgggagtgcccattttgggtggtgccatccctgggctggtagtcctgttttgttttgtttttttggtgttttttttttccttttttctttttgttttgttttgtttcaggacagggtttctccgtatagtcctggctggcctggaactcactttgtagaccaggcaggcctcgaactcagaaatcctcctatctctgcctcccaagtgctgggattaaaggcgtgcgccaccaccaccctgctatcctgggttccttaagaaagcaagctgaacaagccaggggaagcaagcctgtaagtaacatccctccatggcctctgcatcagctcctgcttcctgacctgcttgagttccagtcctgacttcctttggtgatgaacagcaatgtggaagtgtaaggtgaataaaccctttcttccccaacttacttcttggtcataatgtttgtgcaggaaaagaaaccccgactaagacacatattaatcccagaccagacattatacatcacatggtaattatatctacgtacaaatagaggttatagaaaggctacaatggggataaaagaggctacaaagagaatctccaagttggagagcaggtggtagataaagttcttagagagctgccagggacaccaccacaaaaccaagctctctgtggtttggagtcaagtcccatgatggatcagacctgccgaggcaagggacaggtttgaggtgaatgggtggcagccagatccctgcctgctgcttccttgaccccatgggtgttcagctgatgggtcaagtgaagctcttgtcattgtggtctaagtgtcctcttctttatgtgattcaggggactgtggaacacgtttccttaatctggttgtattcattagttaatcatttttctgaatacattggtgtgtccatatggcaccttcttacctacaggcatatatatctgcctcctgggtactgcagggcaggtggtggtatggacaaacatagagaagtgcagaattgtcctgccaccctctgtatctctcaaaatggagtcaaattctgcttcataaaatgaaataacccaaggcaaggcacagactagaagccgctgttttataattatgggatgccttggaccccttgaggtttgggtgatctttccgactctcaggatgctgtctattagctttcccttaacggtcccttttgtacttctaaaattaatgtgtttccaaagacaaaggagatgatgccc

SEQ ID NO: 690 - DNA, 1062 bp, Mus musculus
atgccagccagccttctcaatccctcctttgtcctggctgccttggtgtctctggcatctgagggctgctgtgttctgttcctagtaggctccagctgtgtacctccaaccttaacccttgaccctgccaagatggacccaggagaccccactgccagagagcctactgctgaaatgctcactgctgccggagagtctcctgctaatgtcccctctgctggcattagcatgctgctctacaaattggtctgcaagcagcagcaggctcaggtccctcaaacccagtcagctttgaatccatactgctacagcctaggtcactgcccaagcctcattcaaggtttggggactggggtgggcagcaaatttttatctcagccttggggtctcttccatgcttacattatcttgtcagattctctttcctggtattcagcagccattggttcctcctccaagtatcactccatgtacctgtccccgctctggacagtcaaaggcctcgtgtttgctccgatgaaggcctcgtgcaataccaagccaagcacatttcttgacccagaagaagccaggaaagattctgggatatatgcaccccagcagtccctggtcatgtatctgcagctctgtgcccaagttggggctggtcgctgcctctctgtaaacagtaccctcaaggcccaacagcaagccaaaggcatgctcaggcacttcagtgtacgagtcattcatgcaggtatcatcagccgctgccagacgcagcgcatcttccaggaagcggtgcgcaagggcaacacgcaggagctgcagtcgctgctgcagaacatgactaactgcgaattcaacgtgaactcgttcgggccggagggccagacagcactacaccagtcagtcatcgacggcaacctggagctggtgaagctgttggtcaagttcggagccgacatccgcctagctaaccgcgacggctggagcgcgctacacatcgccgctttcgggggccaccaggacatcgtgctctatctcatcaccaaggccaagtacgcggccagcggccggtga

SEQ ID NO: 691 - protein, 351 aa, Mus musculus
MPASLLNPSFVLAALVSLASEGCCVLFLVGSSCVPPTLTLDPAKMDPGDPTAREPTAEMLTAAGESPANVPSAGISMLLYKLVCKQQQAQVPQTQSALNPYCLGHCPSLIQGLGTGVGSKFLSQPWGLFHAYIILSDSLSWYSAAIGSSSKYHSMYLSPLWTVKGLVFAPMKASCNTKPSTFLDPEEARKDSGIYAPQQSLVMYLQLCAQVGAGRCLSVNSTLKAQQQAKGMLRHFSVRVIHAGIISRCQTQRIFQEAVRKGNTQELQSLLQNMTNCEFNVNSFGPEGQTALHQSVIDGNLELVKLLVKFGADIRLANRDGWSALHIAAFGGHQDIVLYLITKAKYAASGR

SEQ ID NO: 692 - DNA, 20377 bp, Homo sapiens
  misc_feature (1)...(20377): n = A,T,C or G
ccttgtgggtgacagcaaggcccacagcgggcagcagccgtgggaaaaccagcaccggtggttcccgagggtggggccaggccctcactgacggcacccggtgactcagcacgagctggctggccccgcccaggcgtgcgcacctggcccaggtcctgggaaggccccggaccccatgtggagtatttgggggtgtggggagcccatcccgcactgctgcagcctcgccacctctcctacacccactggcactgtccctacaggtggcctgcacagtggagagtggggctctgtggagggtggaccacctgcttgttctcagcccttcccagccagacctgcagccagggctctccacccacacacctgcccaggaagcctgctggacccagatctgggctgggcccagaggccaggtcacaggacctgccatcatggcacaaggagcttcctggtgggagagatgggagctagcggaagaggaagggagggtcctgtctccctagcccagcctggcgtcctagtagaagagccccacctgtccaacacctccagccccagggccctgaactggtgggggctgcaatgctggaggcaggtagtgcagcctcttagtttcgaaaggctcaggggaagacagcgtgtggggcagggccggtgcccccaacatggccacacccggaggctccaggggcctcgaggccacctgcctgcggcagccatgtcatctggggctcaacccaaagcccctgcatggggaggggtcctggaatagccatgtgaccatggatctcggcctcctcttccctgctcccctgcacagatggcctggaagccccacctcctccccagggtgctctgacatcagaagggctgtgacgggaaggccacacctccacaggacctgcaggtgcctgcctgggacctggctctcagtgggcacccagccccctcctggcattgccaggggagtcctgggtatctgacccgtctctttgtccaggaagtgaccactgggaaggccgtgcaccccgctccaagtcaggactcgggtgtaagctggtcctagcctcccggcctccctgcccccacccccagcatcgcagtaagcctggcaggttggtcatactcagaaaccacccagaggggctgggcgtggcacacacctggagtcccagcactttgggaaacccagatggaaagatcacttgagcccaggagttcaagaccagcctgggcaatatcgtgagacctcatctctacgaaaaatacaaaaattagctgagtgtggtggtgtactactcaggaggctgatgtgggaggctcatttgagccccggggcttcaggctgcagtgagctgtgattgcgccactacattccagcctgggtgacaatgagaccgcatctcaaaaataataataataatgcagccatgggggcccgttttgtgccctggacaaggcacacagtggtgttgctccagccccctcgccactttcagggccacacctgccccagggcagtgggaggcgcaggtatcagggaaatgtggatgtggaaatggacaggtcaggggttggggcaactatggggctgcccacgctgaccccttaaggctgggccctgtgtccaacacgccagctgaggtggcccacgggggacccagacctggttctgccctcgagggctctgggattggagagggcagctgggcagagagtcccacaagttctcaaaaaacagaagaggcttcccagggcccatgagaagccagcacagtcagggagggcttccaggaggcggtatggcctgaaccccacaggactatgcgtggggacaggaggggacccattatctgtctctgtgaaaccccatggccagacccagagcttcgaggagcgagcagagggctggggtatggggcacccggagaagccccgcctgggcctcagcaccccctctggcccccaggcctgtaactgtgaccagtacctaaaggtctccagggacatgatgaagcagctcatgtggctcagcagtcaccaggaggggcccaggagctcaggtgagtgtgtcagggtcaggcactgggtctggggggcctgggatgggtcgacctactgaggtagccagggagaggggcctggcccgtccagcactgagcttcctcagataagggtggcagccaggtgacgacaggtggaaaaaccacagccaggtgacaacaggtggaaaaaccacagccagggtcaggtacccagatggcctctgctcccttctgtgtggtagcagaccagaagatcaggacaccagggcccttggcgaccctctggagtggtgtgcacctccttctctctgctgggcccaggcatgcggtgcacacagacacacacacacgtgcacctacacctgcacacagcactagctgaccccagatgtccacccccccagggaaggccccagcctgtttccctgcctgggaaactagaaagagggcttctttctcctcctgtggagggtgcaggccgcccaaggactttgcagttttagatctgcacgggggctggaagtatggcccccgccccgccgccattagaactgctggcccctaccctcgggagggaggcgccccagggagggagtgaagggtgctgctcctggtcatcctcagtcgggggctggcacgggggctaagggaatggaggtggatagaaagaggtcagtccaggctgggcgcggtggctcacgcctgtaatcccagcactttgggaggccgaggcgggcagatcacaagatcaggagattgagaccatctcaatggtggtggctaacatggtgaaaccccgtctctactaaaaatacaaaaaattagccgggtgtggtggcacacgcctgtggtcccagctacttgggaggctgaggcaggagaatcacttgaacctgggaggcagaggttgcagtgagccgagatcacaccactgcactccagccttggggacagagtgagactccgtctccaaaaaaaaaaaaaaaaaaagggtcagtccaagttcagggtgggaggacggggagcgaccatcacccagggtggccagcagagcacaccccggagagcgaggctggaggtggcctccaacctcaggtcccccgctcgcaaagacacactcagaccagagccccaggacatgacggcacacaccccacccgagggtagtgggcaacacccagatgggctgacgagtgtgacagggactgcagggtaagagctggggccagccagggaggggccagatgagggtcatggcctcctgggcttcaaggaggagctggggctggggtgggggcgtggtgcattcatccccggccgcagctgatctggagccatctgtagcgaaatgcttgctgagcaaattacgagggtcaacaggagcagggcagacgcttctcccacctgctggccagtgttccctcggctaccgtgcactcagccccacagtgacccctgagtggataccggccctgcctgccctgggctctcaatgggggctcggggcctcacagggccagcacgagccacttcccagggtctccaacagaccctgagcctggcagtccctggggccctgcccacccgcccacccttgtgctggctgatttcgaaattcactcactggcagtgggcttatctgctcatcaccacaaatgggctgcccccgcccccgcccgccggttctcaggcccccaagagccctaatcagcagatctcgcgcctagaacatgtttcccagggacctttgagccccaagacctttccgaggtgtgagttcccaagggaggggaccaggccggtaccacagctccttggccccctgccctctgcccgtctgcgaaggctggggggtgtgtgaagaggctgcaccccatgaggtggctgtgctcagccgcatggctgcgtcatggaccccgctggctgccaagccccatccctaggacagtcccggaccagctctcttccttgactgacaggtgacgaggccacccagagccaggcggtgcaggagccaggtgagccccgggaccgcccaccaaggacacagctgcttctctgcggccctggtgccaggcttcccccagaatgggggacttgggtcccggccgggcagagggggctctgtggggctcctgtaggccctagggcctgcaaggtgaggggtggggtccctggataggagaagtgggcacagaagaggaagtggaggacgcagagtcagcggatagggagcagaaagaggagctgctgaggagtgagcgtgggctcagcgtgggccgccaactgcaccactctgggagcagcctgggggccgtgcccgaaggctgagggctcagggagtccacttctatctgtccaggcccagccccagacgcagcccctgagggctgcacctatgaccgcccctgccgctggctgcagatggctgacctgcgggcggagacaccggacatgctggccgacggcacccggctgcagctggcaggggtcccggtgggtgtgctgaggacacctgggctgcggtgcttctactgctgcacgggctgtggaaaggtcttctgggacggctcccacctgggtcgtgttgccacccacttccgagacatgctggagagcgcccccagcccctgcgagccgagcccagcccccagcccggccagcagtcccttctgaggacagccagacaataaacatggaaagtgcccgactgctgggcccatggccgtggactggctcacatgtttcatgctcgccccacaaacccctcgtgggcccctttgtgccagcaagcgctgggaacaccaaggcggggtcccagcccgagccgctgtcgggggaagacagggtttccagatggtcaggatgctgggaccccgagcctggtgggacccacgaggtctctccatcacccccgtcagggctgcgtgattcccacgggagagcagcagccacagcccccactagaggcacctgggcagccggccatggccagggctctgcacacgtggacgccaacgtctccgtcctcacagctgcctggacgtagctgctgctgcccctgtctgggaggaggctgaggcccaggcggccactgctgcccaccctgagggtccgagggtgctctgtcaggtggagcagggagggcagggggtcccagaggtgggagaggaggagaagcccggggagggaccatcccaggaatgtaccccctcccctcacccacatccttttcctctgcttcctgcctggagcggaaatcagctcagatttggccgaggaggtgggcggaagcctcgggcagcaggggcctgggggcgggctggggagaagcagccgcctctgcccagagtaaggagcaggcttcgggtgcgaaggccttgggcatccctggactggcccagtcggggcctccctgtgggtcccgaccacaccagggctggccactgcccctgggtacccctaaggactgcagcccaaccccttcagcccccagcaaccccagcaggggtgtcatttcacagatggggagggggaggctgagacggggagggcctggcctgtgtcagagccaactcgagttttgacctgcccccttgacctgctgggcagccgcagggcgtgagcctgagagtcaggtgggggcaccagggtgagcagagcagcaccccaggagagggtcagggccttctgggaccgggatctgcttccgggaggggaaccccagctccacattcctgtcctggggaggcagccccggaccgaactcctgcctggcagggtttaagagggagtggctgagggcacccaccctccacccggcctggctgcatcctgctcccaacacaggcccaagtgctgctgctggctctcggcagagggaggcagagtggtgcagaggccgcaaggagacagaaccacacatcctccgtccctcccggctggccccgcctccacccgccctcactttccgccatggccgtgctgtgccatatgtgtttcccgcctccacacgtccctcactacccagcataggctcggcctggctctgcggcgtccatcccaggcccaggctttggtgggggtgaggctctctgcccagttcccatcctggtccaggtgctggaagcacgcctcggtcactggggtcagcacccatcaggctgcttcctgggctaggggacagacaccaggctgaccgggtggccgaggctgccagtgccaggccatgccttgagcagccatcccggcgggcaggagccaccggttgcagggattgtctgcggcagttcctgcccgggcgtccttcctccgccgcggcctgtgctggcccgggctgagtgtttgttatttgatctcgatcctctcagcccttctaccaggtgtctgggctgctgggaagaaacactctcctctttcccacgctcccgacacattttaatgaattagctggaagccccgcccccactgcccgccaccctccctccctgcttagcgcctttaaggtggccgcaggcctcggcccagctctggccagctgccccttctgcgctgtcctccctgggccctcccaggcgggccggccaccccgcacagacctccctccccatgttgcccactgctctgagcctccagggaaggaaggaaagggggtgcatgcaaagagaaggggccccaccattgccttctgggggcaggtgggttacaggcagggcacccccggggccagcatcctcaggacaggcaggggaggaaggacagggcccagctgcacagtcggagctgagcctgttgccaggtcccagggcagggcctcccagacagcagaaggctccaagcaacaccggcaaacaccagggggtcctctcgagcacaagtactgggtggctggaggtggacccccgtgtcccagcatttggaacagatgtccaccttttggatgtccctcagcaaacattcgggaagtgctgactcagagctgttgcccccccggcccctccccccttcccatcctcaaatggagcagcttcagggccgtgggtgtgcccaggggagctgggagccacggtggaggagcaggagccagggccactcagcgaactccctgtgggcagtgtggtgtggccagcctctgagtcccacagatgagcctgggtacctgccttgggccacagccacactgccgtggcaggccccaccacctctgcctgaccccgctctggaccccgggcagggggtaggttcccgccctgcagggccgccacaccagcctcactgtgcctgccggggcgcccgcaccgcctggccctcgccaggggccgctgccgatttcacgcccgtggcggggccccgcgttcccacaccgagctcacacagggcccctttgtttgccgccgccacggatgccgacggcactttctcccaggccctgctcctggcccacagcatagccaaatgccttctccaggcccggcttgagcccacctgggcttcggcctgtttgcaaaccacccaccctccaggggaggccctgtgcctgttgagcaccaagggctctgcccaccccccagtcatgccctctgcctcttgccagtctagcctggctgggccctgggcatatgcacaaaatccatcaatgcccaggacagagctcctgccctcctgacagtgagctcagagcaccctgcacacccagccctggtctgaggtccagagacacagccagcaccagggaccagcaggcagcccagcggctccccctccttaagaggccaaaggtgcccagcagagcacggcaggccaggccatgccatccctgccccgggcctgggctccacagcgcccatctctgttctgctgggggcctactccgggactccactgtgtcctcacctgcatattggggagcacccctccaccctccgtggcccccttgagagctcctgggagaagcagtgaggcccaaaggagagagctgaacagaaccagcgggatcacggccccaggaagaccagagcgagctctgagctgtgcctttgagggacagaggttcccagcccaccaggaggaccccagggcctcaggaccctgctccagtcagccagggtctgtcccgaagggagcctgcccagtttttcctgccagtatgggcacagcatggggtggggacacacccctgtggggagccggatgtggggacatggagctggtgggcggaagcctcctcagacaaggcctggcatgggggtctccccagcccgagctcagagctgcctgcgcggaattcccggcttggcttcagaaggaattcaagccccagcctgcctggcctcctgctccgcgcctgagaatcactcctccttaatttccaacgaccacagcgagttgtaaactgtaaaactctaatgaggaaatgcgctgtgcttcccctgctagtgcctcccggtcaattgttagagtggtcaataaaaatgggttttacagtttggaagccaggcgtttcagaattcccttctggccctggcgccacacctagccctgctcacctgggcaggacccatgtgtcccgcatgctggtgcgtgggcagcagagggaggcaggccgcggtcccgaccctcccgctgcgccccggcccggggcttcctcccgagaggacagcggaacccccttcaccgccaggcgatagaagccgcggtggccggccggaggcccctcgcatcagtacggttggggcacacataggctgagccggcggccatgaggctgcccgcgcgcgggaaggacccgcgtggctgaaggccccacgtcagggcctggagttgccacccgcgtggacggtgagcccggaggcgcgggctggccggggtcgccgcgcgcctctccgctcagaggggtctctccttcgccacgggcctgagatgcccgcgaaccccctgcccgggagaggccgccctcggggccacctggcggtcgcgctcgggtaccgggcaaggcctgggtctggctgctgagggagcttggaattaccccgggtggccggagggagaaggggcgggacgaccgcaaagnnnnnnnnnnnnnnnnnnnnnnnnnnnnnnnnnnnnnnnnnnnnnnnnnnnnnnnnnnnnnnnnnnnnnnnnnnnnnnnnnnnnnnnnnnnnnnnnnnnnnnnnnnnnnnnnnnnnnnnnnnnnnnnnnnnnnnnnnnnnnnnnnnnnnnnnnnnnnnnnnnnnnnnnnnnnnnnnnnnnnnnnnnnnnnnnnnnnnnnnnnnnnnnnnnnnnnnnnnnnnnnnnnnnnnnnnnnnnnnnnnnnnnnnnnnnnnnnnnnnnnnnnnnnnnnnnnnnnnnnnnnnnnnnnnnnnnnnnnnnnnnnnnnnnnnnnnnnnnnnnnnnnnnnnnnnnnnnnnnnnnnnnnnnnnnnnnnnnnnnnnnnnnnnnnnnnnnnnnnnnnnnnnnnnnnnnnnnnnnnnnnnnnnnnnnnnnnnnnnnnnnnnnnnnnnnnnnnnnnnnnnnnnnnnnnnnnnnnnnnnnnnnnnnnnnnnnnnnnnnnnnnnnnnnnnnnnnnnnnnnnnnnnnnnnnnnnnnnnnnnnnnnnnnnnnnnnnnnnnnnnnnnnnnnnnnnnnnnnnnnnnnnnnnnnnnnnnnnnnnnnnnnnnnnnnnnnnnnnnnnnnnnnnnnnnnnnnnnnnnnnnnnnnnnnnnnnnnnnnnnnnnnnnnnnnnnnnnnnnnnnnnnnnnnnnnnnnnnnnnnnnnnnnnnnnnnnnnnnnnnnnnnnnnnnnnnnnnnnnnnnnnnnnnnnnnnnnnnnnnnnnnnnnnnnnnnnnnnnnnnnnnnnnnnnnnnnnnnnnnnnnnnnnnnnnnnnnnnnnnnnnnnnnnnnnnnnnnnnnnnnnnnnnnnnnnnnnnnnnnnnnnnnnnnnnnnnnnnnnnnnnnnnnnnnnnnnnnnnnnnnnntgcgcaagggcaacacgcaggagctgcagtcgctgctgcagaacatgaccaactgcgagttcaacgtgaactcgttcgggcccgagggccagacggcgctgcaccagtcggtcatcgacggcaacctggagctcgtgaagctgctggtcaagttcggcgccgacatccgcctggccaaccgcgacggctggagcgcgctgcacatcgccgcgttcggtggccaccaggacatcgtgctctatctcatcaccaaggcgaagtacgcggccagcggccggtgatgcccgccgggaccccggaccccggccctgcgcccgcgtcgtctctgctgtaccttcccgccaactacctcggtgcgcgcccggctcgcaggccccgcacagaaggcccgtggccacggcgaatacggcgcgtgcgtcccggccccagggtccggcagccccgccggccgagcgcctccctgcggcctagccgggcccggccgggccggagcagcttcccacggcccccacccgctcgcctgcccgccgcctcgcgggtgggggcggggcgcgggctccagccccttttgaaatttgagtctcgcaaccagcaagttcggaatcccgagataccggatcctctgcgcaaaatgttttctcccgaaggtgaaaggcgggcggcgggagccgaaggcggactcggagcgctccgccgccgccttcaggacccgcccgcaggcccgggacgcgccgatgccggctgcagccgaggagcagccccgaggtccgaggtccgcgccgctggcgcgcggccgaggagacgctcggctgttcgctgttgctggtgttctaaactatttatcttgtgtgtgtacatttgtgggtggagtttgtgcgcctggtttttttgtttggaaaacactgcgtggtcaatgtggttatgggggggagtgatgcatttttttctagtcttaaaactaaaaacttgagtctaccatttcttggttgcactgaaaataccgcccagcctgatggtgttcccgtgctgtccctcccccttcccttctccccgcgtctacctccccaccccgttctgttccccctccctccttctccctctccctcaaatccgtgagttttggaagccccagggcctctctcccccgcccctcctggatgaggccaccatccccccaaaccggcttgttttgcagtttccccaggatcctggaagctcgctggcgctcgagggtggcggggacacgggggggtgggtgaaggttcgttaccttttctagtgcgttctatcatagttaacggttgcacacttttttaaaaaaagtaaatggatttgccacaattaaatgtcataacatttatgacagaatataaaatattaacatattttaagccaagttttaggtgtattttttgaatcttggttataaacccaattttaaagggcgatgtatccagcgttgtgaaggcaacagagtgtacccatatttatatttttataaaatacctataagactgtgaatctcttgtgctaatggctgagttaattgaaggatcgttttgcccctttttagcctcccagagcttcgaggactcaattcgaacccgaaatcctgccgtgggggaggggttgcgtcgagacctgggcccggggaggttctcctgcgtcactttctgtcctgaaaggcgcccttcctggtttctgtggctccaattttctatgcagccccacaccccttgttgttttgatcctgagaaataaaagggaggctgaattattcaaatttaaatgaggtttccccttcatggaagtgctgctgacccttcgtgcagaaatggggagcacttgaggacacaggtgggtggaggccctttgtgcgtggctggtcgtattcgggcagccctccgtcgctttttataaaactttgtgtgagaagaatatattgataatgtcagtgaaacaagcagacattgaaatggaggcacagattactccacaaggagttcttctgtatattttttctagatgcaaatacctttttaattatgttaattaatgttaagactttctaggcttatatcgaagctgtgtgtgggtcacggggtgatcactgctaactggataaagtttgtgcagcacattcctgagtgtacgatattgacctgtagcccagcgtgaaaaatttataaataaatttttcattgatctttttatattaaaaaaaagtttcttggtccttcttggctttggcacaagttgcagaacaccctctctggggacgagggtcaggctgtgacacggtttgtgggtgctgggtgcacaatgcttggcttgtatttgtctgaagacagagcctggtaaactcgctcccagccccacgcaacggccaagcccaacccggctgcacacaggactcacgaggacccagcacctccagcgtgcccagagctggtgtcacagcctctgctctgttccccagcaaagcagctgagacctccgctggagaggagagttcggcctgaagccctgcccactctgacccgctagggggtcatgctggaggctgcctgctgcacagaaagtgtatcttgtaaattggggggaaatcccatagctgctcactcctggcaggtagaaagtcccctggaggcacccgggagctttggaggcctgcacaggcctggagtcaaaacaccccaaagagcacagaccctgagttagacgagcatcggggccgggcactcccattcgcaagaaaggagagcagagcaggatggctgttgctggcacctgacagaaaggagcagagactcttggtccactcctgagatgcccttggggccctgggggccctgtaccgggctgcaagggagcacacccgcccccagcaagagcagccagcagagagaacttggagaagggcaaagaccgggagttacaaggtaacaacttttcaaacccctctgccgaatgtaaggggaatctgcttccctaaaccgtgtccgcagaagggctgcccttcccacaaactttccccacgcctccgccttcctactctgcactgccgccctgtttacccttggttttccaggcgcgttttccgtcggttacgcatttcctatcctgcagaatcggcctgggagatgggccagctccctgaagcaggctttgggaagtcttgccctgggccagcccgggaatgcccagccgttggaaaggagagtggccacaagaacctggacacgattggggtaaccagagaatgaggtcaggcagccccagtgatggccagggctatgctggaccactccacccttccccacccagggtctgaagaacaaaggtaacatttgttactggcattagcctgcaggtgggtggggtcccagccaattgcttgcccctgcaatatccgggaagttctcccactgcggagaggcctggcctggcaccaggggcctcccaggcacatggctgccaccccagggtactctttgcagctcccttaaattctgtcttctgaaagatacatttgactgagaaaggccttgtgctgctcttctctcgcgcaggaacaaaaggaagcctgcccgggcagccctgtgggcagctgaggagaggagggctgagagggtggagccctggagggggtctgcttcctccccaggtgtcgctgtgtacactgaccggcccggatgactggggacagcctcgctgacctttcttgccaggcacagccctagggggcaggtagacacacactctaagaccaggcacagccctagggagcaggtagacacactctaaaaccaggcacagccctagggggcaggtagacacactctaaaaccaggcacagccctagggagcaggtagacacacactctaaaaccaggcacagccctagggagcaggtagacacacactctaaaaccaggcacagccctagggagcaggtagagacacactctaaaaccaggcacagccctagggggcaggtagacacacactctaaaaccaggcacagccctagggggcaggtagacacacactctaaaaccaggcacagccctagggggcaggtagacacacactctaaaaccaggcacagccctagggggcgggcagacacacactctaaaaccaggcacagccctagggggcgggtagacacactctaaaaccaggcacagccctaggggcaggtagacacactctctaaaaccacaattttcttcccacctctgggggtcagatttatgaatgaaatctcagctgggagggtccaggtgttgagagcccaggaggacggtccggggacgctgagcacagcctacgggcttgtccttgttaggaagcccggggtagcacattcctagaagcagctcagtggagggggaggctggccacctgtgcgccaagagtgggcctccctggccacaaggggaggggggggcagctctggggtatgggcaaaaaggaggaagtacctggtctctgggtatggccaggtcgatgctgctatgtgtctctgatgcctgtttccctcctgagttcaggggcctgtgcacacgcttcttccagtgcttctgtgttcagcaggtcacttactgcagcagggtgttggtaggtattagcagctatggtgggtactggcctatggcagagttactggggagtccccaacccccctccccaggcaggcccctttgtggccagggtgagaaagaaggtctgggtggcccagcctacaccgtcagccccggcctcccagatctgcaggtgtgccttggaggccaggtgaggtgtccggccgagaggcacggaggacagccacggtggaggggctggcaggtgggggctgggtccctgggaacccctgagagaaaggagacagtcccggcaaggtcagggcctgccccacatcccccgccaggactgctgggctcccgtccaactgtctgtctctgatctgaccccggctggaggcaggaagcactgacgttggaacagacgccacggaaagaccaggaaatgcaggaagatggtcagctagaaagagtgatgtctgaagccagcaggcgtgggagccaggacacagcaggccagaggagggtggacaggacttagaagccagggagacgggtgcagggaaggaagagcgggaaggagctgcccgctggggtctgtcccccaaaggcctcatagctcagcacaggttgggacagaggggtcgtggacactagaacacccggcgcacagagcctccgacatcggtaaggccagctgcccctgaagctccctgagcctgcggggaggaggcagcgtccacctgggccttgaaggacgggaaaggaggccccgcgccagggacacctggggaaggaagcctgaggccgggatgcgacggcttggaacacgggaggggccgtggaaggtctgggaacctccgcaactgctgcttccagggcctccagtgcagaccctccggggcttggaggtccccgggaggccgccctccacccacccccgcacactcaggctccaccgcccggagccgctccccccgctggaaactcccaacacccgtccggcgcattcttctgccgggccgtccttccgaccgtcctccgcgcgtgcgtctgtcggtnnnnnnnnnnnnnnnnnnnnnnnnnnnnnnnnnnnnnnnnnnnnnnnnnnnnnnnnnnnnnnnnnnnnnnnnnnnnnnnnnnnnnnnnnnnnnnnnnnnnnnnnnnnnnnnnnnnnnnnnnnnnnnnnnnnnnnnnnnnnnnnnnnnnnnnnnnnnnnnnnnnnnnnnnnnnnnnnnnnnnnnnnnnnnnnnnnnnnnnnnnnnnnnnnnnnnnnnnnnnnnnnnnnnnnnnnnnnnnnnnnnnnnnnnnnnnnnnnnnnnnnnnnnnnnnnnnnnnnnnnnnnnnnnnnnnnnnnnnnnnnnnnnnnnnnnnnnnnnnnnnnnnnnnnnnnnnnnnnnnnnnnnnnnnnnnnnnnnnnnnnnnnnnnnnnnnnnnnnnnnnnnnnnnnnnnnnnnnnnnnnnnnnnnnnnnnnnnnnnnnnnnnnnnnnnnnnnnnnnnnnnnnnnnnnnnnnnnnnnnnnnnnnnnnnnnnnnnnnnnnnnnnnnnnnnnnnnnnnnnnnnnnnnnnnnnnnnnnnnnnnnnnnnnnnnnnnnnnnnnnnnnnnnnnnnnnnnnnnnnnnnnnnnnnnnnnnnnnnnnnnnnnnnnnnnnnnnnnnnnnnnnnnnnnnnnnnnnnnnnnnnnnnnnnnnnnnnnnnnnnnnnnnnnnnnnnnnnnnnnnnnnnnnnnnnnnnnnnnnnnnnnnnnnnnnnnnnnnnnnnnnnnnnnnnnnnnnnnnnnnnnnnnnnnnnnnnnnnnnnnnnnnnnnnnnnnnnnnnnnnnnnnnnnnnnnnnnnnnnnnnnnnnnnnnnnnnnnnnnnnnnnnnnnnnnnnnnnnnnnnnnnnnnnnnnnnnnnnnnnnnnnnnnnnnnnnnnnnnnnnnnnnnnnnnnnnnnnnnnnnnnnnnnnnnnnnnnnnnnnnnnnnnnnnnnnnnnnnnnnnnnnnnnnnnnnnnnnnnnnnnnnnnnnnnnnnnnnnnnnnnnnnnnnnnnnnnnnnnnnnnnnnnnnnnnnnnnnnnnnnnnnnnnnnnnnnnnnnnnnnnnnnnnnnnnnnnnnnnnnnnnnnnnnnnnnnnnnnnnnnnnnnnnnnnnnnnnnnnnnnnnnnnnnnnnnnnnnnnnnnnnnnnnnnnnnnnnnnnnnnnnnnnnnnnnnnnnnnnnnnnnnnnnnnnnnnnnnnnnnnnnnnnnnnnnnnnnnnnnnnnnnnnnnnnnnnnnnnnnnnnnnnnnnnnnnnnnnnnnnnnnnnnnnnnnnnnnnnnnnnnnnnnnnnnnnnnnnnnnnnnnnnnnnnnnnnnnnnnnnnnnnnnnnnnnnnnnnnnnnnnnnnnnnnnnnnnnnnnnnnnnnnnnnnnnnnnnnnnnnnnnnnnnnnnnnnnnnnnnnnnnnnnnnnnnnnnnnnnnnnnnnnnnnnnnnnnnnnnnnnnnnnnnnnnnnnnnnnnnnnnnnnnnnnnnnnnnnnnnnnnnnnnnnnnnnnnnnnnnnnnnnnnnnnnnnnnnnnnnnnnnnnnnnnnnnnnnnnnnnnnnnnnnnnnnnnnnnnnnnnnnnnnnnnnnnnnnnnnnnnnnnnnnnnnnnnnnnnnnnnnnnnnnnnnnnnnnnnnnnnnnnnnnnnnnnnnnnnnnnnnnnnnnnnnnnnnnnnnnnnnnnnnnnnnnnnnnnnnnnnnnnnnnnnnnnnnnnnnnnnnnnnnnnnnnnnnnnnnnnnnnnnnnnnnnnnnnnnnnnnnnnnnnnnnnnnnnnnnnnnnnnnnnnnnnnnnnnnnnnnnnnnnnnnnnnnnnnnnnnnnnnnnnnnnnnnnnnnnnnnnnnnnnnnnnnnnnnnnnnnnnnnnnnnnnnnnnnnnnnnnnnnnnnnnnnnnnnnnnnnnnnnnnnnnnnnnnnnnnnnnnnnnnnnnnnnnnnnnnnnnnnnnnnnnnnnnnnnnnnnnnnnnnnnnnnnnnnnnnnnnnnnnnnnnnnnnnnnnnnnnnnnnnnnnnnnnnnnnnnnnnnnnnnnnnnnnnnnnnnnnnnnnnnnnnnnnnnnnnnnnnnnnnnnnnnnnnnnnnnnnnnnnnnnnnnnnnnnnnnnnnnnnnnnnnnnnnnnnnnnnnnnnnnnnnnnnnnnnnnnnnnnnnnnnnnnnnnnnnnnnnnnnnnnnnnnnnnnnnnnnnnnnnnnnnnnnnnnnnnnnnnnnnnnnnnnnnnnnnnnnnnnnnnnnnnnnnnnnnnnnnnnnnnnnnnnnnnnnnnnnnnnnnnnnnnnnnnnnnnnnnnnnnnnnnnnnnnnnnnnnnnnnnnnnnnnnnnnnnnnnnnnnnnnnnnnnnnnnnnnnnnnnnnnnnnnnnnnnnnnnnnnnnnnnnnnnnnnnnnnnnnnnnnnnnnnnnnnnnnnnnnnnnnnnnnnnnnnnnnnnnnnnnnnnnnnnnnnnnnnnnnnnnnnnnnnnnnnnnnnnnnnnnnnnnnnnnnnnnnnnnnnnnnnnnnnnnnnnnnnnnnnnnnnnnnnnnnnnnnnnnnnnnnnnnnnnnnnnnnnnnnnnnnnnnnnnnnnnnnnnnnnnnnnnnnnnnnnnnnnnnnnnnnnnnnnnnnnnnnnnnnnnnnnnnnnnnnnnnnnnnnnnnnnnnnnnnnnnnnnnnnnnnnnnnnnnnnnnnnnnnnnnnnnnnnnnnnnnnnnnnnnnnnnnnnnnnnnnnnnnnnnnnnnnnnnnnnnnnnnnnnnnnnnnnnnnnnnnnnnnnnnnnnnnnnnnnnnnnnnnnnnnnnnnnnnnnnnnnnnnnnnnnnnnnnnnnnnnnnnnnnnnnnnnnnnnnnnnnnnnnnnnnnnnnnnnnnnnnnnnnnnnnnnnnnnnnnnnnnnnnnnnnnnnnnnnnnnnnnnnnnnnnnnnnnnnnnnnnnnnnnnnnnnnnnnnnnnnnnnnnnnnnnnnnnnnnnnnnnnnnnnnnnnnnnnnnnnnnnnnnnnnnnnnnnnnnnnnnnnnnnnnnnnnnnnnnnnnnnnnnnnnnnnnnnnnnnnnnnnnnnnnnnnnnnnnnnnnnnnnnnnnnnnnnnnnnnnnnnnnnnnnnnnnnnnnnnnnnnnnnnnnnnnnnnnnnnnnnnnnnnnnnnnnnnnnnnnnnnnnnnnnnnnnnnnnnnnnnnnnnnnnnnnnnnnnnnnnnnnnnnnnnnnnnnnnnnnnnnnnnnnnnnnnnnnnnnnnnnnnnnnnnnnnnnnnnnnnnnnnnnnnnnnnnnnnnnnnnnnnnnnnnnnnnnnnnnnnnnnnnnnnnnnnnnnnnnnnnnnnnnnnnnnnnnnnnnnnnnnnnnnnnnnnnnnnnnnnnnnnnnnnnnnnnnnnnnnnnnnnnnnnnnnnnnnnnnnnnnnnnnnnnnnnnnnnnnnnnnnnnnnnnnnnnnnnnnnnnnnnnnnnnnnnnnnnnnnnnnnnnnnnnnnnnnnnnnnnnnnnnnnnnnnnnnnnnnnnnnnnnnnnnnnnnnnnnnnnnnnnnnnnnnnnnnnnnnnnnnnnnnnnnnnnnnnnnnnnnnnnnnnnnnnnnnnnnnnnnnnnnnnnnnnnnnnnnnnnnnnnnnnnnnnnnnnnnnnnnnnnnnnnnnnnnnnnnnnnnnnnnnnnnnnnnnnnnnnnnnnnnnnnnnnnnnnnnnnnnnnnnnnnnnnnnnnnnnnnnnnnnnnnnnnnnnnnnnnnnnnnnnnnnnnnnnnnnnnnnnnnnnnnnnnnnnnnnnnnnnnnnnnnnnnnnnnnnnnnnnnnnnnnnnnnnnnnnnnnnnnnnnnnnnnnnnnnnnnnnnnnnnnnnnnnnnnnnnnnnnnnnnnnnnnnnnnnnnnnnnnnnnnnnnnnnnnnnnnnnnnnnnnnnnnnnnnnnnnnnnnnnnnnnnnnnnnnnnnnnnnnnnnnnnnnnnnnnnnnnnnnnnnnnnnnnnnnnnnnnnnnnnnnnnnnnnnnnnnnnnnnnnnnnnnnnnnnnnnnnnnnnnnnnnnnnnnnnnnnnnnnnnnnnnnnnnnnnnnnnnnnnnnnnnnnnnnnnnnnnnnnnnnnnnnnnnnnnnnnnnnnnnnnnnnnnnnnnnnnnnnnnnnnnnnnnnnnnnnnnnnnnnnnnnnnnnnnnnnnnnnnnnnnnnnnnnnnnnnnnnnnnnnnnnnnnnnnnnnnnnnnnnnnnnnnnnnnnnnnnnnnnnnnnnnnnnnnnnnnnnnnnnnnnnnnnnnnnnnnnnnnnnnnnnnnnnnnnnnnnnnnnnnnnnnnnnnnnnnnnnnnnnnnnnnnnnnnnnnnnnnnnnnnnnnnnnnnnnnnnnnnnnnnnnnnnnnnnnnnnnnnnnnnnnnnnnnnnnnnnnnnnnnnnnnnnnnnnnnnnnnnnnnnnnnnnnnnnnnnnnnnnnnnnnnnnnnnnnnnnnnnnnnnnnnnnnnnnnnnnnnnnnnnnnnnnnnnnnnnnnnnnnnnnnnnnnnnnnnnnnnnnnnnnnnnnnnnnnnnnnnnnnnnnnnnnnnnnnnnnnnnnnnnnnnnnnnnnnnnnnnnnnnnnnnnnnnnnnnnnnnnnnnnnnnnnnnnnnnnnnnnnnnnnnnnnnnnnnnnnnnnnnnnnnnnnnnnnnnnnnnnnnnnnnnnnnnnnnnnnnnnnnnnnnnnnnnnnnnnnnnnnnnnnnnnnnnnnnnnnnnnnnnnnnnnnnnnnnnnnnnnnnnnnnnnnnnnnnnnnnnnnnnnnnnnnnnnnnnnnnnnnnnnnnnnnnnnnnnnnnnnnnnnnnnnnnnnnnnnnnnnnnnnnnnnnnnnnnnnnnnnnnnnnnnnnnnnnnnnnnnnnnnnn

SEQ ID NO: 693 - DNA, 371 bp, Homo sapiens
tgcgcaagggcaacacgcaggagctgcagtcgctgctgcagaacatgaccaactgcgagttcaacgtgaactcgttcgggcccgagggccagacggcgctgcaccagtcggtcatcgacggcaacctggagctcgtgaagctgctggtcaagttcggcgccgacatccgcctggccaaccgcgacggctggagcgcgctgcacatcgccgcgttcggtggccaccaggacatcgtgctctatctcatcaccaaggcgaagtacgcggccagcggcgtgatgcccgccgggaccccggaccccggccctccgcgtcgtctctgctgtaccttcccgccaactacctcggtgcgcgcccggctcgcaggcccc

SEQ ID NO: 694 - protein, 123 aa, Homo sapiens
RKGNTQELQSLLQNMTNCEFNVNSFGPEGQTALHQSVIDGNLELVKLLVKFGADIRLANRDGWSALHIAAFGGHQDIVLYLITKAKYAASGVMPAGTPDPGPPRRLCCTFPPTTSVRARLAGP

SEQ ID NO: 695 - DNA, 109147 bp, Mus musculus
  misc_feature (1)...(109147): n = A,T,C or G
aaaacttgttggttgtgattggacgatgggtcagccagttaagttcttgcctcacaagagctgccgacctgagtttggatacccagcacccatagaagccggccatggtggtgggtgcctgtaatcccgccactgtggagacaggaggacctcagaagttttctggcatgtcatccaggttgaataagaggccttgtatcttaaaagaggcatggtcaagcctggcaaccgtcttgatggactgagttcaattcctgggacccccatggtggaaggaataaagactcccacaggttttcttctgacttttatatacacacacagcacttcagtgtgtgagtgtgtttgcatgtgtgtgtctctgtgtgtgtgtgtatgtatgtatgtatgtatgtatgccagcaaagtgagagcctaactccaaagctaaagtaatgttaaatttagccaggcagtggtggcgcacgcctttaatcccagcacttgggaggcagagacaggtggatttctgagttcaaagccagcctggtctacagagtgagttccaggacagccagagttacacagagaaaccttgtctgggggggggggggaggggggaggagctaaaaataaaaataagatggagaaataattgtggagaccacctagtgtttacctttggacttcatgcatgcacacactcacactcgtacatgcacacacactcgcacatgcacacacacattcactcatgcacgtgcaactttttggccgagagacccaaaaggtcgctaccaattatggtgctttagtaggtcagcaaacagaagagtcaatagtatcatccaggaaagcttagacagtcatgggccttgcttgataaatgttatcaataccagctagaagtgtcttctggccttcctcgggtgacagaacgccaggaatcgtctgaggaagtgaacatgcagacacttctgtagatggggaagaaaccctggagctggaagccgtgggagggaactctggccattccagcacaccagagcatctggaagcaggagcatctggagttgacggctagccttggttacatagtgactccaggctaacctgggctaccagaaactctctcttggaggaggaggaggaggaggaggaggaggaggaggaggaggaagaggaagaggaagaggaggaagacaccactgaaagaagttgggtaaaaaccactttggaaaactttcagcagattcatcaacttgaaggagggccagggacaaggagaacatttcttaaaggggccactgcctgtttctcaggtcgatcttccttcagtttattgcactggaggacagagaatagcgtccttggtagtactcagtgggtctcacccttgtgtggcaggctataaaaagatttgcttatttaaaaataaacaatgtttgtggtctggatccaaccctgctcacatgcttggggctgcctggtaagtgactgcagatgggagccaggctaataatacctatttcaggcccaggaagtgaggcatgcctgcagacccagctactggggaggctgaagcaggcctatcacttgagcccaggggttcagagtcagtctgaacaactttgcaaggcccaggggaagagctgtacatgtctttatcctttggtgtggcagcaaccagggtagcctaagagtagaggctgctgcttagcactctggatcgggaggctcattctagggcctgatatcatgtgaggcaaaaggaagaaagagattgaagggggtgtagaacatgctcagcagacagggaaatgaataaaatgggctctgcctgtcacctagcggccatgatgctgagatatgtgggtagcgggtggagatcagacccaagcagactttcaactggacttcttctgagaaagtgtcccttaagtgctacttgtgctggcacatgcctgcagttccagcatttaaggtcagcctggtctgcatagccagccacagcccagctagagctacacagcaacaatctgtctcaaaaagaaattttcttttaaaacaataacgtataaccaagtgtacaggggtgcatactcaggcacacacacacacacacacacaaacacacacgttttcctttattcgtggctcctagattttacgtggacatatgaaacctgccccagaaacagaagtatgactgccttaggagaaggaaggagactcagcggagcaggaggggtcaggagattgaggctgtggaattcaggattcatgaggaacattcttatatggaaaactaaagcatcagtagaagtcaaggttatttttaccaactgccatggatgtgaagactatagacaggctacatctctgaagaagatacccagacaaaaagagtgcagaggctcagtgctgtgcctgcctccagagatgcaaaccaaggccccagagagataccacgtcccactcatcagagggactgtcgtcagaaaagcataaaaaaacctcagataccggaggacaaacccccaggatgtctccatatcaggccataactagtaatgacttgttggcctgcgctccaacttgagggaaccctgagagtgaggtgctaagtgggtggagccaggtgtgttgtatgaatctgtttagataaaacaggaaaagcaggtaggtccatggtaagctaactcacactggtagttgccagggcctgaggttgaaggccgggaaatgacagccttatagcacatggtgtatgctactaaggtgatggaaatgtctgggtaccaatgggagcaagcagtggctaaacaagctgtgaacacagtatacatcactgaatcatttgcttcagaatggtgagttctagtcgggtgtggcagcacagacccgagattccagctactggggaatggctactttcctggtcctgtgatacttaccttgacctaaacagctgaggaaaggaagagattgtgtttgcttgattttgagacagggtctcactgtgtagactgggctggccctggattcagggatctacctttacagcctcttgagtgctgggatcagtgggataaaaggtgcacgaccctagctgggcagtggtggcgcacgcctttaatcccagtgctcaggaggcagaggcaggcagacctctgagttctagtacagccagggttatacagacacagagaaaccctgtcttgaaaaacccaaccaaccaaaccaaagggattgtgacactacactgggccagaagaaagagtttactttggcttaaggttccaaagggaaaagcagtaatggccagaaaaacaagctttctggcagaagcgggaagctggctcgtcacatcgttatacacacacaggaagcagagaggggacagaaagtggagtgaggttacaaaacatcaaagcttactccagtgatgtacttcatctagcaaagctgcacccccaaaagtatccataatctccccaaatagtgccaccaccaaaggagctacggttttaatacatgacctaccaggggacacacctctttctaaccactaccgggggcaaagcctatctggaccacctagggagttgcaggccagcttgtgaaacttagtaagaccctatctcaaagcacaaagttaaaaaaaaacaggcctggagctaggcagtgttggcagaggcaagaggatctctgtgagttcaaggacagcctggtctacagagggagttccaggacagccagggctatacatagaagccctgactcagaaatgaaggaacaaacgggactgggagagtcaggcatagttgtgtgtgtctggaattccagtacttgggagggggaggatccagtgctctggttttcttttctgctccatacccagtttgaagccagcttaaactacatgagatcttgtctcaacaaacaaacaaacaagccaaacagaaagtctaaagattaaaagaaaatagaaagccagccagtggtggtgcatgcctttaatcccagcactcgggaggcagaggcaggtggatttctgagtttgaggccagcctggtctacagagtgagttccaggacagccagggctacactgagaaaccctgtttcaaagaaaaagaagaaagaaaacagggctggggtgtggcctaggcatactaactacatttacctagtatctctagtactacaaaaacagatgaacagaggccacaaggcttgtcaggtaaagatgcttgctgccaaacctgcgctgacttgagtctgagcccctggacccacatgatggacagagagcctaatcccatacgttaccctctgaccttcacataagcactgtgccatgtccacaaacatacacagtaaatacatataatataatataatataatataatataatataatataatataatataatgttgagagacaagccaggccaggcatgttcacattcctgtaattctatcttgggaggtagagacaggatttccagggcaagctggttaacaagaacagcaaaatcattaagctttgtgttcaacaaaagaccctgcctcagtaaaaataaagtcccaagtagtaagcggtcaggggagatagctgatgctaacctctgacctccactttcatttacacacacatacatgcacacacacacacatacacacatacaagacagcttggcctggggcattttggttgtggctgtaatgtcaaagggctaatctgagacactcctctgtcttcagaaatttaagagccaaggtgaatgctgcaggagacagctgatcttcagctggaggcggagtccggggagttcctcccaggcgctagaaggactatggccctgtttagggccctgtttaatgaactgcagaggactcttgttgctagactctgttgctaaataggttggaagggctgagctgatgctatttaagaatacacatggatggagctggacgaagggaaaggaattcctctccatggaagttaagttctatcaaagcagctgttaattgatctactactactactactactaaaaccagcatgggggatgggagctaaagctcagataatggcgttcactgtatggcatgtgtggtatgtccgggattgacatttttctgccttattgtaattacagtgcttggccgagtagacctctggttctgttttaaaaccactacagttagatggactaggcacgccacacagtttgcctgtggtccaggtcaattccacaaacacattattgtgtttgggtgggcagggtgctgtgggaacccacagggaacctctcttcagattctccaagatgagatttctagaaatggctatcatggttttcactatctagaatccatctattctgaatgtctagttttattttattttattttttttaaagatttatttatttattattatatgtaagtacactgtagctgtcttcagacacaccagaagcagacacaccagaagagggagtcagatcttgttacggatggttgtgagccaccatgtggttgctgggatttgaactctggaccttcggaagagcagtcgggtgctcttacccactgagccatctcaccagcccctagttttatgttatatcagaaatagactggggaaaatagcctgtagtttgatgtgatttttggaggtccttattttgggcttcttgtcattttcgtctgattttccttgctgaggatcaaacctgagacctctcagaggctggaaagtactctacccaacctgcttagtgcttttctatttttattttttagattgttattattttatctcatgtttttgaggcaaggtctcatgttgcccaagctagccttgaacttgttaagtagctaaagattgcctcgagctccctgatccccccccccccgccccccagcccccaagtattagcattataggctgcaggtcctctgcaagagcagccagtgctcagaactccccttcgctatctccctagcccagcagatcccttctcatcgaacccaatcaccctctgaccgcttctgtagcaggctttccttttcctctctgctctcgcaaacagtgccccttgaacacagcaacacaatcattttaacatttctgtttccgacacacttacactggcccgcaccaccatgaaactcaagcgcggagaactgagctagctgtaccacaggttacccgtgggcacagcgactggggtgccctgccagctcagcaggggtgcggtccagctggagcagcggtttccctgcactccctctgaatgccttaccagactcgcaggagatgaatgctctaggactttgaaacgctgccatcttttcaagtggcaggccgcttttagcccttcatccctgggctacaggaacaccaagagaatacaaactaggatgggtggtggatgctggttcagtcagacagactcagggcggatgtcctctgttagggaaactaactcaaagtactaccagatacgcatggatttccacttgtttataggaaagcagctcatctgaccttgctcccctggtgggcacggctccctgacttctatctccagcatcatggaaaatgggcatggggccacacaactaaatctctttaagaacaaaaaccaacagcagtaagacccccatgggtagctattgattatgtggctgaggggaccttgaacccacagttctcctctatctctccagtgctggaactacaggcctgctccgccatgtctggttttatggggtgctaaggactgaactgaaaactttgtggctgctggtcaagcatctcccaggccacagagtatctgtcttttgtttgcgagtttacattttattttatgtatggatgtcctttgtgggtgtgtgtagaggtcagaagaaaacttgtgggaattggttctccccttctaccacgtgggtcttgggattgaactcgggtcattaggcttggcagtgagttccttagcctgctgggccatcttgcaggtccccaaagtacctatttggatgtattgttgatgtacggttggcatgggaatgaacgagtcattctgccttggggacagagtcaccccactggtgtggcttgtatcacacaggcattgattcacagggcttcccctcttagtattcagattgggaacttcgatgaaaaccacagcccagcagcctcactccctgaatctcgatagcagttggggtttttggttttttgttttattttgtttttgtttttaaaatctattgaggtcttgtgaaaacagtcccatgtttgtatagatgaagtcagtaatgtgcccatctgaccacttgaaaatcttgaggtttcttctgtttgtcaggccacccccctcaaagaccaaaatgaacaacaaaaataagcctgtggggtaactcacttccttccagttaataccagccaagtcagaatttttaaggcagatttgggttccagatggagcagccgtggttatctgattggaaatctcgctcactgatttgtgctaaatatcagagcaaattacaagactggccataaaaaatgatttattgaaacaggatctcctctctgtggaatcctgactgttctggaacttccctataattcccgcacttgggaagcagaggcaggcggatctctgagttcgagccagcctggtctacagagtgagttccagcacaaccagggctacagaaacatgcctcaaaaaaaaaaaaaacaaaaaaacaaaaaaacaaaaaaacaaaatgaaacaccagcccaaaaaaaaaaaaaaaaagtgacctaaaatgcttcttaaatcatgccacagatgtgacctacattcggagtcactgtcaaacccaggaaggccatgtatgaaaacaattcagaaagtctccctagctgccagctcctgttggcttttctctggggaaaaaaatggaacagtttgactcacccctgcctccctagaagaggatgactaagaacttttgattcaagcctggtagtggtggcacacgactttaatcctagcacttgggaggcagaggcaggcagatttctgagttcgaggccagtctggtctacagagtgagttccaggacagccagggctacacagagaaaccctgtctccaaaaaaaaacaaaaaaacaaaacaaaacaaacaaacaaaaagaacttttgattctcccagctccacatgcctggtcctaggattatgggctttggcacccaggctatgaaacactgggatggggcccagggctctttgtgtgctacacaagcactctagaacctgaagcacttcctcaaccctcgattggcatgtgtgtgtgtattagggtttcaccaccgtgaacagacaccatgaccaaggcaagtcttataaggacaacatttaattggggctggcttataggttcagaggttcagtccattatcatcaaggtgggaacatggcagcatccaggcttgcatggtgcaggaggaactgagagttcaacatcttcacctgaaggccgctaggaaaagactggctctcacatggttaggaggagggtctcactgcctacccccacagtgacacactttctccaacaagaccacacctcctaatagtgtcactctccaggccaagcatattcgtgtgtgtgtatgggaacatgtgtttatgaaactgcacacccatatgaacacatgaaggaccaaggaagatattggttatcttgctctaaaactctgcctcatcatctcagggcagggcctcagtgaacctggagcttgctgttttccagcaaggctagcagccagccaggaagcccagcagccatcctaaccccctaccacacacctcagggttggggtaccagggacacatgcagtggccctgcttcacgttccactcagtgatggggctccaagctcggttcccatgcttgctgtgcaagcactcggagccactgagccatctccccagctctggtcaacttttacacaaggatttatttggttttgtggacagtttcctcctggctggccttgaactcgaatatctgcctgcctctgcctcttgattgctgggactaaaggtgtgtgtttaggaattttcagcatggaaataacttcttgatgcctaccttcaaagaaagccacgaagacatgaaattagaaaggaggcggtgcttcggaggatggtgtgttgccaggcagctagtgtctgtccatcatctgccctactcacaactgtcatgtccaaggaccaggagatagctcagtggataactttcttcataagctagatgctctggattctaaggatagtttcctgtattcccaactagccttgaacatttatgtctgccacacgtgcttgcctggtacctgtggaggccagaagagcacatcgaattccctggaactagagttacccatggctgatggctgagagctgccacttgggtgctgggaatcagacctgggacctctggtagggcctcgggtgcttttaaccgctgagaccatgactttgaagtgctgacccttctctctccacctcccagtgctaggaataccaccacagctggattatgcagtgcagaggatggaacccagggctttgtgcatgctaggccagtgctccactgactgagccacatcccccgccccatgagttagatgtttactagcttctcaagagcagcagactttcattgatgacagttgcagtcttcttgcagagcatctgccactcattatcctgcttctcagaatagggagccatgcacgggaacagctgactctgaccgatgcccagagcggttcagtaacgggggtggggtgggggtggggggtgttcctttgacttgagcatgcattcagcgaatattgattggaggatacccaggctttgtgcctctggacctgtgtaacaggatgtggtgaatcccacacagtaagaaggagggggcccgtctggggttatacaagccatgccagaagcacatcatggaagatggcctgatgaaaggggagatgcttttggcggtgggttggacatgtaaaaagatggtaaggtggtgaaaaagaaatcctgggctgtgggtttctgttttcattttttaaattcattgtgtgtgtgtgtgtctacaccacagcacacatgtggaggtcagaggacacttgtgggaatcagttgtctcctaacaccacgtgggacccagggatcaaactcaggtcgccaggctacaaacatctggcctctctatttcatgttaagtggcctgtttataaaaaaacttttttccttttagtaaaaaatattaaactgaaacaaaatatctctgctattttagcatgtggtactgtctaagaggaaatgaggctacagccaggcaaaggtagattttttttttttttttagagtgtgtgtgccagtgttctcttgggtggggagcacgtgtatgcatgtgtgtgcctgtggaatccagaggttgacatctgctgtccttctgagtcaccgctttatttactgaggtgggggttctcactgaacccaaagcttgctcgttatgttagtctggctagctggcttggcccagagatctgctctccacctcccatagttagttatctactgggcttgtgtgtgggtgctggaggtccaaacatgagtcttctcaggagcacagccttctccgcggggtcctatctccagtccccagatgttattttcataatagatcttgctttgcatgacttccttagttgcctttaaagtaatgagctgtgaaccaagtccatatggtatgcataggtaaccacaaagagatgtttgctgaggaagctttggctcttatacagaagtgtaaaatggcatggggaccttccaggacctgccccgaaggtcaccaagcatttagtctatgcatcaaaaactgtcttagccagtttggtctgctgttgttaaagccataaaatcagtggctcatgagaaccatttatccctcccgcttctggatactgaaggtccaaggtcagaggctcgcagacatatggtgtctggtgtgggaccacttcctggcaggcagacactaggcactgccttatcatttaaaccgatcttagcagaagttagaaggaagctgccgttactggggcagcaatcaatctattcatatcatgaaggcccctcttagtttggattggatttgggtcacgtataacattcagtctatagcaattatatataaaatttccttctttttttttttttnnnnnnnnnnnnnnnnnnnnnnnnnnnnnnnnnnnnnnnnnnnnnnnnnnnnnnnnnnnnnnnnnnnnnnnnnnnnnnnnnnnnnnnnnnnnnnnnnnnnnnnnnnnnnnnnnnnnnnntcagttctctcctactgtgtggagtcaggattcagactcaggttgttagacatggtagcaagaactgttacctttgacgcatgcctttaatccgagcactcgggaggcagaggcaggcagatttctgagttcgaggtcagcctggttttcagagtgagttccaggacagccagggctacacagagaaaccctgcctcgaaaaaacaacaacaacaaaaacaaaacaaacaaacaaagaactgttacctgctgagccatctttcaggtccctacaaaaaataaaaagaatttattcaaaatgtaacacttaattacctgaaggtataagagcttccccaaaacaatacaagaaatacaaagtccatagaaaatgaggaagtattaagtataggaacaagaggaaactccaaaggctggggaggctcagtggttagataggtcagggttggtggtggtgcatgcctttagtcccagcacttcagaggcagggaggtctctgggaacctgaggctaacctggtctacataagaagttccaacgccgggcttgaaacagtctgtgctggctagttttatgtcaacatgacacaggctagagtcatcagagagaagggaatctcagttgaggagatagatgcctgcagaaggttgggctgtggatagccctgtggggagttttcttaatcagtgcctgtaggggaagcttgatggcctcggctgcagctcctgcctccaggttcctgccctgcttgagttcctgtcctgagagccttcattgatgagcagtggaagcataagtcaaataaatccttaactccccagctcactttggtcatggtgtctcatcacagcagtagtgaccatggctaagacacacagagcttatgttacttattgtaaaaaaaaaaatttgtgcttacaacatccatgaacattttgattgacagggaattaaattatctacactcttggcttttagacaatattaagcctgaactttctctcctttcttcctctctctcttttttaagttgtgtgtgtgtgtgtatgtgagagagaaagagagagaaagagaatatgagaaaaaaatatgagagagagaatatgtaccagtgtgcagagaagccagaagagaagaagaggacacggagctggggttatagatggttgtgagctgtgggtgctgggaactgaacttaggtcctttggaagagctgcaattacttttaacctctaagttatctttcttctcttcctctcccccttctctctctttctctgtctttgtctctctccctctccccattccctcctctccccctcccctccctctcccatccttcccccatctctctgtctctttctttctcatgacagggactcaccgcagcccaggctcaattcaaacttatgatgatccaatatgcccaactaccctgattgatttttaaggttttttgttttttgttttctctttccctaagtgtgaaagcttgtatgcaattgataaacaatccatatgtgggcgtttcttggtgccattttctgaaggatgatttcaatttttttatggagacaaaataggaaatgtatcaatcaaagaaaaaaatcatagttcaatactttgtgacaggctttggaaaattgatgtcggtatctctcttccaaatgatttgtcttcatttttttgtcactggttggcagaggctccagtagccttatgtttctgtcatcctgaggattttcccatcagcccaattacagataagctcataaatgtttacagactaaatatttgtgacatattacagagggatatatgaaattatgtttttctattgtgtatctgtacacacacaagcttgtgcgttgggtgtatttatattggaatggcgccacgattagcttccttgaagtttgtgatttttttttttttttggtttttttcaagacagggtttctctgtatagccctggctgtcctggaactcacttcatagaccaggctggcctcgaactcagaaatccacctgcctctgccttccgagtgctgggattaaaggtgtgagccaccacgcccggctgaagtttgtgattttgtaagcacacttatacctagtttattgtttggggcagagggcagtgtatccacaaggccagaggctgacattaaatgtcttcgtcagttgctctcgtacatgttttttttagacaggctttattagcaaatcaggagcttgctagtttagtgacactggctggccaggacatcttcctgtctcttcctctcgggggctaggatcccaaacgaggcttctaggcttctgacacgggagatgctaactggggtcctcatatttgaatagcccaatgagccttccctcttcatccttgtttacttttatgtatgtgtaagtattgcaccatgtgcctgcagcggcccttagaggtcagaagagggtgttggaccctggaagtagagttacaggctgctgtgaactgccatgcgggtgctggaaactgaactcaggtcctctgcacgaggaagaaaaaaatattctttacaactgagacatctctccagccctgcctatggtggagtttttgtttggtttgttttgagacagggtctcacatatcccaagttgctctcaacgttgctgtggcaccaagaatgtccttgaactccggatcttccaacctccacctccctagtgctgggtgtacatgtgtgcactgccgttcttggctgaaattcttcattttgtgaagtcttggttgttgtgtaagtctctttccttagtgtccgtgttgtgacagaatgcgtgctttagtatgtctgtgtagggcaaaacatttgtatatttatttgcttcaaacgttggactggtgtgttttttttccttgcctctaagacaagctcttgcttatgtgacagccgttttctcactgaatgtagagcaactggtaatacttgttgctaattatagcattctgccttctatgtaacaaattagaatacccggaaaagaggagacagtcaatgataacacgaatgcaaataaattctttttcttatggtagagtaacttcaatgtcaatacttagaagatccacatatatcaaggaaaatattttctaaatgaaaaccttgtgtgcttgctgtcataaaacataatgaaaagcagcttggggaggaacgggttcatttggcttataggttatagtcagtcactgatggaagccagggcaggaacttggaggcaggaactgtatgtagcagagaccttagaagaataccgcttgttgactcagcccctggcttgctcaggtgcctttcctattcagcccaggcctacctgtgtagggatagcactgccctacaaaggagggctaggctaggccctccgatgtcaattagtaattaagttaaaagccccacaaacagttcataggccagtctaatggaggtaattcctcagttgaggttccctcttccctggtacatcacgttgacagctaaggctaactatgccaccagtgaataataggtaatggtgcccagtaaaagcatcattttcagtgtaaggtggactggtgggtttcattgtaactgtcaaggatgttttgttgccatggttagttactatggctgcagatatcatatggtgcctactctttgggaaactattggtgtgttacccaaggaagagatccggctatctgcaaaggccattgagctactcttcttagggctgaggatgtgaatcaatcaatgtatagccagcgcccagtatgccaaggagtttacccacagccccccaccacacacacacacacacacacacacacacacacacacaccactttaaaagggtaaagacttgatcaggtgcacacctgttataccaggacttgagaggtttagaggccgaacccaggagtccaacatcatttgtggctaggccagctagacaggccagctctcccctgaccctcctctgcctgcctgagtgcatttgtctttcttcccagcttcacctcatcaagaatggccacagaaacagaagcagccagtctctgtgaggctactcttcccactagagagttttgtttagaaaactgcagtttctaagcacaaaaatggttgacctcggatacatgacaatccttccattgcagcctcccaggtgctgggtagcgggctgccccacctgggcacatcaggaaggaatatattctcgattctcgataacaccaccatcctcgctggagtctgggatagttttctaaggaccatttataatgtttgccacaaaggagtctttttgagatttggaatttcttcccgttaaattttccacattttagtcaagaatgtaagtgggccgattggtttttcatctgttttgaattttcctgtggctgccttgtccttcaatagtagcggtggggcgtggtcccttcagggatgccttaacatcgcctacggaggatgctgcgtggaggcagcaggcattcatgtattcgttgctatttgaggctttgctgtgaggattctctgtcctgtttggatcctgtgctttgagaaatagctttactacagttggcaaagtggttttggtagctgataactgttgaaagcacattgctgaggtctggagtgtagtgcagctgatagagtgcttgcctcgcatcacaaagcccctgctttgatcgctggtactagcttggcgatacatgcctgtcattcctttgtgtgggaggtagaggcaggaagatcaggagttcagggtcatcttggcttcatagcgagtttgaggccagcctggactaagtaccaccctgtctcaaaactaaagccaatggaaacataactggtcagtgaactttaaagggaactcaggtttctttttgtttgtttgtttgtttggaagaacttaaggctatccacccttgctatagagagtgtcaggcagctgtctcagggagactgtcagcgagacagtaaaatccaagagcagaagctgtcagagttttcagaggtaatggcgctgtagagaaaactcaaggggaggcgggaagggaagacttgtcttgttttcactgctgaggctacaaccttgaacttcaccctttgtactactgagctccagccccagctcgtgacatatatatcaatatatagatatagatatagatgtagatgtagatgtagatgtagatataaagatatataggtagaaagatagacagaggatatgatatattggagggatgtgtgtgtgtgtgtgtgtgtgtgtatatatatatatatatatatatatatgtgggggacatgtgtgtgtgcgcacgcgcatgtgtggggaggccagaggttgacttcagctgttatcttcagacacaccatctaaacatctctttagatacagggtgagtaagctggctggtgaaccccagggatcacctgtctccatctacccagcactgggcactttgacctgggtgttgtggatcagacatggtgttcatgccttcaaggccagtgtgttaaccacagggccatcaccccagctattacttttctgtaaacctggccgatatgaaactaaaccaagacagggccactgaccaacagagtacttgtgggaagtctcggcctgagtgctgggagctcttcattcatagccatcacttgagttacttgtgtatttgcctcttccggttgtttacagaaacctgccgtcttgtttaccccgctcatttgctcagcaagcctcctgtagagataacataaataaataatcttctgagcagtgtttcttacaatggactctgggaggcgtgggggtggatcgagaaccaaaaaaaaagtgatgagaattttaaatcttcgtcctttgatttttacgacaacattttaaaagatgggttgtaaggaccaacacttttcacaggagttatcttcagggcattttagtggcacaagactccgtgtgtcctaagttgacacttctttgttctctgctcctggctacaagcaaggctaaggtcattaatctatagatggtgaccgtaagccagtaatctcagcattagctgtcaacttgatagtgtcacctaagaaaaagagtctcaattgagggaatgtgcacaccagatcggcttgtggacatgattgtgggtgcttgctttgattgttcattgtttcgggaggatccagcccactgtgggtagcaccattccctagacgggtggtcctggacctcataagaaagctagctaagcacaaggctctgaacaagcaggcagtcagcaccctccacagtttctggttgagttcctccttgaattcctgtcttgcctttcttcagtgatgggctatgagctagagtgtaaaccgaagcatacactttctcctctctgtcgtctctagacagggtgttttatcacagcaacaggaaggaaattaggacacatgactctgattgactcaaggctgatgcagaagcggaaagcacagctcagctccagccttcaacaaagctgtgttgtgtttgaagaggtcgcatcacataccagggatcgagacaagagaaagcttttagaaggggtgggtgtgtatttgtggggtagattgtggagatgattggtatcatgggcacacacttaccttcagacacttcgggttatatgtgttaagtgtgtatagctttccttgttgttggcagaatctcattatattgttcaggctggccttgaaatcttgggttcgtgtcctcctgtctcagcttcccgagaggtgagattttaaatgtacacatcactgtgtgcagcctctttaaaaagaagattttattttatttgtgtggggggggggggggtgtatgaaagggtcacagcgttgggaagattgaggccaccactccagggcttccccagcccccacactgcccacacaggcttgcagcacttcctagactttttcttagagtttaatggaaacagtctcaaatgggtccagtggcttagggtccaggttctcattgtgcccctcaggttcatggacatagacaggaaggtgggacggtacttatatgacaagatgcagttcccacccacttcccaaccaccagctacacacatctcactacacatctgccagcaatgcaccaactacacacatctcatctcactacacatctgccagcaatgcacctacttgtactcctcctcttccttcgagttcttnnnnnnnnnnnnnnnnnnnngttggcttgagatgggggggggtttctctgtgtagctctggctgtcctgaagcccccctctgaagaccaggctgacctcagactcagagatccacttacctctgcctcccaagtcctgggattaaaatcaccagccctggtaggcgattttatttttaattattacttgtatgtatatgttcatgagtgtaggtttgaccacgtaagtacagtgcctgtggagatcagaaacttaagatcccctggagttttacaggacaaagagccatatgcgaccttaaccgttgagctctctcagctcccctccccctcttgtgagatggcttcttattgtagaccaggctgttttcaactttgctatgtagctgagggtgaccgtaagcttctgatcttcctgcctctactttccgagtgccgaatttacaggggtgcgggccacacacagttcctgagggattagagatagaacccagggctgcctgggtttgcactaagcaaacactctaccaactgagctgcagccccagcgctgtgccagtggcagtcatatctcagggatggggctggaaagaatgcccgaagtgtgccagttatatattgcatgtcttaagaccttgcatgttttagagaagtgaagcagggattcctgggcatgccagggacacctagcagagctgttgagactgtgtcagtgaagtcctggagctggccagaccctcgttctctcctgaggctccctctgaggcagcagcacgcctcccatctgacctggctcgaaactcttcccgggatgctctaatgcattctctggctctgttccattgctctccggctccgcttcctgggccagtcctccctgctgctcctgtgtgaggctgtcctccccctggcactctgatctgtggctgtagcctcagaccatccacttcccgacatcctcctgcgagcttggtccatctgtgcttgcaggctctgctgtgtgtaccaaaccctttattcacatggccaaagtgcactgagtcttcctcccctgtgtggactatttctttatgtgcaggaagcagacccagactcaccctgaagcccttcccccttttgcttgcgtctccctcagagtctgcagccaatctgtcacttacagtagcatttgccaagtgtcagcatggcttcctcctgctgctctcaccttcagactgtggggacagtctccgggcagatctgtggtcacgattttgcagagcagcttgtgctttctaaagggtccaagctccttctctgtgcattgaaggccttggaaaatctgaccctacaccctctccagctccatcacccctgcccataccctggtgccctcccagcctcacctgcactcaagggacacaaacccatgggaatcccggctgtctccacaaccaggcatcagcagtggctggcacacttacccatctccctcttcaaagcagaaacccctagcctctgtacaaggtgtagtctaacctcgttcagttttggttccctgggtccaattgcttttttgtctgtgagacatagtgtagcgaagtccacagtgagatgtcttactcacttgagaaaaagcaaaatgtgataactgtaccctgaccctttctgctctccaagtgcaagcagctggttctttctttaaaaaaaaaaaagatgcagggtgggatacatgtctttaagcccagcatccctgaggcagaggcgggtggatctctgaattccaagcccctggccacttatcaagttccaagccagccaaggctacatagtgagaccctgtctcaaccaaaaagaggggaaagctagagagatgacccagcagttaaaagcactggctgctttttccaaaagaccagggttcaattcccagcacccattactgcctgtaactctggatccagggacccgagaccttcttctggttagcatgggtaccaggcgcacacacttggtgcacttacgtatatacaggcaaagcacccacatacataaaataaatataagaaattattttttattttattgggtaagtgtgcgcacgtgtgcatgagggtacttaaggagtctaggaagggtttctgatatacaggagctagagttaaactgtgagctgcctgacatagatgccgagaagcaaactctggccctttgcaagagcagtaagtgctctttactactgagccatctcgtctgccctagagtgctcctatgtgtatgtgagtgtgtgtgtgtgtgtgtgtgtgtgtgtgtgtgtgtgtgtgtgtgtgtgtgtcacctgtcagcttttggcatctgagacattttcttttgtaatggaacattaattatatatagacccaatgtgtctaaaaggaggagagagcagggatgctaactctggacgatgctcaaaccaaatttggtactgttgatgtaaagctctcaacagacacccccaccctcagtggcatcatggaaaatgctagagccgctgtcttggaccagtgaatgatggagagggtggctccctggaactggaagccatagagagagacaataaacttcccccttctctctctcttttcaaacaggatcagtttgacaacttggaaaaacatacacagtggggaatcgatattcttgagaaatacatcaagtttgtcaaggagaggacggagattgagctcagctatgccaagcaactcaggtaaggcagcccggagagacggctggggtgttgcacacacaaaaggctcatttctcttttttattaaaacttttattacatttatttatttatagggcaggggagtgtgtgccggggtgcttgtgtggagttggaacacaacccaaggagttggtttttctctccttctatggtgtgagtcctggggattgaactcagatcatcaagcttggcagcaagcctccccaccccacccctgcccccatcttgcctgccagaagcaagcaagcatgatttctgttctcatttcactgtgtgtgtgtgtgtgtgtctgtgtgagagagggagagagagagagagagagagagagagagagagagagagagacagtttcttgtgaagtaatatatcactggaaatagctgtgatggaaaattaatttttatgaaagcaaaattaaaaaaaaaaatctgttaacttaggtttgctcagttttcatgtgtgaggcaaggcctcatgtaacccaggctagccttgaactcattgtataatggagtctagccttgagctcctgcctccctgccttcacttcccgagtcctggggttccaggtgtgcgcctgagctcagtccctgctttaggtactgtgttttgttatggtttcttttgctctgctgtgttctggtttatttggcagcacttcccaatgaagccagggtcttgtgcctctatgtaaatccccaccccaactccatcctctgcacccggcctctaggctcaggtgtttagatttttatcctttttttttttttttttttttgtttttttgtttttgtttttttttgtttttttgttttttttttttttgagccagggtttctctgtgtagctctggctgtcctggaactcactttgtagactaggctggcctcgaactcagaaatccgcctgcctctacctcccgagtgctgggattaaaggcgtgcatcatcacacctggcggatattttttttcttttaaattttttaaaaattgtatttacattggttatctgcctccatgcatgtctgtatgagggtatctgatcccctggaactagaattaaacagttgtgagctgccatgtgggttctgggatttgaaccctggtcctttggaagagcagccagtgctcttaaccactgagccatctctccagtcctgtttttgttttcttttagtgattttttttcccctttaattttggagaaacttggctaccagtaaatttcacattggaatacccatttgtaggtgacccccacacgtagggctctcaattagcccagcctcccaaggatccccaattctcccaagtaacttggctccacagagtctgctgtgagtttccctcggaggtgagccctggctgtaatccttaagagtccgactttgtcctgcaccggttgtaagcttcgtctgcactgtggtcgtttgtttgttttcattgcctttatcgttttgtgatgcgggtcttcaaggtttcttgggtctgctgtcacttggaagctggctgtccccattcctggtgattcccccctcttttttttctcttttaaaatttaattacattatctatttatcttgtgtgtggaggaggtgaacgtgcgactgctgcatcctgtgaggtcagaggacaactcccgggaggtggttccctccaccatgcgggtctctgggattgaactcaggctggcaggcttggcaccaagcgcctttgcccaccgagccatctcgccagcccagcacactcccgctgtgcatatctgagcccttttcttcctttattgtaggagcaggactgtgttgacagagtgaaactctgcctggctttagtaagacttggactagttagtgtttgcagtgggaatagtcccaggaggcaggatttgaaaagaactgtcctaaagaagatcgattttagctagttccaggcacctgtccccaaagagacaagtcaaagtaaaaaagcagagaaaggagactcgccacactgggaagagaaaccaggaagtccagaggcctccgagtctgtccttgggtcctgacaggtcatgtaaatataaagcaagagtgtacagggctaggcagtcttggtccgtcatggtctgttcatgtcttagctctagtatgtcctgcatggtgatgataaggtgtctgaagttttcatcatcacaataacaaccagtgtgtgtgtgtgtgtgtgtgtgtgtgtgtgtgtgtgtgtgtgtgtgtgtgtgtgtgtgtgagagagagagagagagagagagagagagagagagagagaagtgtgtatgggaggtgtggagtatgtgtgtatatgtgtgtgtgtttcgtatgtgggaagtgtttgtgtgtagggggaatatgatatatatgtgtgggaagtgtttgtgtgtgttgtgtttgtgaagtgtgtatgggagtatggagtgggggggagtgtttgtgtgatgtgtatgtgtgtggtatgtatgcggtgtgtgtatagtgtgtattgtgtatgtgtgtgtatgagtgcatgcctgcatatgtgtgtgtgtgcgcgcacacaggtcaaaggcaactccctggaataggttttctccttccacctataagcatgttcctgcccttccagcccagctttagctcttttagccccagcatgaagttccttgggacgttttagtttctcaaaggccgctgtttgaaaggaataaggcatgcgtctgtattctgttctctgtcccgcagagagcgagcgcatgctctttccttaccctttaagatctgagaaattatgtgggacataagatattttaaaattgttgatagaggactggggcccgagttggctaggaaaggcttgtctatgtcccatggggctctgggctccgtccccagcactacataaactcggatagggtacatcacagaagcacctggaggtggaggcaggagaatcagaagttcaaagttagcctcagctgtggcaccagctgacacattctgtttacattgagtagctggcctacagaaaccaaccaagaaagtatgttctctactgtctgggtctagatcaatccctcgagttctgcaagaggctgggtctcactcgcaaatggctgctataccagttagtcccaatctgttgccattcatgaagatgagttacatgtctggctcatttgggaggcagagttaggtggatctctgtgagtttgaagtggaaggagagccagccatgggtccgttggactttcttagttttgtgtctttgtttctcttgtgcttcctcctggtgcctcagtccaggtgcggtggaggtctgtctgtgactatagtggacatgagagcagtcctttgtcctccttggaagcatccttctcccctggagaccaaatgacagtctcttgggttcctcccacctcgcagattttatccttgcgtccagcggtcagttcgtttctttcctgtctcagtctgcgctctctccttgaccccagctgtgactgtgtgtagtgcctgtggatggagcaatcactcacccccagacttagctctccaactgctcctctcccagactccagaaacagcttacctaaactcataaggatttctaaacaatgccttcctgcatccacacctgcctgacccctgacctttccatctctcctgggagtgtgtggccctctcatccttaggacaggagccccagggctctcctcaccaacccatcaggacacaccatccactccactgtctatactgacccaggatccagccacttctggttggctgtgtgctacctctgggtccaggacaccgttgtctcttgcccagatcattgccagttgcgcctgcgtgctgtcccacctctgctggctttctatgaagcaaccactttagttccttggccactccccatttccttctgattagatttccaaagttcttcccagggaggatgcctaagagtctcgagtgcctgggctcttccctggccaggcctttttcctttacacaggatccctacatggcctccgtgggaaggctggggccagtcagaacattttcctggtggacagctttgccttttctgaataactccgtgcagtgtgatggtacatgcgtccacgcgccgcctggatgctgagcatgctctttgatgtccctgtcttggcgctgtggttatcttgctcctttcttgttaaactagataaagccgagtgtgtttattctatggccaccgctgtggggttttttgcccagagttcgttttctgagtctgacattgcaggtcttgtctgtctgtctcgggcttttctgccattctggtttgtgttttagttcgtctctaatgtgaaatactcttgggagtgtgagttgtttatttttcttgtgtgttttcatttttctccaggctgggttttcccttcttctctccgtgtccttgtccctctcccttgtccttgtcannnnnnnnnnnnnnnnnnnnnnnnnnnnnnnnnnnnnnnnnnnnnnnnnnnnnnnnnnnnnnnnnnnnnnnnnnnnnnnnnnnnnnnnnnnnnnnnnnnnnnnnnnnnnnnnnnnnnnnnnnnnnnnnnnnnnnnnnnnnnnnnnnnnnnnnnnnnnnnnnnnnnnnnnnnnnnnnnnnnnnnnnnnnnnnntaaaatgtaaatggtgggaattttttgccttttaaagttggtgagttacttttctcaccccgctgaccaaataccagcgtagtaaacaaagaagggtttgctctggcttgcagttttagggggacacagtccatcacagtggctggagcttgaggtagctgcttccacagtgagggtggtcaggaagcaaagaggtgacttctacacacttcctcctcctcatgcggtctgagaccccagcccgtgggatggtgccgacccatacagggtgtatcctccctcctcagctaaacctcgctggaaactgcggattgctggccgcaaggcccaaaggggagaacgttggaagtcttctggctgaccccagcattctcattgcgcagtgacgctagcacattcaccacatgttgtcccttcccatctgtggactccgaggacctgggcaaagcgtgggcttgcctgtggtctcaagcttcaaacatggggaaaccctcacaaacgtagggatcccatgggagcatgcctcttctcctgaatgaccctgccacggcccaaagcgctaggagtttcgggacagacaattgctctgaatccctaagttggacctcttccccagcggattctcagaggcagctgtgtccagcctccagagggagcaaaaccaacaggtcggccccagagccggttgcttttttcttgagtgtgtcctctctgttcagtttgcttctgtctgaactggctcagggcagtggccttatttcctcttgtgtccattctaagttgcctccaacatcctccatctctgctgttctcaggaacatctttccaaggtgtatagactgaggtgagcatcttgcttcatttgtttattgtctgataatgcaaactttcccacctccccctctctgtctctctctgtctctgtctctctctctctctctctctgtgtattcatatatatgatttttttatttttatttatttatttatttttaagcataaaagccccagctggctttgggctgattccatagtccagacgggctttgaactcaggatctaccagcctcagcctcattagtagctgggatttcaggactgtgctctgggcagattcctggtccccttctctctggtgccttccatttgctgggcgagcaccctccaccttctgccaccctgattcagatgtctcgtggtaactgttcagaaaaataaaagaacagatccaaacattcctaggctccaccctagacgttctggttcagggcacctggaaaagggcccaagtatctgctgtaaaagtccctgtggatcacagggtcggccagatcagagccagcagcctcgggaactcatgttttcctctccacttgttcgtctacccaaagagctggatgagtataggaacacactgggttcctcagcagatccagaaaacgtaaaggcagtgttctgagggcgtgttttttaaaacaaaaaaacaaaaaaaaaaccaaaacttaatacaaggctggaaagcctatcccaaggcaagaggtttggaagggtttatagagaaagaaccttggactaggggctttggggatgcctcagtagataagcgtgcctgttggccaagcatgaggatatgagttcaaatccctagcacccacagaaatagctgatcgtgaccgtttacatcgataattccagagctgcaaggactggagactcgaaggtcaccggggcttgctggctgccagccgggccctgaattctgtctccaggaaacaaggcagagagcgggagaagagggcacttgctggcctctagtctctgcgtgtgtttgtcgaggcttgggtatgaccacaccacacacttcactggggcatggtagcgcacatctttttttttttttttttttttttttttaaagatttatttatttattatatgtaagtacactgtagctgtcttcagacactccagaagagggcatcaggtctcattacaggtggttgttagccaccatgtggttgctgggatttgaacttcggacctttggaagagcagtcgggtgctcttacccactgagccatctcgccagccccagtggcgcacatctttagttccagcagtgagatctctggatttgaggccagctgactagctactgaattctaagaaaagagtacctcaggcactcaggaggttgaggcaggaggatcaccacaaattctaggccagtctagaccacactgaataagcctttaaattttatttcatttttaattaattaattaggttttttttttgtgggcagctacagtgtgcatgtggaggtcagaggtcatccagtggaagtcagttctctcttatgacagtgaaggttctagggatcagactcatgttattgggctaggccctagggactaacctttatccacagatccctcttgccagctcttataaagtaacatttgccacatctagtcaggctccacttccttctggtccatttaacatttaaattacctcatgtccaggactagaggctaaaaagcaaatgtggggggctggagagatggctcagcagttaagagtactgactgctcttccagaggtcctgagttcaaatcccagcaaccacatggtggctcacaaccatctgtaatgggatccgatgccctcttctggtgtgtgtctgaagacagctacagtgcactcatataaataaataaataaataaataattttttaaaaatgaaaatgtagatttaatttttgttttgaggtgagtttttttgttattgttttttgttgttgttggggttttttgggggacagagtttctctatgtagccctatctgtcctagaactcaatctgtagaccaggctagcctcaaactcaaagagatccacctaaaggcttgtgccaccaccactaccacctggcaaatgtatgtttgtttctttttaaaccagtttgagaatttttatgtgaggactgaacttagaagtggagttttcaatttgtaagttatgattaacaaaagaagtggttagtatttaaaactgcacactaaaaatatctggaaagcagccacagggctcttctttggaatcttttgctgaactcagcccggcccaccccactttgttccctgcccacccctcccacctggctttggagtgactaaccttcgttgctctttcagtatgaagtgcttctccttttttgcctttttttctcccttaaaacaaacatttacagaaaatgggctttaattgtacaactttatgactttaaaaaaaaaacaaaaaaacaaagcaaaactcgtaaggtgcatgcgtcatctgtcattcctggttcctctgtgtacttccaaataaggtgacacatctttcattttggtcttaggaatctttcaaagaaataccaacctaagaagaactcgaaggaagaggaggagtacaagtaggtgcattgctggcagatgtgtagtgagatgagatgtgtgtagttggtgcattgctggcagatgtgtagtgagatgtgtgtagctggtggttgggaagtgggtgggaactgcatcttgtcatataagtaccgtcccaccttcctgtctatgtccatgaacctgaggggcacaatgagaacctggaccctaagccactggacccatttgagactgtttccattaaactctaagaaaaagtctaggaagtgctgcaagcctgtgtgggcagtgtgggggctggggaagccctggagtggtggcctcaatcttcccaacgctgtgaccctttcatacagttcctggtgttgtggtgacccccagatgtaaaacgatttcattgctactttgtaactataattttgctactattatgaattgtaatctaaatagctggtgtgcagaatatcggaccttgtaaaagggtcatttgacaccccgctaagaggtcacaacccacagattgagaaccacggccctagagtctgggctcccttctgtatcgccagaagccttacgtcacctgctcatccagccaagagccttgactgtctcagtcagcagcaatgggtcactgtgcgaggtggaagtaccgtctttgatgtaggtccaggggcctggtgttctttgaggacccggtcggacacgggcgggtgagtttgcgaccatctctggcctgagaataaacagaggcagaggctgcatttcacagagcacccgtggccgggtttgggttgtaattaattctgagctgttgtgtaatgaaccggcaagatcctctgggaggcagatgcagggcagactgattttaattactatttcctcaagtgaagcgagtgaggctggaggtgggcttgagccggtgcaatctgtcctcaggtacacggcttgcaaagcctttctttccaccctgaatgagatgaatgactacgccgggcagcacgaggtcatctctgagaacatgacgtcacagatcacggtggacctgatgcgctacgttcaggagctgaagcaggagaggaaatcggtaatgcatcttggggtgtcctcctccaaagacaaggatgttctacctgagagacacaaggactggggtgtggtggctcacacccgtgctcctagcactgggggtgttgggaggaggcagggcgaaaagttttctgcaaattcgatgaccacatgtgatacacaatgaatctcaggccttcaaggctgcatagtgagaccgccagactggtctacgtaatgagtgctagaccagtcaaggtggcatagtgagaccctgtttcaaaaacaaacaggggctggggagagggttccttggttaagggcactagttgctcttgcggaggacccaggttcgattcccatggcccacgtggtggctcacaaccatctctaactccggttctaagggatccaaggtctcttctgacctccctggatccaaagcacaagtgtggcatggatatatgaatgcagacaaaatgctcatacagataaaaataaatataaagcaaacaaaattagatccaggcgggacagtgcacacggaagggcagaatatcagacatgcaagaccaatgggtgcgtggtgggcgcgtggtacctgagttcacttatcatgttgtgatctgtgtgtagaggtcagaagacaatgtgcaggagttgatttctttacctgctgagccatctcattgcagctgtgtcttgccagtggcggttctaaaagcttcctgttagttaggcttcccacaagattgaattagctgagccaagcggccatccacagctccaaggttggagacctaaggctgacaacagtctctgctggaccagccattgaggacagtgttttgttgttttgtttgtttgttgttttgtttttcaagataaggtttcactgtttatcccaggctgttctaggactcgatctgtagacctctgctggccttgaactcagagatttgactgcctctatctcctgtagggctgggattaaaggtgttcaacaccacgcccagcaagacattttaatttgtgaaacagctaggatgcagtaagactgaaccctggggctcagaagaaaacattaccacccagtataaaggtaaaatgtgtgcacagaatctgcagccagcccaggcctgctgtcctgcttttgaccttgccttgatctttgcaaaggtttctcttcctgtttagggctcccagttctcgccactgacccttctctgctcacagggtttagcattttagcctgctccccaaacagaaactgctctcacctttgtagcaagtactggttctgtttcaggaatgagtcagaagatggacagcccatgagagccccgcccctcccggtccctcgcctccagctgtgtggtcttatcgaggcagggttcactggcctcagggtctttgtacaggtttcctccctgagaaagccttttgccagacctcaggcctgttccttaggaatgtttccttctccctgcggactttcccatctactgcacttaaaaatgcctctcccttttcaccttttcttgctttgcaatgttttggttttttgcaacagggtttttgtgtgtgtagccctggctgtcttggaactcactctgtagactaggctggtccccaactcagagatccacctgccatgctagtactcttaactttcgagccagctctaatcgcctgcattattctttttgtatagtgcttatccatattttgggggaagttggagaagcattagaaacagaaccaggcctgtgtgtatcctaatcacacgatcacacgccccactaaccctgccccacagcaccgtgaggtgttgtgtggaattgcttgctgggttctttcctatctcatatcaagacgtctgctcctccaggacagggatgtccatgcctacttcatcaggcatacagaaggcaggcatgcaggaagtgcaggggagaaaggaatggcaatagctgagaaataataaatgtggccaggactgggagtgcagcccaatggtgagtgctttcctagggtttaccagtaagggaccagaggtgcagctcagtgctgcagacctgcctctcatatacagagcactgtgttccacactagcatgcgtacacacacacacacacaaacacaagctagggttaatgtctgcttagcttatagataaggatcgttatatgccttgggtagcttgtaaatagagtatctcttatttattgataatcatcattttacaatctattatatcttctcctaaatcatgtgccttaaaaaaatttttttttaagatttatttcttttaaggcaggtggtggcagcacacgactttagtcccagcactgaggaggtaaataaagtcaggtagatttcctggccttttttattttggtttttcgagacagggtttctctgtatggccctggctgtcctggaactcactnnnnnnnnnnnnnnnnnnnnnnnnnnnnnnnnnnnnnnnnnnnnnnnnnnnnnnnnnnnnnnnnnnnnnnnnnnnnnnnnnnnnnnnnnnnnnnnnnnnnnnnnnnnnnnnnnnnnnnnnnnnnnnncctgcctctgccgcccaaggctgggcattaaaggcgtgcgctaccactgcccggcagcaggtggatttctgagtttgaggttagcctggtctacagagtgagttccaggacagccagggctacacagagaaaccctgtttcaaaacattttgtgtgtgtgtgtgtgtgtgtgtgtgtgtgtgtgtaaaagagtattttgcctacctgtgtgcctggtccctagtgaggtcagaaaagggtattggatcccttagaacagaagtcacagactaagctcccagctcttcccacaagagcagccagcattcttaaccactgagccacccttttgtttttaagaagtgtcagtcaccaataaccagtgcagccctggcagtcagaggttctgttaggagatctgcaaacaccactctatttgtcatagcattaaattcggctggcatttaagagcattgtgaaatccctagcatgctggaaagaatgtcaacaaatacaaacttgtgggatgttcatacgtggcctcgtgaagccatctcttctctcctatgtcatagctaccattattttgaaggaatgagtagttaagtgtgccaacacaggcctttaattccagcatttgggagttgaggcaggaggattacaaattagagggtagaactggctatctagcaagacaccacctcaaaaaagtgtgtgtgtatgtgaacgcgtgtgagtatgtaagagtgtgtgtgagagagtgaatgtgtatgtgtgaatgtgtgttgtggccgtgaatatgtgtatgtgtgtgtttgagcttgtgtgagtgtgatgtgtgtgagtgagtttgtatgtgtgaatgtgtgtaagagagaacaagatggttctgtggacagaccgtggccctcaagcctgatgacagtgaccctcttttgatccccaagattcacattttggaagcagagaactgactcctacaagttgttctctgtcctccacacaggatgcatacatacacacatagatacaaaataacatttaaagatagagtaaagatggccgtggtggcgcacgcctttaatcccagcacttgggaggcagaggcaggcggatttctgagttcgaggccagcctggtctacagagtgagttccagaatagccagggctacacagctcgaaccccccccccccaaaaaaaaaagtaaaaaaggccagtgtggtggagaatacttaggaggtagaggcaagaagatcctgggctcaagatcttcctcagctacacagtgagtttgaccagcttgggctgcaggagatcttggctcaaaacagcctgagtggtggtgcacacctttagtcccagcacttgggaggcagaggcaggtggatttctgtgagcttgaggccagtctggtctacagagcgagttccaagacatccagagctacatggcaaggtcctgtctcaaaacaacaacaaaaaatcacagacaaaacaaaaagcatgcaggactgtgtcagtacactgatagtctgggagattggtcagcccccctctttcagattgcagtagctgacatttgctacaacttcgggttaacctttcctataggaagtctggtatggtacctactgctcaggagcctggagcacaaggaggtggtttgggtctgttgggtcatacacctgggggtgacacgcaggcaccctggacctcgaggctagcatatgcttttatttctaggttacccacaaggccatgagttgtacggtatcaaagctcctgcttctactccaggcttccctgcctttccttaacactggccagaggatctcatttctgggtttctgctgaggtcagaacaaagtgctgatctgagaagtctgttttctcgtccctcttttacgtaggtcacagggactgaacttgggttggcaggttcactcgctggctgagccatctccctgttctttaaatttaacagaagaattgttttctgtgtgtgatctggaaaatggattgttttcataatcagatagttaacagataacttgtccttcattcgtaaatgaatttacagctccaggactcaaagccagacccttgaacaagctacactaatactctgagccttttgctcacagttcagcggtttgtttattgtttaagtactttttattgttgtgttgatctgtaggcttactggttttgactggcttagattagttaaacaattctacagtcagctcttcttagctctttgttttgagacagggttttgctatgctccaggctagaatttaggatgtagctgaagggggcttggcctctaaggggagagcaagctggccccatgacgcctggactagctttttcctatgtgtgggaggtgagatcacctccccaccctcacccccacccacacacacaccccagagctcccagaaatgggatgagcttgtattctcgtcacatactggtttatggccttgggtcaacctcttatcatttactagattaaccgtctccagcccataccaaccatttcccaagcatctctgtgccctgcatcactgagacccagactgaggtccaggttgatgtattagaatggtgggtcgcgtctcaacagcacactagaccaagacagttccacatggaagaggttttattgggagagaaaaagagaaggtgccagcagaaagagaaaagggggagagagagggagggagggggtgttcttattcatatggaaaaggatgtaacgcaggtaaaggtgggaggtgagccaagtagatgctgggaatatggtgcctattgccttggcaacaggtctacaggttgcaggtcccgctatcgcctatgtgatgtgataggtttgggaggtcctgatgccaacacaggccattgaggaggtgacagatagctccactgatgacgtctgtacagtgaagggacccacccacccggggtccagcacagtgaaaccctctaatctcagagacagagtttgaagagaccaaggagcccagatgttcttgtcagccctgcagaatggagcgccaggcgcacgcacgtgtctctgctgctggagaagctgcctcaccaatcaccgggtgggcactgggcttgactcttcagcaggaactaactaggaagttgtagaggaaacaatcactattgcccttggtggcacttgaagcgttcacaatcctcagcattcacctggtggttgattggtttgttttgagacagggtcttttacaggccaggctggctgtgaagttgctgtgtagctaaagatacatctggtcctcctggctgtatagcccagaagccagggtggtcagcatgcactggctcgccccatttgtaaggtgcccactgagccatttccatcacatggaccaagaagtttaaggttcattgcgcgtacttgcccgtccagccctagtggggctcaggggtggagggttcaaggccagctagactgtaccaagggacctggagtcagggttgggggtgatggcgtcccagctcacaagacagcccctgccacacttgctgtctgggggctccttctgtctttgtccttttaaagtctctgtgtcctttgtttccatctgtggaaactgagctgtgtttaaaattccagaggggtgactgcgcgcgatgcaacgtgtgctcgctcctttacttttcctgcttggtgtttgaagcggctatttccacaacagctccgttttgctttcttaattaaccatctggggttggatgagttggccgcttgcagggcgagcggtaagcacgtgtcacctgcaggacagtagtcactgaaagaactgtcatctctgtgtcccttgaagctgatgctcccttttccgtagcttccagatgccctttcgttcgttttctgctgcagttcgaggttgttttgagactgtctttgtatgaaccgttaattggcctggaactttctttgtaggtggccaagttggcctataatttagcaatctcctgcctcagcccctgccctgcccaccttatctcaccccacccccaagtgtcaggatttcagcctcatgatgcagggtccatctttttctcccctgaaacaaggttttgctatgtagccctggctatccaccttgctctgtagaccaggctagcctcaaactcagagatccagttgcctctgcctcccgagtgctgggaagcactgccaaattcaggcttttcatccccccacccccttctctcctgttcctgtacctgtggtggcctaggtcagtgctgggcaccttcgttcatcacctgatttcccgagacgggatccctcactgaatttggagcttgacaatttggtcaggctggttggcctgggtttcctcctatgcctgcctccctggtgctagctagcattactgtggcacactcagcaagcgccttctctagagcatctagagcgccagccaattctctgaaggaagtttcttctgtagagactcaagtacaactcagaacagaactgagagccaggtgcgttagcgcacgcacaccgctactcccagcactcaggcagggggatgtctctgagttccaggccagcctgggcttacagaaaggccctgccctgtcttttaaaaaaacaaacctgacatgaaaatgaaaacaagtgctttgtagctgacctcagattcctcttggcttctcttttctttttcttccatttatctttttttttcttttctttgtttttcttgttctcttttaaagtctattcttgtgttttaaagagagaaccaaagcttcctattacagggagagtaactagcgtccctctggttccccagagatggcatttcctgtcgcttttctgacaggagagatgagcgctggtgacttcatcctgggctcccaaagcagcccttatatctttgtcctgggaacaatccccctttattctgagccgtgagggcatggttctccaacacactccctcactgtcccaggaagaagcgccctgccattgtttgttcgtaaacaacaagtgcatctggcaaagctgctttatttgtttaagttttctaactgttcaaaccactgtttcccctccaaggagccagctggagctggtgacctcttcctgagggcagtcatacgcagagggatgagggggggtgtgtgcacacgtctccatgggggagggggagggcacacccagcagaagaaaggctggaggagtatccctcaagctcagtgtttgggtgttggtaatgaggggcagtctctgaggtgcccttatggaagacagccatgtaaggtgcacagcaaatgtgagcgcttcccacacacttacctaacagacagccagagaacttcctgtctgggtttttattcagaatcacccaacatatgattttttttaagatttatttatttattgagacagggtcttgctgtctagaccaggctagcttgaaaccttgaaactcacagcaatccagctgcttctaccttcctagtcctaggactaaaggtgtgccatatgtgtgtggatagaagaccccagtgggggtgtggtttgagatgggctttcatttccatcctgactgcctttctcccccccccccccacatccctcccccttcttcctggcctccactccttccttcttacaagctgtgcacagcttccggtccatcctcccggcagggttcttcacaccctgtaatcagcaagctggtctcccctagccttgcccctggctcctctaagcctgaggctctgtcttcccttcttccctgccctgtttctcttcggagattaaagagatggctccagggacaagatctttgaggcagtaaagaccgaaaactgaagggttggggctggagcgatggttccccagttaagaacatctacagaggtcctggatttatgggttcctagcacccctatgaaagattgcagctatttataactccagccttggagaccccaggccttcttctgacctcctcagtatcaggcatgctcaagagacacaaaatacatgcacccaaaactcttagacatatacaattaaagtagcaatataaaagaaactttaatctttaaaacaaaaaaaacaggatgttcaaagttgaacttcgtaagaccttggaacagtgacctccggaaagacaagaacttgtccctttataaagtatcattgttcaggcaaaaggctggccttgtcccctcccccaggcttccccagcacttggttgtccccagactctgctgagttaataggtctgagtacggagactcaaggaaaggaggtttttgccgaagcccagaggaggatgctagggacctggcacttcctgttaatcactctgccatccctccttacggtgacagtcaggaagcaagtggctaacaagggaaagtttatccacaggagcatgtaggggcccaggaggctcagtgggccaactgtttgctttataaacaccagctgagtttgaattcctagcacccgcgtaaaaccccagtgtagttatgcacacttgtaacccagtgaggggaagcagaggtgggcagactccaggaggtcaccggcccaccagtctagcagaaccagtgagctctaggttcagtaagagagctccaaaataaataaatacattaataataataatgtggagagtgatggtggagccactagcctttgacctctgatctccacaggtgcacatacacacagaagggtgtttaccaggaaagccaggggaggggggctgctcctgctccttgtcctcaaagtcaagggggaacccctgagtttacagtgtccttggtcaagggactcagccaagctggcaacctccctggctgggcagcttcaggcagcaaatctcatcagacccagagggcagagcctttacccaacacaggtcctgcagcctttggccatgcagacaaggtctactgatcccattaatgtgtctgttggaagtatgttaaagggaaatggtagttttaagatgctgagtgagagagatgctgtttcctctgtgtagctgtaacgggtttgttgctgttgctgtttgtttgtttgtttgttttcctagcgctttcgtccttgctggtctctcctggctctaactacccacctaaggaggaggcttctccggtgtatgtttcatgctagttcttctcaactctcagaccccaggccacattgaacaggactctggaatcttatagaaatactaaccttaaaactcaagatatatttaccccctcccaccatggtcccccttttttcttccctctgaaactcaggtcaaacgcagggtcattctggactttatttaaaaagggactttatttattgggcatgtgtgttgcggtgttcaattggaggtcagaggacagctctggatttggtttctccttctgccttgagggactctactaacatgtcttcgggtcaagacccaggacacctgtgcacaggggaagcacgtgactggaggtcagaggacagctttgggaaggtggttctcgttctctccttttaccctgtgggaccccaggtagaactctgggtatccatccgtcttggcatcaagcacttttatccactgagctatctcaaagaccggggacttctgtttattcatgtctgattctgacctcccagtggcttggctaatcagaggacatctatggtggctgctggtggggctggcattcgggtgcttagagttctcccacctgcagcaaaaaccagcaacagcctccattctggaatcttcccttcacaccatccaaattcagactcacccacagtctctgtccagtcagaccctgagccaccaggtctcctctctaatcccccttcctagcaacctgccctgacctggttctctggggtccttggaagttaacactagtcataggcctgccgtgaggcctttctgttttaaaagattctagagctagtgagatggcccacacattgaaaagagagagccaactccagcaagttatgctctggcctccatatgagctgtggtatgctcacccaaacacagcaatgattcaccattttaaaggttctaaggtgcaatttctattcacagagagcccacagcactgcttgtaccatcaacatctgtatctccctgaactaggaacaaagcaaatatccaccaaccagtgagcagctacagaaatgtggtccatcttctcggtggaatcttactcagccagagaaaagaattagtgggcagatacgtactacaacaggatgaaccttaaaagcatactttcatgtgaacaggaagaaataaagtcaggagaggctagggggacaactaagaagtacagttcttcatttgtgggaggtggaatataatatatgttaattgaccagtgctcaaaagatgaccccagtgattgctgtatgcttttcttttaagatggggtctcactgtgaagccttggccagtctcaagtatcctcctgcctctgccttccaagcctgggatgaaaggtgtgctgagggggctggtgagatggctcagggggtaagagcacccgactgctcttccaaaggtccgaagttcaaatcccagcaaccacatggtggctcacaaccacccataacagagatctgatgccctcttctggtgtgtctgaagacagctacagtgtacttacatataataaacaaacaaacaaacaaataaataaatcttaaaaaaaaaaaaaaaaaaaagaaaggtgtgctgagccacgtctcctggtgtgaggactatctcagcaaggcatggctgttgtttttgcaagtggcacacaatttcacattcagtattgctgtgtctgaaacttgagaaggaactcctcaagccgtcttattttcatttccccttaacttgtttatcatttaaactttggttgttgtttgagatggggacctcacttgggtttagggtctggcttgaacttctggaaatccccctgaatcaaccacacttgtcctggattaccagcctgaactcttacgtttctttggaccacacagactagaagttcaatgtttgtttgtttattcgttttggagggtctcacacatactaggcaggcaggtttccactgagctgcacctccctcccagatgatgcctaaaggcttacttaaggggctggagagccgactcagcagttaaagctcttgcagaggacctgaatttggttcccagcatccccctagtggctctggatcatctatagctttagccccaggggatccgatgccctcttctggcctccacgggcactgcataaatgcggtgcacatacacacacgcagagaaaccacacatatataaaaacaaatctttaaagctacttaagttgatagagggtttttcctcttgcattagtatgaggagggtaggtgctgacccctgctctgatttctacttcacagaacttccatgatggacggaaggctcagcagcacatagaaacgtgttggaagcaactggagtcagtaagtgggtagccggaagccggcagctaaaccagtctctttcccagaccagctcatttctatctgaatctggcttgaatggctcgctaagggggaaaaaaaaatcaggcagagacctctaaggaggcttctttctctctagatttttctcatttgtatttcacttactttgctcctagaactattatggcaaagtgctgagctggacatgctggatgctggagcgatggctcagtgggtagagtgtgtgccgagggaccaggagggcctgagtttggatccctagcaccacttaaaaagctgggcgtggcgacacacacctataatgccagcactggggatgcagagacaggaggctctcaggggctcactgtccggccaggctgcccagcatatcagctccaggcttagtgagagactctcagagagcaaggtgggcggggtgcagagataacagctctgctagcacaagcacctgatactttgcagaggacctggtgtgtcccatgtcgggtgtctcacaaccacctgtcattccagttcctggggaatccaacaccacttgttctgaaggtacctacgctgcacacataaccacacgcaatcaaaatgaaaagcaatcttatttatttatttatttatttatttatttatttatttaaaataaaaacagtgtagagagtgattgaggaaagcacccggtgttgacctctgacctcttcatgcgcaagcagcaggtacatacactcattaaaatgtgttctggtagaggcaggtagctcctgtgcagagaacagataggggtcactccaatgtagagaggtgcgcaggtcacttctggaaatgaccaagcatgaggcatgggttcctgggagaatggccgtggaggtctctctagaggtggcagggagggtgggtgaccagcagacttggctgtgctctctgcagagtaagaggaggtttgagcgggactgtaaggaagccgaccgggcacagcagtacttcgagaaaatggacgctgacatcaacgtgaccaaggcggatgtggaaaaggtaaggggtctcggtctcacttccctggagcgtgcttcctgcacagccgctgagaggcctggccttggcttcctctttcagtcataaccacacgagggtacctgatgggaggaagggtttcattttatctcatcaccctggggccagggttgaggtcatgtgcttagtcaccaacgagtatgatggggagacctggaacgtcacagcgggcgcggttcaggaggccacactcttctgtagtggcttgtcgaaggccgagttccatgtctagggagctgaagcagccatctcagcccacaagggagagtccgtcagttatcagaaaggccgatccctctggcccgctgcgtcacggattcctctgggctgggatgagaggggcatttggaagtctgcgagcgagagctttcctctgaaggctcagacataaagtgctccttgtcttccgggccagtggatgtgggttttccctagaagccccattttcttttttatgaaagtcatcaagataatgtaaacacaattatgccattaaatagtggcattcattcacgatgcccagggccatttgggcaccgcagtctgcgcttttctctggaaaagccctgcttttcttggtaccactcggttctgccagatgagtttgaaatgcctcaagttgggcaatgtcccagttggaaaagtgtgtgtgtgtgtgtgtgtgtgtgtgtttaattacttagcatactaaaatgcatattcttgacatcatgaggatagacttttactttaccaaaagacactcatgttttaagtgaccgtacttaccataaatttctactaactaggaatttaaagtgatgcttttttttttttttaaagttgaaatcatttatttttgtgtgagcatctttgtgactggtagcactcgtgtggcctgggcagagggtaactttattgaggtggtcccaccacgtggggcccaggaatgaacgagtttgactgcagcagtcagccgctcttcagactttaacagtgttacctgagagtgatgagctgagagtggtgctttcaagcctgaggtcccagcacttgggagtggaagccggacagtcaggtgagggaagtcatctttggctagacagtgggctctcaaactgaaattctggactggagaggtggcttggtgtgtgagagcagtggctgctcttccagggagcctgggtagctgggtagcagtcccagcaaccttcaacactgtttctgaggccttccttctcggatggctagaatgtaggctgcatatctctatctctattggagcccggaacctcctgtggtgaccctgttttggctttcagcagccggcctgtactggtggtagtcagcctaccacttcctctgtctttctactttgtatttatttttcttatcttcttccacactctgtgacctctttgtatccagagctgtagtgtttgtggctttctttatcttcttcttgattgtggagagtgcttcagcgtttttttttttcctacttagattttaaagcagaggcctctaatctgaggtggagtcaagaggacaggggttcaaggccagctagggctactggagaccttgtctgaaaacaaaaagaaaggaaggggagggcaagggaagaaagaggaagccaaagactgattttagtgtcctttttatcatgaaagaaatgtttgctcttgttttgccaaaatatcttcattttactttgtgggcatttgcctgaatatatgtttgtgtaccatgtgagaccagaagagggtgtcagatcccttggagctagagttactggcggctagacccccctctccccccaggaacgcagattcctcacttccccactggagagaagacggctcctaaccactgagccatctctacctggactccttgcctattcctgtgcttcagctttcctggccgtgaagccgtggttttgttgctgctgctgtttttcctgaaagcaccactgtggccctcctcgggaatgtgaggatcctaatttggaagacgcagacatcagaccacaagcatcggtgtccaaacactgcatattttaagtccttttgctttgaaggtgacctaaaatctgctgcccagcacaggccacgtagaggcatgatgtcagcttttctccttgaattccctgttgttatctttgctttgtttcttgaaacaggtttccctacatagcctaagctggctaccctcctgccccccatcaatgctaaaatttcaggggtgcatggccacaccctgctttccattgctacttctgacagtctttgactctacacagatgtctgtctctcccccagtttcctcaaattaagtggcctgattgtatttgactcagctcaccttcctgacctagcagccagccacacaatttctagaacgctatgatgcatctcccaggctacattgtgtagactctggattgtgcccaggggatgtgtatgtagtataagtttgcatgaatgtctgggtctagttatgagctgaatctccttttctttctgaagacgtcactgtccctcttgctgtggctgtatggcatgattgccatggcactatgttcaaagttcctgcatgaacaatcccctcccaccttatgacgcctgtggccaggagcctgttaattccctggaagggtttgtttctctctgggcaggagcgtgtatttgcatgttacctggatactgtgttcctctgcggtctggtgatgaacgagaggacaggatgaatggaagttgccctttaccaagacgcagctgtcagagagtctggactcatcagctttggggggggggggggagggctcagttgcttaatctagttatgttagaatctaaatatgttggaatatattttctggttttcgtaaaaacagatcatatcctttccccaacacaaacccttaagctcccttctggggctggggaaatggctcagtgggtgaagtgtttgtattggatctccaggacccatgtaaaaaccaggcatggtaatgcatgcctgagtctcggcactcgggaagcagagcccagtggatcctggaggccgatgaccccatcatgttggcgacagctcctgaaacctctgaacaagataagagatgccaaccagctctctcaggccttggtcctaccctagagataggagatttcagtatttgttttagaggttcggttttgtattttactttttgagacagggtctccatttgaagaccaggctgaccgtaacaagtaccaggatgacagcttatttcatgctgatcatggaactcggggtcctatgcatgtcaggcaagcaagctacactccaacagagctacacatccagacctatgtcttatttttcagaaaatctagcaagttgacgggatctctaatatttgaactgtttgaatccatttctggtcctttgttctttactgctggtgaggtgtggctgtcaccattgaggccttaaagggacttgccttccatggcctccccaatgctcagcgagcagtggctttcctgtagatgactctggaatgactttcaagtggcaaaaactgtgatgtcaggatcgccatgaaactgcttagaatcaagccatgctggataagcccggcaggggttcctggagtccccaaagtgccatggtttgccagcccggtagggcttgggaggggaaggccatcaacacaagcagcctgagaagcagcttcccgacagagagtgcactgttttctacacacccgcattaaactgaagtgtagctgaggcctggtgcagaacctgaccctgtcctgtgactgctgtctcttctgtaacttctactgcaagacagggcattgtctaacaaactacaggcagtggctgctacaggcagctgcagagatagacagtgatggttgagctgggttctttgtcttttataaacttgcagtgtcaaatttttgtttttcgtgtgtgtgtgtgtatgagtgtgtatgtgtgcgtgtgtgtatgagtgtgtgtatgtttgtgtgagtgtgtgtgcatgtgtgtgtatgagtgtgtttatgtgtgtgcatgtatgtatgtatgagtgtatgtgcatgagtgtgtgtattagtgtgtgtatgtgtgtgcgtgtgtgtatgagtgtgtgtgtatgagtgtgtatgcatgagtgcatgtgcgtgtatgagtgtgtatgtatgcatgtgtgtatgtatgtgtatgagtgtgtgtgtatgtgtgtgcatgtgtgtgtatgagtgtgtgtatgtatgtgtatgagtgtgtgtgtatgtgtgtgcatgtgtgagtgtgtgtgtgtgtgagtgtgtgtatgagtgtgtgcacgtgtgtatgagtgtgtgtgtatgagtgtgtgtgtcccacagtgctcttcaggagttggttctctccctcaactgtgtgggtgctggcgacagagcttggattgtcaggcttggcagcagatgtctttaccactgagccatctcctgaccctttacttttcttggaaatacaattcttctgtggttccagtctcaatgtatggtctctcttagccacaaagagtttgtgcggcttctctccacacttcgagaggggtgacaaggcagaactctctagatgtttattgtgtgttcactcctccctccccttcttcctttttcctttgtgtgtgtgtgggggggggcatggttgggggagacaaagtttcactctgtagtcctggaactcattttgtggcctccaactgagatccgcctgctaggacacaaggtgcgcgccattgccacctgggcgaccttctctctggtctaatcctgagggctttttgttacatgactcaatttgaggaaatactgaaaagttaaattattgccaggtgtggtgactctcagctttagtcccagcactcgggaggcagaggcaggtggagctccatgactgtgaggccaggcttgtctaccaattccagaccaaccacaaaacaaaacaaaacaaaaaggttaaattagactagaattctcaatataaattccaaagagcagaccggtttctgtgagactgtgcctcccatttttctatggtaagatgacttctaaaagtatggtggtgggggggaacatcacagctgtaacaccagcactcagggtgatcgttcacgcccagtgtgggcaacacagcaaattccaggccagcctaggagacagagaaagactctcagatcacccctcccggaagtaagggcaataaaagcataaaagttttaagagtttgaaggtagttgcgttgaagccataacacagatgtctccattttgaagttggacaggaggtgggcctgagtctttatgaagggagaattataagcagtatggacagaggagtggaagctggggtgtggttgatttaggtcctgggcatggaattagaatctctcactttttcccacgaagctaagtccagcattttacatttgtctttgtatttagatattcatgggggggggattagctcaccagtcgaggtcaaaggacagctttcaggagttgggtttctctttccaccatgtgggctctggagattgtcagacttggccgcaagcacctttaccctctgagcaatcttgctcacccctgatttcaggctttagttttgattccttttgtgtgtgtgtgtgtgtgtgtgtgtgtgtgagagagagagagagagagagagagagagagagacagggtctcactctgtagccctggctcggaactcactgtgaagcctgtgctggtttgccttttcattgccttggtaaataccataaccaaaataccataaccaaaagcaacgtgaggaggaaaagaggaattgcatcttgttacttacaatccgtgatgaaggaaagtaaggacgagaactcggaggccgcggaggggtgctgcttactgggtgctccccgtggcttgctcagcctgcttccttatactaccatgaccaccttcccagggctggcaccgcccacagtgagctatgtcctcccatagaaaacatcagttaaggaaatgtgtcagagataggatgctgtacatgctgttaatcccagcactcaggaggcagaggcaggtggatctctgagttgaaggccagcctggtctgtagaacaagttccaggacagccagggctatacagagaaaccctgtcttgggggaaaaaaaagtggccgggcagtggtggcgcacacctttaatcccagcatttgggaggcagaggcaggtggatttctgagttcgaggccagcctggtctacagaatgagttccaggacagcagggccatacagagaaccctgtctcgaaaaaccaaaaaacaaaaaagtgttgtggggctggagcgatgactcagtggttaagagtgtgctctgctttggctgagaaccagagtttagttccccagaacccacagcaagctcatgactgcatgtaattccagctctatgggatctgacgctctcgtctgtcttcctcaggtccctacagaatacacacacatatacacgcacacacactcacaattaaaaataaaatagaatattttagatgtccatagatcatgtgagagtgtgtgtatatgtggtgtgttttaatggtcttagattatatgataaactgttttaaagagaaaaattaaattgaagccaagaacctctgccattattaagcaagaaggtactttgctcacacaattgtctggtaattatcttaagacccttgccatgggcagcctaggacacagccaccctaagaacccagttctagtgcttgaagcaggggccaggggcgcagatctgctgagactggatacagatgggcggcagagtgttaaattgctttaccatttgaggaaatagtgtgtgtctccagctcgccgctccttcagcttttggacacatctggaatgacatggttgcgtgcttcctctgcagtccctgggcaactgagttgcatctttattgaatgtgtaagcatctttctcgcttgcccctaattttgttttggatgaaagtgtctgactagttctctgacggaatcctgcaggactcaggaaggccatggaaggcaagttttttggttgtttttttgtttgtttgtttgtttgtttgtcctggaactcactttgtagaccaggctggcctcaaactgagaaatccgcctgcctcttcctcccgggaaggcaagtttctttctttctttttttttttttaaagatttatttattatatgtaagtacactgtagctgtcctcagatcttccagaagaaggcatcagatttctttacgggtggttgtgagccaccatgtggttgctgggatttgaactcgggaccttcggaaaagcagttgatgctcttaaccactgagccatctcgccagcccccagcaagtttcttaaagacagcaatggtgtggtcctgtcagtacctgggacacccatagcctggcagcaatctagaaaacaataaaaaaaaaaaaaaaagaaagaaagaaagatcaaaagaggaactaggaactagttggtacaaatgcaggaaatatattttgcaactgcagcttcatcttggaacctagaagaatttaaaaacactttctttgcttttgggggtgggggttaggaggaggttgagacagggtttctctgttgtaaccctggatgtcttagaacttgcaatgtagaccaggctgacctcaaactcagagagccacccgtctctgcctcctgaatgctgggattaaaggcatgtgccaccaccaccactacccagcaatgatttatttatctttaggtacatttatatttaggtacattagtgttttgcattcatgtgtgtctgtgagagggtatcagatcccctggaactgaagttacagacaatgccatgtatgtcatgggaattgaaacttggtcatttggaaaagcaaccagtggttttttgtttttttggctttgttttgttttttaagatcttatttactattatacataagtacactgtagctgttttcagaagtgccagaagagagcgtcaggtgtggttgtgagccaccatgtggttgctgggatttgaactcaggaccttaggaagagcagtcagtgttcttacctgctgagccttctctctagcccaatacttgtctttcttgagacagggtatcactctttagaccaggctgccctcaaacccacagatcggttttcctctgcctaccaagttcctgagacacaccaagctaaaatacttttcatttaaaccaagagaaatttgtagaaaactaaaaggaaaatcgtagatattggtcttttataagtgggtccctaaaagatactttgttattctgtgtttgtttctgggctataatcaggggtcagagctgtggagactgcatttccttctaaaagcaaagctgcagcttttgagttaatttgcaaaaatatccagtgaaccccaaacattttagctcctgcaggggcaggaagccgtccacggctcagagagtgtatccctgccttactaatgggaagagcggaggcaatttactttatctctgaggtttccttcttaaggaataggattatacacctcgggggctgtctgaggtctccgtggcctgtgatgaatgctaagtggggtggcctagccctctcctacaggaccacatgtgtgtgccacggatctcacacaaaggtcagaggacagcttttgggagacagtactctccactgtgaatttttcagaccaaactcaggccatcaagcatacaagtgttttacccactgaaccatttcgccaaccgacattaggtttttgagagcacagtttgctaagtagcccaggctaacctccagctcacagtcctcatgcttcaggctcacaaatgttgggatccaaggcacgtggccactacacatggctttaatgctctgctaatcaagtgaatataggtggcctcaaggagttgcaagcatctagacgttcagaagagcactcattgggcaagtactgcttcgcactagttaggtcataatagatgccttcatgaggactccgactaagagaagacacacaaagagtgtcggatatggatggcgaacattccgtgaaaagcaagtggcctgttagtgtcatcatcactgtgaccaaaggcctggcagaaacagctagagggaggaaaggctttgctcaaggttctagaagtttctttctgtcctagcagaataagcatggtatagaggagcagctcccatcacagaaaccagcaaaaagagacccagacagagggcaggacaagagctcttcagaaacagggacctgcttcctctagccacgcctcacctgagacggcccatcctctcccagtggtctgctcaaatgctaactcaatggaaggcttagtccattggctgtgccagaaccctcatctccctctgtggacaagcccttgagactcacccagaagtgcctcacctcatgggtagttctcagtccaatcaagtttacattcaagactgacgtggcacggtggtgtgatacagtctgtctatactcctagtacttgagatgctggggcagtaggattgtgagtttgaggccagtatgtgctacatagtgagttggaggtcaacaacggtcacatagtaagattctttctcaaaaaaacaaaaacaaaaatacccacaattttgaaagagagagaaagagaagatgatggactgttgagatggctcagcaggtaaaggcattagccaccaatcctgttgacccgggtttagtcttagggactcaactctctcgcacacgttgtccactgacccccatgtgtgcactatgacacacacacataacttatataggaatagactcaaacaggaaggaggggaggaattgaaaaggtggcttagaggcagagtggctgggccatggagaactcttgcactacagaaggcccactgcacatgtggccttgcaagagaggatgggggaccctgaagcgtctcagaagctggatgtagggtgattgtgaccttctgggatgctctgaagccccttcctcaaaaagcgtgcactgaaaatgcattagtctgagccttccccatcatcatcatcccacagccatacaaatggaaaagaatggagctgagaatgtgttaaacgtcaggtagcctacatgggcattgccagtattgggggttgggacgggagtggggggggattctgtgctacgtggtcatgggtcatggttcttgccaggtggctctaccactgtgctgcactgaataaactccttgctgtcagccaaggctcttgatatgagagaagcagaagagagtaagtgagcgggctactaaaaccaacaagtgggaatcagtacaaggtgtgaagatccaaaacacagaggtgtaaactagcctggaccaggcagcctaggttccttctaaaggaacagctattactcaccacctacccaccatgatgttgatgcgatagtttggctaggtattaaattccaggctgacttttttttttttttttttggaaagacaaggtttctctgtatatagccctggctgtcctggagctcactctgtagaccaggctggcctccaactcagaaagctgacttttttcttctctcaacagtttgaagcaatcattcccttgtcaaccacctcatactttgttaggaacttgtcatctacctagcatttacctacctaccgtgtcatttagctttagcattcctctgagagagctggctttattctctgtcggctgagaccccatgtttgtctttgatgttctatggcatggttattgcatttcaaaactcatagttttttattttaattttctcttcttaggcgtccttgagtatctaagtgttttataaatgaaaggaaactttaggcattaaagcttcaaaaattgctaggtgtggtggcatatacctttgatcccagtcacagaggtagggggaggcggaggcaggtggacctctctgagtttaaggctggcctgatcaacaaaagaagtgccaggacaaccagggctgttacacagagaaaccctgatttcaaaacgcaaaaccaaacaaaaggtttcaaaaattatttatatctttctgtctctgtgactgatggttcagggacttgtgctaaatgtatgtgtatttcttcaatgtatcccattggcctcttcttcatatcatcatcaccaccaccaccatccttgtgagagtgacacattgacgtcaggagccagttctctccttccacttttgcatgggttctggtgatcaaactcaacttacagggcctgtgtggaaggagcttttgctcaccaagccatctctctggagtcattgtgttcctttatctccagatgtgaacttttgtgtaacatttattcattctcttagctcatttttttttgagcttttcaatttcagcaactccttttccatttctagaagtttcactgagtcttcagaccttcactgataacttcttactaaggtgacctctgttgctttttactttcagatttgctttttgcatcttgtcttatttctttcagacactcggatagtctaggttctgtggtaactattcttctctgtggtattggatctcatggtagcttgttccctggtgtgttgtaatctttatctttaacagtgattgcttctcttctggaggtgtaggactgtggaaatgccaacctagtgaaggtgtgcattgtttatgccaggcaacttgtatgctaatttgtaggcttggcatcctttttcaaagaggtttttattgatgattttacgcatatgtgtgtgagagtctgaatatatatgtgcgcatcaagtgtatggtatggcctcctccaggctttgggtcctctggaaattgacttacaggcagcagggcagcagtgagccactatgtgtgtgctggaaaccaatcttgggatctctggaagaacagtaagtgctccaagcactgagctgtctcaagcttggcattccgttctgtttgttttgttttgttttgttttggagacagggtttctctgtgtaaccctggctgtcctggaactcactctgtagaccaagctggcctcaaactcagaaatctgtcctgcctctgcctcccaagtgcagaccaaaggtgtgtggcaccactacctggctgtgtcaagcagtctttattagatgattgttgtgacacagacaataaaggacaacagctgctaccaggaaagttcagattaacctcagaaatggaggaaagggccagagtgacggctcagtgggggcaagcaccaggaccagagtgcaatcctatagtctactttgtttaagaaataaacaatataagccgggcgtggtggcgcacgcctttaatcccagcactcgggaggcagaggcaggcggatttctgagttcgaggccagcctggtctacaaagtgagctccaggacagccagggctatacagagaaaccctgtctcgaaaaaccaaaaaaaaaaaaaaaaaaaaaaaaagaaataaacaatatgaaataaccagtacccccaaagctcgtgtctccagctgcatatatagcagaagatggcctagtcggccatcattgggaagagaggccccttggtcttgcaaactttatatgccccagtacaggggaatgccagggccaagaagtgggagtgagtgggtaggggagcagggtgggggaagggtataggggactttcgggatagcatttgaaatgtaaatgaagaaaatatctaataaaaaaaataaataaacagaaccctgagtgtggtgcatttacaatcccagcactagggaggtgaggacaggttggatcctagggcttgctggccaggcacactagcctagttggtgagtttggggccagtgacaggctgtcaataaagaaatgtggctggtgcctgaggaacaataccctgggctccagctcaagtacatacacatgcacatgtactcaccaaccgcgaaggtgcgcgcacacacatgcgcacacaccaaagagaaaaataaaataaaataaaataaaataaaggaagcatgtttgtattggcttggtttatgtgtcaacttgacatgagttagtgtcctcagagaggaaggagcctcccttgaggaactgtctccttgagatcccactgtaaggcatttttttttggttatctgatcaatgagagagggccagcccactgtgggtggtgccatccctgagctggtcctgggtaggctgagcaggtcagtaagcagcacccctccatggcctctgcatcagcgcctaccctgttcgagttcccactgtgacttcctcagatgatgagcagcaatgtagaattgtagaccaaagaaaccctcccctccctaactagctttttggtcatggtgcttcgtcgcagcaatggaaaccctaagacaatgttggttttgtttctgtatgagcaggactctgtgtgagcctcctttagggtgtttcttttctaaagctgcatttacaaaccctttaagtgtctctaccatgacccagagaagcaaatgcagcgctgttatgttaaccccggtggcctaggctggctgtgtgcccttgcccttcacctttctccagagcatccttggcaatgggtgttgggagctttgggggccctgggtggagttggctgttgagaaaaggtggagggagtggagtcccagccctcaggagacagaggcaggcgggtgtctgtgagttcgaggccagcctggtctccatggaaagttccattccaggctaccaagggctagctacatagtgagatatcagtttcaaacaccccatgatgaaaacactcctgactgctgcaatggcagtgtagaagccagggggtgggggggagcacggtctcgtcctagggaccgtgactcattaccacggcgagtgtgagctcacaccaggactgtttccggtctcctctctggacaggagactgcacagcctgtgcagctcgcagaagctgcctttctgcttgagttaacagagattttgaattctactttgggtaactggggtacggggcaacagaaagccttttatagccctgtttagcaagtgaatggcctccggatggagatcctggtctcatttgctgtctttctgttttgggtttttttgttttgctttctcctatttcaatgactgtgcaccagagtaacccgcagtcctgggactggaactctgtaagactggaaagaaaaaaaaaaaaaaaacaacttgaggaaattgctggaatagttcaggcatatttctttggttaacttattttgaagttttttctgttttgtgttttcactgcctcataatttatcccagacagactgcattgtttggcaagcccttggcctagccgttcccaacaccagctcccagcactctgactgaatagaaattgtctcttagttttgaagttgaaaatgtattctagatgcaaccctttgctggaaaagttcaacaatgccacttacaccaccacatgacaggacaaagactggcttcttctcccttgttcctgcccctcccccctctgctggcttcacagagccggtcctcagaggcaagcttgcctctccaacctctgactcggacaaaggatgatattccttaataattcaattaggctataaatattgttcatgccggtggactagcattgaggtacagctccccacccccacccccacccagggtttctctgtgcagctctggctgacctcgctctgtagaccaggctggcagagatccgcctgtctctggctcctgagtgctgggattaaaggcatgcaccacaccgctagcttgtggtacagcttgtgtgtgtgtgtgtgtgtgtgtgtgtgtgtgtgtgtgtgtgtgtgtgtgtgtgtgttagtaggtttgatcccggttgagtgtgcattgggtgtgctttagaagctgaagagaaagcttaaggacacttgctgctcttgcagaggactcaccacccacatcaggaggctcacaaccacctacaattccacctccagggcatccgactctcttctggcttccacagacagctgcactcacttgctctccccctcacacacacaattaaaaataaatcttaaaatatagttttgacgtctttaaaacattatataaagctatgaagctttcatttcttttcattaattttttttcatcatcattattatgttgttattctgagacatggtctcactgtgtatccttggctagcctggaactcactttgtagaccaggctagcctcaaactcaccgagatcctcttgcttctgcttcctgagtgctgggattaaaggtgtgttacaccacacctagcccacattattctttttgaaccagattggacattgggttctgtttatctgtttacttattaatgcagagactgatctaacccttgtgcatgcgaagcaggccctgagccaaattccagccctagtttccaattatcagttcaaattactagctgttgaataaagccagtgcactagctagctcttttcttttggcttgttgtttgttgagacggagtctcatgatcttagtgcccccctccccccgcgcgcgccgccgcgccccaaatgctgggattgtaggagtggtccattctaggcctggtttgtagggtacctgtagtgaacattttggggctggataggcagttgagtccttaaagggtttgcttgcctagcagcccggattgctctgagttgcatgaagcacaagctgccgtcgcagcctgcctgcagtcaggcaagccctgctgttcaaggtcatcttcagctacacaaggagctgggggccagcctaggcagtcaggggggtctgccgcgaaattaaaaataagtagtcaaatcaatcaaatatgttcgcagttgcttgctggccggaggctggcctagagtcattctggccagcccctaagtgtcagcagatctagagagctttcgctttattggttagggtatcctgggatcatctgtgggtttgtatcttttgaggtagaagtgcctagaaaacaggtaatactgtgctatgttactaacatcctatcacatgattagtatctggtggcctgtatgtcctgctctctttcctggccgcatcagacagacagcagacagacagacagactcggcagttgggatgggcaggaatgtgttactttataaactacacaaactctaagtttaatgttggctatagtgtgcatgtctgtgatcccagcactcaggagactgaggctggaggattgctgtgaatttgaggccagtctgggatacataaggagctccaggccagctagagctctggtgtgaggtcctatttaaatagaacaaaacagacagataagaaaaacatcctgtaaacaagttattttcaacgaccccttgttgttgttgttgttgttgttgttgttgtggtcatcccaagaaaacgaatgcagggtggagaaaggctaactgacccccactattacacttctgagtttacctttctcttggcacaaggaatttgaggagtgccagaatccagagaccctgctggattccccaacggcctcccttgcagggaagtcaggcccatctgccagttccagggacagactgccaagcactgcagggtctgagcagcctgagccgatgctccatggagccctaccccaggcagggcgatgaggggcagtgtgagctgcctcttcttgcaatgtaaaccccagcccaggccttcctgacaaaccgacccatgcagagcgacgatgttgagaagccagtgctcgctctgaccactgggcttcctaaggtggtctttaccaattgccccaagcctcaaacttttggtaataaaagatagggtttttataattttctggatttgtttggtttttcatgacagggcttttctgcctactcctgaaactataactgttcagactgtcctgacattagctctgtagaccaggctgacctcaaacacagacatccccctgcctctgccaccacccagctggatctttataattttttaaaattatttcttttcattgtatgtgtatgagtgctttgcctacatgtgtggtcatggaagccagaaagagcattgaaccccctggaattggagttaaggataactatgagctactatgtgggattctgggaacttgggtcctctgcaagagcagagaatggtttgtgctttgagacaggatctcactatgtagccctagcggtcctgaaattcacttagtacaccaggctggccttgaactcacagagatcccctacttctgcttcttgagttctgggattaaaagcatgtgccacaaggcccctagcttgcttttattcctaatatcctgtatcaaagcaaacaaggctgtccccttccctggctgtcacaagtgccatgggacaacagatgagaagatgcagcttaggttggttctgtcaatcaccaggagttggtgacagtactcagggtcatcatgacacaggaaaaggctgaagtcctgagggtggccatgggcataaaaagagttctgattgatcggcatttttctgtctccaagactgtcaagtctggctgaaggtcagtgtaccactttttcaacctcactaaagtcacatggacgatggcaaggcttccaacttgtggtcttacctgagtgagggtcacatgggccctctgtcgtcccaggatgcactgcaaatggaacctagagctgggaggagactgcctgttatactatccaccgtggtccaaagctttccctcgttatcctgtgtgtgtgtgtgtgtgtgtgtgtgtgtgtgtgtgtgtgtgtgtgttcatgacgacaagtattgttggttctctcctttctttatgtgagaccctggaatggacctcaggcatcaggcttagcaacaggcgcctttacccaccgagccatcttgccagcccttaccccatggtttgggattctggaaactctcagagagaagtttctgcacttttgtggaagtgcttgttttcctgcagtgagttgttgagatccttgaaggagtgttagtcaattggtgagaggtgagaagaatttgtagcccagctccctcaatttttgaagggttggttgtgcggtgtccccttaggtgttgccatggaaagaaatcaagcctcttttgttgttagggcttcgctgagtctcaaagctagagagtgcagtggttctcaaccttcctgatgcttcacccctttaacacagtgagtgcctcatgttgtggagaaccctaatcgcgaaattgttactccacaaccataatttcgctgctgttatgagctgtaatgtaaatatctgatgtgcgggctctctgatattgcaccactgctatagaggatcagaacccatgcatgactaccaaccagtgactggctgtggctgaccttctctggtacaaactggctttgggaaatactggggatggctccccttctagccagtgagcagtttgtcacatacaacctacttttttttttttttttttttttttggtttttggagacagggtttctctgtatagccctggctgtcctggaactcactttgtagaccaggctggcctcgaactcagaaatctgcctgcctctgcctctcaagtgctgggactaaaggcgtgcaccaccaacgcccagcacaacctactttttaatcacacatcacaatgtggccagaaaaggactctactgtttcgtagaacaaaagaggacagctgttcgtgaggtgcccctgtacttggaaacctttccaatttacttcaaatgccaaacaacggggcagacttaatgacatgggtacacctttaaccccagatctcaggaggcaagcaggcctctgagttcaaggccagcctggtttatgtagtaaaatcctctctctcttttttttcaatatgttagtttattcttggagtaaacacttctttttctttctttttttaaaaaaagatttatttattatttattatgtaagtacactgtagctgtcttctgatgcaccataagagggtgtcagatctgatnnnnnnnnnnnnnnnnnnnnnnnnnnnnnnnnnnnnnnnnnnnnnnnnnnnnnnnnnnnnnnnnnnnnnnnnnnnnnnnnnnnnnnnnnnnnnnnnnnnnnnnnnnnnnnnnnnnnnnnnnnnnnnnnnnnnnnnnnnnnnnnnnnnnnnnnnnnnnnnnnnnnnnnnnnnnnnnnnnnnnnnnnnnnnnnnnnnnnnnnnnnnnnnnnnnnnnnnnnnnnnnnnnnnnnnnnnnnnnnnnnnnnnnnnnnnnnnnnnnnnnnnnnnnnnnnnnnnnnnnnnnnnnnnnnnnnnnnnnnnnnnnnnnnnnnnnnnnnnnnnnnnnnnnngatccaatgccctcttctggtatgcagctgtacatgcagacagagcactcacacattaaataaataattgggtttttttttttaataaaaagcaacctagtaatatttaatctcgtcactcatgtgctcaggccatacataaatggaaccagcctttgtctaaccaaatatagtcatgaaataaccattaagaggagcacacctggcatgttttcttagtgcaccctgcattcctggctaatgacatggggacaaagaccacactgtcattttctcctttatgttccaagccccaaggaaggaaaatcacactggattaaccaggtagtagtcaactctctttgaagagtatgagatgagatgtccaaatagaagacgggtgattttatctttagcagtacagaacactgggctgtagtctgtttctggttaacaatggccctctgaccttttcatccaaaggcctccctcccatgcagaggccaggtgggaacagtgttaattaagatccaagggggctggagagacgccttagttgtaaagagcacgggttgcttttgcaaaagacccaggtttcattccgttcccagccctgacatggcagctcacaactgtctgtaactctagtggcaggggattccgatgccttttgctggcctccacagacatgataaatgcacatggtacacaggccacatgcaggcaacaccacacacattaagtaaaaatatttactaaaaaaaaaagttctttaagcaaactcatgcatggtagggcccacacttggctcatttggatttatctggggagattccccgggttttctcggtagaattttgaagtaaaggtttgatctttccaatggcaacaagataacctgagtctcattcagtttgtctttgacttacgtccactggcgatgtgggccttttgaattgtgtagatccgttctgaaagtctgattcattcacacacacaacacacacacaacacacatacacacacacacacacacacacacacacaccaccttggtgtgtctttgtactacagcagtgttgcatgtaaaatgttcttagaataggaactttttttttaagctggtgagtcagtgagttgggttaggagaggaaattcggcctctgagatagctaaccacagcttcccctcgcccccctcctttttttttagttttaggttttagtttttttgagacaagatctctctgtgtagccctggctatcctggaactctctctatagaccaggctggcctcgaactcacagagatcttactgcctctgccttccagtgctgggttaaaggtttgtgccacctatgccctactgaccatggctgtttctacacaagaaaccatgttggctaaggccttagatgccaggagacaccgtgtcagacttgttaccttcagtcctcccgccaacctccccccccacttgtgtcccatttgcggcttcatggaggtacttctgcagcttgccttgaggtcccgaatggtttcatcctcactgctgcgtgggacttggggaaggacacctgaagtgttaataagctataacattgattccatggctgggttgagacatgaggggttcagaggagctgagggacagtgccagacaatgctggaggaccatagccacagctattagcagttaaatcgccatgagtagatttagatcaccaccaccctcccctttctggtgtgtgtgtgtgtgtgtgtgtgtgtgtgtgtgtgtgtgcgcgcgcgcgcatgtgtgacatccacacatacatattctgttttaggactatttctctgaaataaacaggcaaccgctttatctgatggcagcagtgttgtgtctgaagcgggagtgccccccctttccctcccctatgagactttccgaggaaggtctatgaatgaagcaggtgttttagaagttttggcgcacttgggaatcccccttttagaatattcgtgacgatgatagcggaggagttggggtgctcaggttggagcccttggccatggagatggaaggcgggcagcggacgatgatctggatggctgccatctgccatgaggggaggatttttgaaggtagctagggatgactgtcacagagacttcagttaatgcgcttggcgggggactctgtcggtggcggaagggcagagcacatggccaggatgttgacaggcctcctcgcccgcaaaggggaagaaggtggtggctgaaaccctcccaggttagctgaacatatggctaggaggagcagccaggctgccagcgaaggggaaaaaggtggtggctgaaacctgcctgggttagctgagaagactccggccatactggaccgaaaagccccagggaataaggaaacacttggaaatatttggtgacatttgctcatgaatagggaagaaaataaaggaagccaccaggactgtccccttggcctgcccagcaagactggaacgtgtgggtgtggggaaagtgggactcgggttaaggtcaccaggtcagaagccagtgagaaccttggagaataaaaactcccctgagcgggctggagccgcgcgtgcctagcatgagcccgcccatgggtttgactggcacccagaacccctcccgcaaaaggacactaaagagcactggctgctctttccgagaactgaggtttgatttctagcacccacatagtggctcacaaccacctataactctaggggatccaatgccttcttctggcctccttggccaatagcacacacagtgcatagatatatgtgcacacaaaagagccaaatacatttaaaacaaaataaaaccctcctgaggctcctgccgtggttagtggctaagtgtatgtcttagttaggtttcattgctgtaaaaagacaccatgaccaaggcaactcttaaaaaagaaaatatttaattggggctggcttacagttcagaagtttaatctgttatcttcatggtgggaagcatggcagcgtgcaggtagacttggtgctggaggaagagctgaggattctacatctacatcagaaagagactgtgtaattccacactgggtgtagctaaaggaaacctcaagaccacacctactccaattagaccacacctccctgtgggccaagcattcaaacacctgagtctgtgggggccaaacctattcaaacacacacacacacacacacacacacacacacactcacacacatacacaaacaaaatgagtaaatgctaaaagttaggggaatgggagggaggattttggtttacaagaccaagatacattgtgtacatgtatgaagttgtcaaagaatgataaaaaaaaattattgccaggcatggtggcgcacgcctttaatcccagcactcgggaggcagaggcaggcgggtttctgagtttcgaggccagcctggtctacaaagtgacaaagtgagttccaggacagccagggctatacagagaaaccctgtcttgaaaaacaaaaacaaacaaacaaacatatatatacatgttaaaaataatacaaacaaaaaacaaaaaaaaaaaaaaaaaaagaaaaaaaaaaaaaaaaacaaaaacaaaaaaaccccaccaacctcatctgagctgtgccaggcagtgggcagacgtggcaggcagctttggtctttgtattcacatctgagcatgccttctttcagtcctggatcttaatcctctatggcatgggtgcagacaagacagtcgaagcaagtgagatagatgctcatgtgccctgcgaaagctgagcccttctaaaaaagcgagtgcgcttttgactgtgataccagggagttcaaggccttgtctcgatagatagatagatagatagatagatagatagatagatagatagatagagtagatttgagactgtgtttggtttgtttttaagcacctgctgacctggaggtgtggctcagtgggagatcacaggtaggcaagcataaggttctgggttcttcagtcagtccccagtaccacaaaagggtaattttttttttcttttttcttttcttttttttgagacatggtctccctatgcagccctgactggcctggaactcatgctgtagtccaggctgacctcaaactcacagagattgatctgcctcagcctcttagtagcctagaagtaatttttcagtgtgtaagatagagacagttgggctggtgagatggctcagtggttaggagtgccgactgctcttccgaaggtcccgagttcaaatcccagcaaccacatggtggctcacaaccatccgtaacgaaatctgatgccctcttctggagtgtctgaagacagctacagtgtacttacatataataaataaataaatctaaaaaaaaaaaaaaaagaacaaactgactcatctttaaaaaaaaaaaagatagagacagtctatcaagtgatttgggctgtggtatgccccgatgtaggcttttgtctatctgtataaacagtattttcttacttttgccccaaggcacgacaacaagctcagatacgccagcaaatggcagaggacagcaaagcagattactccttaatcctgcagagattcaaccaggagcaatgggaatactaccatacccacatccccaacatcttccaggtaagcgctccccagtgctcagggtttgtgaagacaggatgttctgatgggacaggctctcactgtagcctggaagtcactttgtacctcagctggcaatctcctagcctcggcctcctggtataacaagtatgcataaacacatctggcttcccaaatgtcccctgagtgtgtttgtgtgtgtgtgtgtgtgtgtgtgtgtgtgtatgtgtatgtgtgtgtgtgtgtatgcgtgcgtgcataagtcagaggtcaatttgtagggagtttcccagaagctgcatcaggtgacttcactactgccttcaactgcagccccaggggatctgccatcctctctggcacctctgaggacatctgcacacacatagtatacataaactcacacacacacacacatacaaataataaatcttaaaatctcggggtggctagccagcaagccccatggattctcctattttgggtacccttacaggtgtgtcccacacgcccagttttttttttttatagaggttttgggtattgatctcaggttctcatgcctgcacgacaagcatcttagtcacctagccatctccccggcccccgctgagtcgtttccccttagcatgtagatcaaacgatggccagcaataagaatgaagcacaatgttagcccgccgttcactgggtgcctgtgtggacatcctggtgttcattgcaccctcgttttttgcaggggctgagattttacaactgtgccttttagatgagcgcttcctctttaaagcatactctggctacaagaatcgcctgcctagctttaggagacaaagcagcattcagagctgtgggatttgaacaaacaagtattgtttcccttgaattgttctccttttctttttaaaatctttgtgagagagagaagagagaaagagcaagagcgcatacagacagaatctcactgtggccccctggctgtcctggaattagctctgttgacaggttggccttgaactcacagagatccatctgcctctgcctcttgagtgctaggatgaaggtgtgcaccactatgctggcccaccattctattctttgtggaggcaggctctctcactgatctgcagcctgccctcccagctgggctggccagcagccagtgctggagatcttccgagctctgctgccacagtgctaggcttatttacaccctacccgacccggccctggcatttttgcatgactgttgacatgtccttgtggcaagcactttaccaactgagcctggatcccatttatttatttttctaagacaggttttctctgtgtcctggaactcactctgtagaccaggctgggtttgaactcagagatccaccagtctctgcctcctgaggtgctgggattaaagtgtgtgctgctactggctcttgcatctttttgggttttttttttctatctcaagttctcaaaaatggtataagagactctgtgtgacacttactgtggagcactggcttgtcacagtcacagcaagccttaccttccatttcagcatgacagtcaatcaatcaatcagtcaacacacacacacacactcctgtttggaaactttttgtctgtttcttatttgtttttgagatagaatcttgctgtgtattccaggccagactcaaactagtgatcctcctgcctcagcttctagaacacaaggattacatcaccacaccatttgaggaatcttttaggatttgagttccaaatgtagaaaagccaaagtgactgactgaagtaaacccctgatgaggttctcagggtccccaccacaaacctttaggtcagtatttctcaacctgtaggtcgagacccctttagggattgaacgaccctttcacagaggtcacctaagaccattgaaaaccacgggtatttacgttatgattaataacagtagcaaagttacagtaacaacagaatacttttatggttggaggtggcaggtcaccacaccatgaggaactgttattaaagggtcatagcgtagggggctgagatcactgctgtgtgctgtggagggcaggactctagttctgtctcagcctgggttgtgttgagactgttaccaaaatggttttgtaaaagatggaaagtggagggatgtatattgacagggaggattctaataaaactaaaaacaaacaaactaacaaaaaccaaacatgcccctctgatgtaatcccaggacttgggaagtagaggcaggaggatcatgttaaagctagcctgtctccaaacaacaaagtaataataataaatagcataatagggccactgggatgggttgtacttcctttcggtggcactgtgataaggtcctccctcaaggccagcttcaggaaggaagggtttattggctcccagttgagggtatggagcaggatatcatggccctgactgcaacaggaggtcacatgctggcaggagctggggacaaggaatggtgcgtgctagagcctggctcaccttcttattttaatttttttcctatatttttattttgtatatttgagtgttttgtcttcgtgtatgtagtctgtgcaccacatgcatgcagtacctgcgttagccagaagaggtcactgaagcccctgggactatagttacagatggtgggaaccaaacccaggtcctctggaagaatagccagtgttcttaaccactgagccatctctccagccccctctccatatatatatatatatatatatcacttttacatttatttattcatgtgtttagtatgtggctatgtgtggggtagatgcttgtatcacagcacacacagtgggcagaagacatactgttttctccttgctaggtgggctctgggttttggatttgggttatcaagcttgatggcatgagccgtcacacctgctgaggggtcttgtgggtctgcctttttcccctaggctggaaccccagcacaatgaataatgacaccacatttagggtgggtcatcccaccgcagttaaactaatcaagaaactccttccttggcatgcccagaggatatttggtgatggtagatcctgccagttgaaatcaacgttccacatcacaggagtcttccagcaattacaatacagttgtgtgaagcaatcactacgcagcccagccgttcattgaacacagcacagcaggctgatctatgaccgtacagtaaacacagggggagcagtagtcacccccaaaccactacctggattagcagcagaccattttatacacggtctgatttttgcagaaaatacaagagatggaggagaggcggattgtgcgtattggggagtccatgaagacgtacgcagaggtggaccggcaggtgatacccatcatcgggaagtgcctggacgggatagtgaaggcggccgagtctatcgaccagaaaaacgtaagcatgctctctgggcttctcctggggccatcgtcccttccttgtcccaccagcagcacctccttcagggaccctgggagttgctgggtgtggtctttgtctttttctacctgaaagccctttcttgaagccttcagggtttagtccccactcacaaaacacactcgcagggatgtcactaagttgaatggaagtgttttgctgggattggactgatttctggaaagattcaaagttctctgcggcacccgtgacccagctgcctgcagaggcgtggggtgtttgacaccagatgctgatggcacccctcattggatagtccatgtcactttcaggtgttgccaaaagtcccttgggagacaaaattgcctttgccttttgtttaaaataccactttttttttttttttttggtttttggagacagggtttctctgtatagccctggctgttctggaactcactttgtagaccaggctggcctcgaactcagaaatccgcctgcctctgcctcccaagtgctgggattaaaggcatgcgccaccactgcctggctccctgcattccacttttaatgatctctgaaaagttttatcagtctggtgtgccctgctgccttggaatgttttaaatggtagatttctgtaagagaaagtgccaggcaataggtggttttcttgtgtagagttttgatggtaagatatcttgcctcccatttcattaagacatgttggctttgagcatccttcaggggcctctgccacatttgtaagaaaaaaattatcagtggtccaaaaggaacagcaccccctcccccctctgactgcatcctacaggagagctttctacctgaggtgctcaaaccaatcttaccttgactggaatttcttttttcttcataattatgtcaccagttcaagatctctcagaaaagtttaaccgtctaagcgaagctccctccaggcaccctgtttaagggttcagtgacacgtcatacaacacgtggacaaaggatgagtccttcaaaagcaaagcatcatgggaggtggaggcaaaactttgtgagacaatctctctagcaataaacacagtgctgaggaccacagtgctgagaaagagtgggattctcagtagcatttcttgggtcctccttggtctgtatcatcgccactctggtggtgacctgcctgtccctgggtgtgattgcaggactcccagctggtcgtagaagcctataagtcaggattcgagcctcctggagacattgaattcgaagattacacacagccaatgaaacgcacagtgtcagacaacagcctttccagctccaaagaaggcaagcctgagctcagatttggcggcaagtccagaggcaagctctggccattcatcaagaaaaacaaggtactggccatttggaccctgcgtgggctgtgagctacagatgcagagtctcagagtttatcttttggtcttaatcaaactaagatctggacttccagagagcgagagaggacagttagtgtgctgcgttcaattcacgattcaaacggtctgtctctggtgttggagtctttgccatggcctctgtcttattgcagatgcgttgtcccaggaccgggtcacccacactaacatcactgacctcacagccctgtcacccacccccatcctcccagactgctgggagcaaggggaccgagtcccatctaatcaagcttgccagcctgaccttggttttgacacgttaacctgtctctgtgaatatttttcccttttcttttcatagcgtggtatgtaggtgcatgacagctaacccggcggcctaaaccggatggaagtggccttactgcattaaccttagattagactgattgtctgagttttccaggacaggactgtccccctgttttagaccccctctcccccatcgaactgcgttagcttagatgtggacgtgtttacctctggcttaaactggttctagaacgactaacgagagcctagattgcatgtcactgtctgcatgagctttgggtcatgatcttctgctgtcctgtcgcgtactcacggaccctctcctttccgccccctctgtggaccgcatcctccatgatttcttttgtaccgtggcatcgatattaatggtttgtgttttacttgctttggatcttgaatatgatttgatgcttatttctgttttgtgtcttcttgtttctgattttttttttctgtcgtcattccacccctcacattgtagcttatgtcccttttaaacatccccccatcagcctccccctccgccccctgcctctgcctcaccctctgctgttcccaacggcccccagtctcccaagcagccaaaggaacccctctcccaccgcttcaacgagttcatgacctccaaacccaaaatccactgcttccggagcctaaagcgtggggtaagttccgctccggagtcctgcgtctcttgcgcaccatgttgcatgtctcattctgcgtctttactttgtgagtagacccagtgtgttttcccgtagcatccagagggagagagagcctgagcctagactcccagagagcagacgaatgacagaaagagaggaaggaaagagccatgcggaggggaatgagcagcagagagccaggaggcctgaggtctttgactctctagtccgtgctggaagcacctcacacttccccttcagagattccgagtcattcattttcctccttggtctcaccaactctgactcgctctctcagacaatgtagaagatgaggaagtggaagcgactagacagtcagaaaaatctgtgttgagtaattacagacagggatgcggcacaggctctgctgcccaaatgatgctgctggcgaggaggaaggaatcggaccgggcttactggttcccttgtgaagctaaggggtaacaatagcatacctctcacacctgcatctctctgcaaagggagaaggcaccacagcggcgacattcctccacggctccctctccactcagtccccaccttcctcggtggtgaatccagtgaattactggaagctgtggagccgggatataagtgtcagctcacgtggtcctgtgctctgtggcacccaagttcagggaacagtctcttagactgcggttgctgttacgactcaggtttgaaatccttcggaggaccagaagttcagggacatccttgggtatagaacaagtcccacgccagtctgagctacctgagattctgtcacaaaacagtttgttaccatacatgaacctctatgagaattaggcagtcgtccagcatagataccagcttagcttaatgggaaaaggctgggaaaaaataatttgtgacctcccaagtaaaactaagtgagcctcctccagttgtatttataataaatgtctgggctgagcgtggcggctcatatctgtaatcctagcagctaggaggctgaggcaggaaaatgttatgtttaaggctagcttggactacatgtctttccaggctagcctggaatgtaacgtgagtccctgcctcaaacaaacagacaagaagtctgtagccgaatggtcagtgccgcacccatgtgcaggtcctggcctgtggcgttcccctgcagacagatgtagttgaatgccttcctctgggatctccaagcatccaagcagctgagtactgagacacttcttccttttctttttttggagacaatctctacatataaccctgtgtgtcctgaaactgtggcccaggctggcctagagcctctctggagtgctgagattaaagtcatgtgccaccatggccagctggagacacttcagtgtagtccctgagagctcagttatccctaaagccagagttgggtccagaccgtgggctgataagcagcattcttgcaaatggaaagttcccaagttttgtgttttctcccccaccgtcctctggcatgggaaaaactttcagccgtggctaattagatgagtgtctgcctcagatccatgcgctggtggatctctttatctgcagaatcccagtactgagagactcttcatttcataggaacagtgttctggtctatatctaaccttagtactccagaggctgaagcaggaggattgcagtaagtttaagaccagcctgggcttcataatgagatcctatttccaaagaaagagagagaaaggaagggagggacggagggagggagggaggggcctggagtgtggagtagctggtagagtacttactttgcacgaattcccagcactgcacaaaacatgcagtggttcagcctgtgaagatcagaacgtcagcctagactacgtgagatcctatctcaaaactgaaataaaagaatgggtggagaagctgggcagtggcggcgcacgcctttagtccaagcactcgggaggcagaggcaggtggatttctgagttcaaggccagcctggtctacagagtgagttccaggacagccagggctacacagaaaccctgtctcgaaaaaacaaacaaagcctgggtggagaaatggctcagtaggtgaaagtgctgagggaagcctgattacctaagtccagttcctcggccacagtgagagagagtcgtctccccaaagctgcccactgccatcgcatgcatacagccaatcaatcaatcaatcaataaatgaataaataaatacatgaataaataaataaataagaaagagtatataaaaagaagagtagtgtccaaaaagatcaaggttgaaggaaggaagggtacacttgagagaacttgttctaaggctacttagtaggccaagttagaaatcagaaatttgggttggtgaggtggttcagagatacgtgctcttgctgcgaagcctgacaattaagtttcatctctgggacctataaggtggaaggagagaaccaactcttgcaagcagctctctgatcgccacgtgcccaccttagtgctcgaacacactcacacacacacactggataaatgaatgtaatcattttttttaattaaatcagaaatttaatttcctaaaagtgtcaggacagccactgtcagcaggcagagtagcttcagaagtgcatgatggattgtgctgagctctgttgttgggactggctgagcaatcagccgcttcctggctcgattattctggcttttagaacttcactcttcatcagagaaatttccatgaatgtaaccagggtgaaccaggctcagagtcattaatttcatcacattacgacatgatcattcgtgtttataaacatctgcatctgtctgtcagacatgggggataagacgtgctgagtggcttcagttaccatccatgtgcgtgtatggtccatgacaccatatcccaccgtctcctggtcatcgatggtttctgcgtctgtgttctgatgtccccagagtgtgttgccaaagtgttgccaaaggccaaagaatgtctgtgttcgattagtataagaaaagatggtttaaaaaaaaatttgatttcagcaaacttctttgatggaaactttcctggaaggtaagtgcattctcccagtggcagacaagctagaagctgtgacagggggaccggagagcggttgtgctgtcgtcagatctgcgtagggtcagatctgacggttcttctggccaagagcggtgggggaaagggaactgggggatggtgggtgggagggaggaaggaagaggggaacagcaggccttggaaaagaaaacatcttaaacccaacatctggggaactagatagaccctatttgttaagcagcttcggtggggggtggggggatgccgttggtaggtccatgcaggccagggtcagggagccctctctcccggtttactttcccctgcacctgaacttgagactctcgagcaaatgcgctccagggaggattctcggagaataacttggctgtggctgtggtgtctcttgttcattcccttcagattttttttcattttgtgttttgtctgtgtgagcgttccctgtgggcatgcctgcaccacatgtctgtctattgacttcagagtacacaagaaggcactggatcctctctgtctggagttaccaatggttgtgagtcaccccgtgggtgccgggaatcgaacccaaatactctgcaagagcagcacgtgctcctaaccactgagccatctctcccgtgccctgtggtgtgtcttataatctatcatatttcacagccttcagatttgaattctaagtatctgatttaatgacgagtgtgtagaaattgtatgcaaacatttctctttcttttctttctttttttttgagatggagtctcactgtgtaaccctggctgtctatgaactcactatgtagaccagtctagccttgaactcacagtgatctgccttcccctgccttctgagtgctaggactacaggtttgcaccacccccacctggctcagtgtgcaaacatttcttagcatagcttagtttattttaacataattaaacaagattaaatagttttgtgatatttacagagggtttgcactgccagaccatcactgttccatccttacacatgtaagatgtacaaacatgtacaaagattagagtggagaatgtgtccttagcgctgtgtgcgaaggcacatgcctatgattccagacccggggaggaggtgagaactggaggactagaagatcagagtcatcttccctacacagggagttcgagactggtgtgagctacgtgacaggaaaggcaaggggtgtggaagagatagagattgatggtgtggatagatagatggatagagagatagagatagatagatagatagatagatagatagatagatagatagatagatagatagaacgaacctgtccttaatttgagtctacaaagggtaattctattgtcttaaatgagggtttccttttgaacctgtgcaaagtacagctaaaactagatggcttccctcatagtttagagttaatcttaggaaaagccatcatagtagagcaagacattttagatgtccattgttgcatgttacattgtgaatgcgtggttttccttttttctttatcttaccctgttctcttgctgactgttggcagactcagtctctgtgttatcacaaagagctcatgaagaggactctagggaaacccacacacgccttggaggctagggactatgttgtaagtccgcctgtgatgcagataagacagtcacagccaaagcactaactccatggacagcgccaagactggggacacaggtgcagctgtaacacttctatcccaccgaacaaaattctctgggacaaggaggggatattactgtataaaattaacagctaccgtagctccaaaacctgtataggaagatccaagccctctcatgggcatccaatgccccaatgataccactgagctagctcactgtctgagtgcccgctttttgtcttagttctggtaaaatctttaaagagctgcagcagccacctgagatagccatggtatctctggatatgagtttacggcagaaatttacccaccaaatacagctattgcgtgtggtcaacagaaagcaacagtttagggctggtgatgtgaccgtgcagagatccacatctgtgtttgtagcctgtaggtcactagggagtcatgtcacaagcctggagaacaaaaactcaaagaagcatgggcagagacggttccaggagagttcaccaacttgtgtctgctcgggcacttaccgtcccctttctttgcgcttgaggttagtagctgtgaccgtccaatgacacatggacacgctggctctgtctccctcctgtgttattgatgcttgcttctcccagagcccctaactgtcacctgaagctgatggcgtttggtcccttagtgtctagtcacacactccatggggtctttgccgttattcttctaggagactgctttctaatcggaagtgacctaattgtctggcttatttatgacttacaacctgaaaaacactttagtcatctttaaaaagaattccgcacactgaggtggcacctctggcaggtgatctgtcaccacccacttcagaaaatggaatttgggagttccggtgtttccaaaaaactgagtgtgagaatttggtatttcctgttcctctcttggaacaggtgttcagttttaatcacttgctcttattttgaactggaaaccttcctattgatactacaaattcgatgctaggagatttcgattataatctcaagtcatgggaggagccccatagagaataaatagtgagccgggttctagaacttcgcaagaagattgtgtgtgaggaagtgctagtgtctgctggtgtgctctgtgggcgccgtctcctgctctgcaccatgggtgttgtctgtctgaatgacgagctcagcttgtgacagacaatctgtgctttagctccaggaggctcaacaagttcagggccgtgcctaagcagacattcttgaaaagctgttcaatttctctcctatttaacaatctcttccttctacgtgggaacagtttctttaaaaagtgattgcctatatgcaaaggagtatcaacttttttttttcctttgagacagcatctatgctgcagttcctgctggcttggtactcactatgtagaccaggcctctacctcctgagtgtgcgccatcaagcctagctagaggtctcagctttaaataatcttaaggatgcaaataatataaaaactggctaaggaattttaagccctccctatgcagcctagcaatcaagtgtgctttctttggtagtttatccatgtctgcaccatatcacccctactaggatcgtcagagtgtcgcatgtcgagcactccctaggcagacagcagggtctcagaatcgtgtttctattctgagttctcagagccgtcctactatgctttactccagcgattgagggaggtttctagtctctaggcccagcagtaacggagctgttgtggccctgtagtaattagctcacacatacacgcagcagtagcagcactgggacctaaggcagtgcttacccataccctaaagtcagcttctacaagctgcagctcctggtcccgcaccaatgctgtgtagcctctgtggacagtcatggcgtccagtagcctcaggtagcttggcatcccactcctcaggagctgaaggatcaagagatcaaggccagactgagctacacagcaagacccaagctccctcaaaggagatcaattcattttgaaaaagaccaagccttgaaagaccaagcctcacggcccaggaggggtgctggtgacaggtgggaaatcacattgtcctgcatctccaacctgctgtcaagaggccttccagcttctgacctccacatgcacgctgtggtatgtgtgcacacgcctacacacatgcgctcaggagcacgtgcacacacaccccgcacacacaccatcagtgtaaggtgggacgtgctggagagatggcacagcagttcagagcccttgccgttcctttttttttttttttttttttctttttcttttttttcttttttccggagctgaggaccgaacccagggccttgggcttgctaggcaagcactttaccactgagctaaatccccaaccccgcccttgccgttcttacagagaaccagaattctactccagctcctacatgtctgctcacaccccatgactccggctccaagggttctgttgccctcttttaggcgagcttgtacatgccctagagtgtgcgcacacatatttacacacataagtaaaaataagtatttttcatttaaaaagccaatgttaaaaaaataaaaactaaacaccagaaggagggctggctgccaatgaccccagcgctgggggtgggggacagaagagaagaatcgtggggagtggggggctatggggagaagctgcctatgaccccagcattcaggagacagaagggaaggttccctgaaaactgaggccatcccagccagggatgtacattgggtaaccctgtctcaaaagtaaaattttaaaaagactctgcataaagatgttctgggagagaagtgctatgcaatttttttccctcttagggtcattatttgtcaccgatatgcctagcaggtttaaagtcctagggtctgttcccagcacttccccaagtcaccctccccaggaagctgactttcagaagcatccagtggaaggtgactgactctgcagggccatgacgaccctctcacaccttgtctcagctctggcacccaagatgctaagaagagtttctctcccgagcagcccctcctgtgaacttttgcacagatctgcctggccatttcacaagtcagcagggaactgctgttatgcgtccagtgagaccggccagtgcctcctcttctgacctgtgtttctctctctctctctctctttcccgtttgttacctcttcaatttcccacgaagctttctctcaagctggtaagcaccacatcccgtgcatgtccctggtctaattgggttctggtgtgtgctgtgtgtgctctgccccgggcagcctgcccccgacattaactgttccccttcattctcctgtgggtgcttttgttggtgtttggttgcgtgactgtcttacttactaagaaaattaatgcttaacatgattttattttattttactttggggaccttagagttgccaagcattgatcaattatctatattcatttgaatgtaattgtcagaaattgaggagcaggggggggggtcttcctactggatcattctgggtaggtagtcccttcctgggagccacaggagtagataggtaaaaacaaaaaacaaaacaaaactgagagcctaaaggagacactggggaggcagaggcaggaggatctctgtgagtttgaggccagcctggtctgcagagtgagttccaggccagccagagctatgtagagagaccctgaaggagacagtcatgcatgtgtcatgcctgtcatgactgctcaggtttctggtagggaagaccagtgggaagctatgatctttggtgggagcattgggtaaagctgattccaggggccatagatgctttgatggacaaagagaactcctggtccatccttgcctgagctatctacttagcatctgtctgtcttgcttctccttcatggtgtaattcaagcaaacagcctgagtaactgatttattaaaagaaaatcttaaccaacataacccactatgctttgagaatgaatgaggactgcggacatggttcatggttcagtagtagagtctgcctaacacaggcaaagtcccagattccatccccagccacacacacacacacacacacacacacacacaaagattaaagtcatggaatcttcctgaatgccaaggcagagcaattcctccattctcacagtaatggaccatgttagctaaccacagagtaatacctggggtatcactcttgctgggtgtcctactcttgatggcctggcatgacatgtgccatgtgcccatgaatttcctgtagctgtgcacatgcatacgtgtacatacatcatttctcaactgactctattttatccacagtccagtcaatctcaaagacatatataattaatttttttattaaataatatttctcaaaaatgaaaccccgggaagagtctgcagtcaagaggggtctctcagatggaagaggtctggatgctgaataactttaagcagtctttccttttgggaaacaaatcctttcaccagcttgggagtgggctgttgcttccatggcatttagagatggcacagtgggtagggctgcttgtcctgacaagcttgaaggcatgtttaaattccaataccatcaagaaagccaagtatggctgcatatatcttcagccctggcactgaggggtggagataggtgagtgtgaggaaggcactggggcacccagcctcaactgaaaagccagatccaaggctgtaagatacagagggagaaagatgcctgacgtccagctggagcaaccccttgggtatgcacgcatcagcatgtaccacaaacatgcacacagacgtgaactatgaggtagaaaatgaattggctgtacaagcaaacatctgttttatccgggcttgtgcccgggagcagtgtgggtcccatcagaagatggggcaaggccgaatacagacccctctaacctgggtgtgtctggccacaccctccagggcaggttccaccattctacaaactgggtcactctggctgtgtcagagacatcccccatgactcagcgctagaaacaagagccccttctccgcagagtgagtcacctgccacagctttgtttgagaaaatctaaacttcaaaagcccaattgggtgagacaccctttctatagatcctaagtttctatgagaagctgctgacctgaatctccatagcaaccaaggtgtgaggttttcccagtgacttgttttcaagtaataacactgttgacatagccagggtagctattgagagggacctggctcttcgatggaccttttatcaattgaagatgatgattttgttgtcatgagtaactagtccttcctcttctagggccagtcacaagccaccagcctgcagtgttccttacaggcgtctccaaagccattcagatgccgtccaagcctcatacatgtcctaagagtcgggtcaccactgaaccagccacattcaagtggggcagtcagctgtagtagctgtacagtgcagccacacaatgtccccagcatcacagaaagttctagaaggctctctggccactgcccagatcaccttgctgacacaactccatgacttgcattgaattttgttccgtctgagatttaaaagcaaaacaaacaaaacctcagggctgggaaaatgagtccagaggcgaaagtatttataagcccagcagcaggcagacgtgtatataagcctagcactgtgtgggtagagtatgcaatgggaaacaaccaagataccctgtctcaaactacacacacacacatacaccaatctaggaaacaatgatcagggtcgccaagctggctcactggaatgggctgtttggtgctaacccgatgaattccagagacccacatggttgaaagatggagctgactcccacagattgtagaatgaatacatattgtaaagatggattttcctccaagctcagtgcttaaatagaatgagtagaaagctagacagtgatgtttcactagtgtgcgtgggagaggggagccgctggcctgtaggaccatgcttggcctggtgacaggaatactgcccatcctctcccgctcccacacccaccacacacccagggggtctcaggatggagtgctgacctccacctggcctaaggggcgagccatttgctgactcctgtgctcccccggcagcagcttctcctaatcagcctagaagcctctgtcacaagcccccatgtaagctgcttggcaaatccagctggattccagaatcacgttccctgggccaccaagtcagtctcgctcttgtttgaaaagaattgaggttttcaagtaaaatctctttttataaatttcctggctttctctgggtccattgaatacatttcattctttatgaaaatggcctcacttaaggaagagctcttgtactgccttgaagccaaggaggcagtccttggaggaagaccagctccccgagagcgcctactgaaagtacagtaagagccaacagtgcagtaggagcttaagagagtcccagccaggtgtggtgactcatgcctgcgaccctggcactcgggagtctgagtctgaaggattgcactcagctgagccagagctggagagacggcttggtagttaggagaatgcagaagacccaagttcttttccaacatcctgtagctcacgaccacctgtaactcattccagggaccctaatgccctcttcactgaacacacaggtgcacgtgtgcatatgggctatgggcacttacacatacaattttaaaataaaatcttttaagtctggggaggggggatcaggagctagatgtggtggtttacccctttaattccactacctagaaaactaaggcagggggatcactgtgagtttgagactgtagtctggaagtacaatgcatgtctagcacatgtaggcctcaggttcaaccctgcagagaaggggtcagggcgtgttaccacacgctctgacagtagaagcacgggaggttggttttgtacactgtaggaagtaaatctggggtcccagagtcagcgagggacaagtgacaccagaagggggtgatggtttttaaatcgtactttttgctcacatccacaatggaaagcctgtctgtcatctcacaggggcaggagctctgactgcctcagcattgagaggagagatggttagggacacttcaactaaggggaaagcagagacttagacacaatactgacaggaactggattacattagagaagcgtcacttcctgtcctgggtgggaatagtcagagtatgcagtctctaaatgtgtctttgggtctccttctgggtcagagctatttccccccatctctcctgcggtgtggttgaccctggccttccctgtgttgctctggcccttgcagatgacacgtggtgatttgtgggacttcccaggtctgcatgtgtttgatttttgcatctcagctggtgcagcagggaaacatagctggctcagcaggtctgcaggcttggtctgcctgctcctgcccaggggcactgcaaggctctctggtgtctcatttatgtttgtgtctgcagggtgtcacaccagaagacttcagcaacttcccacctgagcagagaaggaaaaaactacaacagaaagttgacgatctcaatagagagatacagaaggagacggaccagaggtaaggcagatgtgccctgtcaaagaacccaagctcagtctggaaagaagaaatccagtgtgtgtgtgtgtgtgtgtgtgtgtgtgagtctgtgtgagtctgtgtgagtctgtgtgagtctgtgtgtgtgcatatacacgcatgcatgcggtacccacaaaggccagaaggggcatcagaactcctggagctggaattataggcaagttgggaaccaagctttactcccttgtgatgaagcagtacactcttactgctgagccatctcttcagcctctaaaacatagaaaggcatagtcttggcaggtgggtttttttttttttttggtttttgagacaggatttctctgtggagccctggctgtcctggaactcactctgtagaccaggctggcctcaaactcagaaatccgcctgcctctgcctcccgagtgctgggattaaaggcgtgtgccaccacgcccggctcttggcaggtgtttttgtttgtcaagtgcagggcttctctgcagaggttgtattttgagtctgggaaacaaaacacacatggctagctttcataggtctcttgttctgagtgaatgtatgaagtgttgtttgctttcccagtcaatggaaggaagatattggggtcccagggtcatgagctggagaggccaccagagcgtccctcagccccaaggtacagaggttggcacgactgtacttctgatgcaggcatcaaggcacagggtgcaggtgtccatgactctccaagcagagcatcacggtgtctctgttttatttctgggcacactggcgacgggacagtgcagggtagacactttcttgaggtcgtagtcatacagtagacagtcgtttctccacgacttgccttccggaattagctgctgctggtcagacagggtcttgggtctgggtccggacagtctcagtgatagactccacctcaagggtgagggtctcccctgtcagggcccttgtgaagttcttgttggcatcagccacatcgcctcaatacgagtagtcttaggggttttctctcaaaggtcaagggggtttttgttttttgttttttgtacaaaggatggctaagattctctcctctctcccccatatcctgcctttgagtctaaaatctgtttctctttttagttgaggataattaaatattagtcttccagcagattctcaagtctccttcctctcccccccccattgtcgtagtcgtcgtcgttgttgtcgtcgtcttcttcttcttctcctcctcctcctcttcctcctcctcctttcttcttctcgtcctccttctcttccttctccttcttcttcctcctcctttcttctcttcctctcctccttcttgtctgtttgtctgtctgtttatttgcagaccaggttgactgcaaactccgattcctgcctctctgcctcctgccgtctgagactacaggaggtataagcaccccaacacaccttcgttgttttgatggttgtttgtttgtttgttttttgaaagagtcctaccctggaagtcattatgtcacccatgctggcctcaactcagagtagcaatcctcctgctgcatcctccccagggctgggattacaggattgcaccccgtatgtcttttctctgagcggtatagtggtctggaaacaaactgtaactggtctgctctggtcactaacagactagcatcctgtgtgcagctctgccttgggtacagggagtcttaggaggtttttctcagaggttaaaaagggtgttttaaccgggcagtggtggtgtgcgcctttaatcccacataaaaagccaggcacagtagtgagagtctgtaaccccattgctggtaagaggtcctgactcacaaaacaagtgaggtggctggagaaatggctctgcaattatgcacccatgctgtgttccaagttcagactccagcactcagaacaaacccaacatccctcagacacttctaacccaagctccaaggtgggtggagtcggcaggatctccaggccctgcctcagaggaaaggggacagagtgatgcaggcacgggactgcctccggtggccgctgggtattcacacaggtgtgcatctcacaggcacgagtgtgcatacgtgcacgcatgtacacacacacacacacacacacacatacagagttgttgttgttgttgttttaaagaaaaagaaaaggtagacaacagataaagactcccaacgtgacctccatgtgcacacatacctacacacacacacacacacacacacacactaaaatcagtgaacttatagattcatctgaagcaaagggatggtctcactgtgtagcccaggcttgcctcctgccttgaccacctgagtgctgagatcaccagtgtgtgtcgccaagcaaacagggtgataggttttaacagtaccttttcttgctgggcggtggtggcacacgcctttaatcccggcacttggaaggcagaggcaggcagatttctgagttcaagaccagcctggtctacagagtgagttccaggacagccagggctacacagagaaaccctgtcttgaaaaaccaaaaaaaaaaaaaaaaaaaagtgccttttctcttttaaagatttgtttattttatgtatatgagaacactataactgtacagatggttgtgagccttcatgtggttgttgggaattgaattttaggacctctgcttgatggggtcaactccactcgctccggttgacctgcacactccggcccaaagatttatttattattatacctaagtacactgtagctgtcttcagacactgcagaagagggcatcagatcttgttatggatggttgtgggccaccatatggttgctgagaattgaactcaggacctctggaagagcagtcagtgctcttaaccactgagccatctctccagcccaacagctccttgtcatttaaagaaaaaaaaaattgagtaaaaggtggtgtggagcctgtgatgttggggatggggtattctggaaaggacagtgacaaaaaaaaaaaacaaaaaacaaaaaaaaacaattggctccagtctcagtgcccgtgttcttgttatccctttctcagagatgccatcaccaaaatgaaagatgtgtacctaaagaaccctcagatgggagacccagccagcctggaccagaagctcaccgaagtcacccagaacatagagaaactgcggctggaggctcagaagtttgaggtgtggagaacagggagaagctggaaggggaagggtgtctctgggcaggcccccaggggaacccccatacctacctcctaccttttcagtggtaggtgttacaggagagctgggctgtgtcccaggagaggaaaaccacccgcctgacatgtggcgtgtggggtttcccagggtgacctcacagtcaccggactgagtcagaaggaagtatagaataattttatccgtgattacatggctgcccaagagtttggcccagtggagcctgctgtctgtcctgtgaggtgattggtaaatttggtcagtgggggctttcctacctgtctcccaactttcagaagaaggaagtcgttgtctgtgagcctacctgtatagtgcagggtctgagacatcaggctttaagtgactgtctagctctgaattaaggcccaacagctcatgatctagcctaggctagcccgggtctaagtcttctgtggcttttgcttccaggcctggctggctgaggtagaaggcagactcccagctcggagtgagcaggcacgccggcagagtggactgtatgatggccagacacaccagacggtcactaactgtgcccaggaccgggagaggtacagtacctgcgaggccctgcctctggcagagagacggtctagctttgtacttacttttcaattctggaataatttctcacggacagaaggcaagagtgtctattgtgtggcctctgattcatccaacgggagaatatctcagtttactttacatccagtccgggctggtggtctgaggtagcagcagctcccacagcctggttgagcattgctccacggggtggggcagagcaagtctccaggttggtcgctatagttgtcctgtgtcttcctctcttgagcagcccagatggtagttacacagaggagcaaagccaggagagcgagcacaaggtcctggccccggatttcgacgatgaatttgatgatgaggagccgcttccagccatagggacctgcaaggccctctacacatttgaaggtactgctgcccatgggaggccctctgccttcccagactgactgggctgctgccctctctcatacatacgataaaattatagaaacaatgtatttatttactttatgcatatgagtgttttgcctgcatgtgagtctgtgaactgtgttagtgcctggtgcttgtggaagccagaagagagcatccggtcctctgcaactgaagtgacagatggttgtgagtcaccatgtaggtgctgggaactgaatcccaatccttcggaagagcagccagccctcttaacccctgagccatatctccagttccagaaaaagaaatttaaattaataaataagatggaagatcagtaaggaagacatctgacatcaacctctagctacgacacactacatactcacatacactcacacattacacacttatacacactacacacacacaacacactcacacatttcacattcatatacacactacacactgttacacacacacaacatactcttacactacacacacatacactcttatacacaccacacacatattacacactcacacaccttacacactatacactcacacacaacaccctcttatactacacacacatacactcttacacacaccacatacacacgtacactcattacatactcacacactacactcttacacacttatacacacattacacgcttatacacactcttacacactcacacatttcacattcatatacacagtacacactcttacacacacaatatactcttacactacacacacatattacacactcacacaccttacacactatacactcacacacaacaccctcttatactacacacatatactcttacacacaccacatacacacgtacactcattacatactcacacactacaatcttaaacacttatacacacattacacgcttatacacactcttacacactcacacatttcacattcatatacacagtacacactcttacacacacaacatactcttacactacacacacatattacacactcaccttacacgctatacactcacacacaacaccctcttacactacacacacatacagtcttacacacacgtacacacattacatacttacacactacactcttatacactcacatacacactacacactcttacttatccattcatactacacactcacacattacacaacacacacaaacacctcagagtagggaatagagtaactgggtgctgttacttggctggcactaaggagctgctgatggtatttaagctgccgataggcacaccactgtcccctacataggatcagcagggtaacaggtagagcgtcagcacatgcctccgcctggacatgatgcagtccagagaggtacagaggatgctgtgagagaagagcctctgaggatctgtgataaaggctgtaccagggcatcatcagtagggaccaaaggtgttcgctgtgataaaggctgagccagggcatcatcaatgaggctttgctttgtgtcacacccaacacaagcacattggtgatcctgctgacaggtccttaaaccacttgaccctgccctatttcatttctactgctgggatgaaatatcctgagagtcaggggagaaagggttaaccttagctcacaggccaggtctcggtccatcagaggagggcagccaaggcaaaatggctgctcatgcctgtgctaagccagcttctactcttacacagcccaggaccttaccagggatgtaaccatcaattacggtggttatgacagcttcccaccagccaggtggtgtggcaccaatcccagccttcaatcccagcactcggcagacagaggcagaggcaggcctagtgtacagagagagcagagctccaggacagccagggctacaaggggggcgggggagacagcctcccacagacacagacatacctctaggccgacctgctgtagacagttcctcactgactcttcctggtggtttttcacagctgacaaaactaatcgtcacacgcttcccaaaccagcctacaggtgtggctggcttttaaatgatcttagagaactgtctgggggccttggctaaaaagaggacacagccatactgtggttgaaagacctgagcaaaaggcagagaagagccatggctagcccgatggctcatccttaggtcctcgagatgtcctggggaaggacgagtaagagtgtcccagtgaacccgagtctcctaggctaccaggcaacattaaaggagagctgggaaagtagaaccttgactttttagaaaatgccagaaaggaaagagatgagggtacagtggaagctgaggaaggacccttgcccctgcccctggcccaggaaacccctgaggggagtggcttagaggagcaggttctgcaaggcttgtgaggagtccggagtggcgggtaggagggtgaggggtgacctcagaggacctgaggaagggtccacagacggtaggagaaacctagagatgcgcatgcggaaggaaagcacttagggcggagaacccagcgtgcatcagaggaccgaggggacattctgtgcacagatctcactttgcctctagtacgccattggcagggccctcccagcactgcctgagacctcacgcctcactgtactcctgcaggtcagaacgaaggcaccatttccgtagttgaaggagagacgctgagcgtgattgaagaggacaaaggcgatgggtggactcgcatccgcagaaatgaagacgaggagggttacgtccccacttcctacgtcgaagtctatttagacaaaaacgccaaaggtgctaagacttatatttaatccacttaaaacaaaacaaaaagcattggagttgtctctccccaccactgtggctgttacaggccttcaagaggtcagcagagagcaagcgactcagacactcggggaactgggggcatcttgtgcctgggttcgcttgtccaacttggctgtgtacagaactgccaccggctagcttacatctgtgtcgtttgaaatctgatcggcgtttccattccattcaacaaaatgtgtaaatttaaaatatgatgtatggtggtggctcgtgcctataatcccagctctcaggaggcggagccaggagtagccaagtgagtttcaggctagcctgggcttcagagcatccaagtgagtttcaggctagcctgggcttcagagtaagacccagtaaaaataagtcataaataaaagttccttcatcgatggaagtagcctggaacgttctcctggtgcccacactgagtaacctgacgttgcagctcgggtttcctgtgttacccatttcttgtctgagtgtcccaaacaaccaaaagaggccccaggatggtgcactccttgagcgattcattttgacttgacattcatctcctggctccatcggtggtagagtatcttcaagctgttgaggcaagcttgcttagcagcccggcgccccagcgcccctgtgggcctaattttgctcagacttggttcaactgtnnnnnnnnnnnnnnnnnnnnnnnnnnnnnnnnnnnnnnnnnnnnnnnnnnnnnnnnnnnnnnnnnnnnnnnnnnnnnnnnnnnnnnnnnnnnnnnnnnnnnnnnnnnnnnnnnnnnnnnnnnnnnnnnnnnnnnnnnnnnnnnnnnnnnnnnnnnnnnnnnnnnnnnnnnnnnnnnnnnnnnnnnnnnnnnnnnnnnnnnnnnnnnnnnnnnnnnnnnnnnnnnnnnnnnnnnnnnnnnnnnnnnnnnnnnnnnnnnnnnnnnnnnnnnnnnnnnnnnnnnnnnnnnnnnnnnnnnnnnnnnnnnnnnnnnnnnnnnnnnnnnnnnnnnnnnnnnnnnnnnnnnnnnnnnnnnnnnnnnnnnnnnnnnnnnnnnnnnnnnnnnnnnnnnnnnnnnnnnnnnnnnnnnnnnnnnnnnnnnnnnnnnnnnnnnnnnnnnnnnnnnnnnnnnnnnnnnnnnnnnnnnnnnnnnnnnnnnnnnnnnnnnnnnnnnnnnnnnnnnnnnnnnnnnnnnnnnnnnnnnnnnnnnnnnnnnnnnnnnnnnnnnnnnnnnnnnnnnnnnnnnnnnnnnnnnnnnnnnnnnnnnnnnnnnnnnnnnnnnnnnnnnnnnnnnnnnnnnnnnnnnnnnnnnnnnnnnnnnnnnnnnnnnnnnnnnnnnnnnnnnnnnnnnnnnnnnnnnnnnnnnnnnnnnnnnnnnnnnnnnnnnnnnnnnnnnnnnnnnnnnnnnnnnnnnnnnnnnnnnnnnnnnnnnnnnnnnnnnnnnnnnnnnnnnnnnnnnnnnnnnnnnnnnnnnnnnnnnnnnnnnnnnnnnnnnnnnnnnnnnnnnnnnnnnnnnnnnnnnnnnnnnnnnnnnnnnnnnnnnnnnnnnnnnnnnnnnnnnnnnnnnnnnnnnnnnnnnnnnnnnnnnnntttcctttccttttttttttttttttgctttgttttgttttcttgttttgtgagacagggcttctctgtgtagccctggctatcctggaattccccctgtagaccaggctggccttgaactcagagattcacctgcttttgcctcctccgtgctgggattaaaggtgtgtgtcgccactgcccagcttttgtgtttttgctttttttttttttttttttctttttttaaatttgaggtggtgtaacccaagatagccttgaactcacaattcctattcctctgcctcagcctcgtgatggccaagataaagacaatatttcatagtagtgactggctgttggcagttacataagtggcacaaagaggtccccatggccttcctgaagccccagcagccacacctcagactagtgcagtctcgagctgacccagcccaccagacctgtttaatacacatcagctttgtagctcacattttctccgagtgagtcttgctgtcacagtacttttaaggtcagccattgtggggctcaatccccctgcaggtaccctgaacccctgaagagccttctgattggataggaggaagggcaaattgggcatgtgaccaggtggctagaaagactggagaagccctctttatccagaactcacttcttggctgtgatctccccctccttttcctgttcttcctccttctcttttctcctccacttctacttcttctcctcttcttcctcctccttcttctttttggcttttctagaaagagtctcactatgtagccctggctatcctggacagcctgaactcactctgtagaccaggccggactcagactcacagagatccacctgcctctgcctcttgagtgctgggattaaagaagtgcatcactcccactccgttgataggcagaagccagcagagttctgtgtgtttaagatcggtctagtctacacagtgagttcctgaacaactagaactacataagatagaccctgtcttaaaaacaaagcccaaaacatctcaaagagagaggtccagcagtgagctggtgaacggcctgctaggtgaaccggaggggtttccctctggtttgtgcaggtcctggcttaagtgtgtgctattaagttgactaccttaggatccgaacagatgaatgagttcagcattgactaactgagtgatgctctgtagtttctatctcctcagtggcgaacacagacatttcttccaatagtttgctgtttaaaaagggagactggagatgtgtgtcaggggaaggtggctcggtatgtgaagacatttgtccccaagcctgacgaattctagtgctgtccccgggactcacatggttgaaggaaaagaccaactcccctaagttgacctgtgtcccagaagttgacctctgaccttcgtgcaccatggcacatgtgcacacttacacaaaacacatacaaatcaatgtaatcccagcacttgggacccagatgaaggtagatctgtcagttcaaggccagcctggtctacatagtgaattctatgccagccagggctacagagtaagatcttgactcaaaacaacagaaaataagtaaataaggagagagctgagctgcctgcagccttcttttagctgaggaccatatctgaggttagcagccatgcaggagccgcccccacttagcctcttccacaccctgccctcctgcctccaacaccagtgggcccagctgctcttccccaactcccagaaactcaaagcacttctcagatttttaaaaaataacgcaaaggcactttctctctctctctctctctctctctggtatcaatgatgtgcctaaccattgccaaactccttagactcctccaaccctttgccttacggtggcttttgacatcacttcctgtttgaccatgtctgtgatcctgcacagcaggatatatttgtatatattgcactttggaacctagaaggatgccttacgtagtattgttttatttgttattcttctgcctaaccacctttttgtttttataactgctggggaggcccctggactcttgcactgtagctaggtccccggctggctgctgcgcacttgactttattgtaaacccctgggctctgagtaagtcgtttgaatatagccatcatgattgcatctttctattcttatcctaagagaaaagaatattcttatctgtcgccttccagttgtgccctcgtatctgcctctctaataaatattattatttttctcagtgctgtgtattttaagtgatttttctcttttttgagaacattattctctgtaataacactttcatctctagtactgaggacttttcaagccaaatacttttcccccttgcaaataattgtgcctctctttcttacccctcctgtcctgagggcttggagcatctgcttttcttgcatcttgtctccctctggcgatggagagctttcgcatttagtgaggccctgggcagccttagattcccctctcatcaaaggttcaccttactacagagacctgtggtcacaacgggagagagaatttgccctttaacttcctcacaccatcctgaaccaaaaaaaaaaaaaaagattcagtttgtgaagaagatgagcaagtgggaaaccttattaatcttttttggtccagaaatggggccagctaaacatgggaactaaaaggccagggctgttgtgccagaggatgggaggcagagacatgcggatcctgggttaagttcatcttcagccatatagagaatttgaggtcaccctagactacctgagagcctgtctccaaacagaagacgtagcctcgaaagctccccatggcagagccactgtggtaaccaattacttaagcccctcccttctccacaaggcaagcagtttgccagcggcaaaccgcctgcctctctctcacctgctgcttttcctaactcagggttttctcttctttctttttgtgccgcaggttcctaaaggcgtggtgcacatggccagagtcccccgagagcctcccgggagggagccatcatcgtccagcccgcttgtccccacaggcctccagcaccactcaggctggctgggcagcctccagcccacctgcaggctgggtccccatatcctgcctccccttctccttcacagcatgttcctgtggctccgccagtccctctgcctgtgtacggcacgggtgtttctctcctgcagccccccacgggggctgtccactttactctgctcccttcccacccaggccaccaagacagctgggcatgtgccctgtgtccctgctccttccgggctcccagtccacctgctcatcgcctggccactccttgcacatctcacactgtgcctttgtcaactgtcacccctggtttcctggtgactaacaaaattctgacaaggagggccagttgtgcatcaggtggactgagcacccagctgtcatccatgcgtctcttgggactcatcgtcagatgtgtccttcatgtccagaggctgctgcctcaggccttccctgtcatccagcactgttaccttccacactccattccaggggatctagagtaggactggggcacccagcccccattcacccccactcttgttataaaccatctacatggccctaattcatattggagtcccaaatccagcttgtgggccagccccgctgtcttgtctgtgtctaccttctatgagcgctgcctacctgtttgtggtaccctgtgatggagggcctcacagccacactagttactgtaaggcgggcctgcggagtcccataagtagcatttgaggactctcctctgttcccaccaaagaccttgtgcctcttgtagtccctccaatggctctggccactgcttcttcatcggatcctgttctccagaagccccagagaatggatggagctcgcttttgaagctgttgccctcctagagtggtggagcttgggggagtaccgaggtggtccttcgcacctttgagccactctctcctttcctggtacagaagtactcaaggctttggccacaagcccctgtgaagggtgccccacaagtatgagcttgaggaggttggcgtctccctctgggcagttggtagcttagcatcaagtcagaggatgaaagacagggaagtcttacaaaaccagagacagggacagagagggcaggtcctcagggttgggcctgtgctttgtccacggtttgtggaagtgctgacatccatgcattggggccagtattacagacattttgtgaggtaccacctcagagcagaggggagggtaccaaggtgggggagcagctgacaaggtgggcctggctttgggtttcaagagcaagcaaggattagcttcaggctttcttggccccgcctcctccccgtaaggccaagcccggcacactgccctctgccctctgggacccctgtgaggctgttcaggactcacatgaggaagacctaggggacagtatggaagtctggtacctaagagtcagggtctcagcgctgacacagttagtctgacctgtggcccaggcagtttcgctccagcaggttaccaggcatctaactccagaacctctgactttcagcaagttgggctgaccacagccccctccagagtgttttttatgggtctgttcacagatctcattaatgcatgaaggacaaggaaagacttgccacaaaggtaaaatggagaggctgccagtcttcttcagatgacctttaaagcctgcgcctgtccctgtgtcccctcacttcttttttaatttcctgtactaccttacatccagaaaggatggtggatgagcgtcttcaggccgttctctgagaaagtcggtctgccgtggacatcctgtggaactgtactggctctggggggaagggaatgcaggatttccccagaagctctacactccctgtccccaggacccactgcctgtcacccctagctgctagtgtgctgagacaagaatgactcactgtaaaagaacctgccctgcagatgacttagagatggaaataaaaggaacgtgacatttaccgctttttttttttctatgcaggacgtgaagctgcaatggcccctccctctaggctgagcatgcttatccagggccccagcccaaacaacacacagggaggccattaatgccttctggtggcatctgtagtgaacgtagaatgtccacatgaagttaaaaaaaaaaagttccgttcctgccagtatttttcccagaaattgccgttttgtgattccttttgattttgtgtctgtataacatccaaaatgtctctaatactggccccaacttctcttttaacctgacatcaagcaccttttaaatcatgcgtgtgcaagttcgtgtatgtgtgtgtgtgcctctgtatgtgtgtgtgtgtgtgtgtgcgtgtgtgtgtgtgtgtgtgtgtgtgtgtgcgcgtgctaattctaagccttgagggcagggcactgttgggaaggccctcagagctgtcaggtcttggtcttgcctgtgactctggaggtggaattaaaaccaaacaaagtgctttcagtagagagcactcttacccatgtaattaaatgttagtcctttcaatgttaaataaagtataacttctagtgtacctggttctctgttgtatgaagaaatgacgctgggcctggggagatggcttagtgggtaaaaagctgagcacagcaggcgcctgcctgaaccctcaacactagggggtggcagaagcaggtagagttctgtgagttcaaggacagccaggacacccaaggttacacagtgtgacctgcctcaaacaacttaagaaagtgacagagagcaatacccaatgatagtgatctggtctcctatatgtgtaagttgatgaaacacacccataaaaaattgcacacacacacatacacactcagggagggaaggattctagtcacagaagctcccaaggctgatggctggcctctggtcttctctatcactatgtaaactcaagaggagtcactgtacccagggaaaggctagggacctcctcatctataaatgtcacttccacgtcctatcacagtgacacattgtgtccaggaatggcaggcatgtgggggaagtagttctgatgggggtgactccttggcaagtgagcatttccttttttgcccctcctcctccagctggttggcctctgccctcagggatgccaatgtgtgtggggggagtttaagcaaggaggacatggtcacggtccacttatgcccctcttcccgatgactaggctagatctgtaaaccaggtcagcactctttgagtctaaaggaccacatgcaggcctggagtgttggcacacaccctcaatttcagcactcagaaggcagagacaggaggatctctgtgaattccaggccagcgtgactacatggtgagtttcaggccagctaggactacatagtcagaccctgtcttaaagcgggtgggtggcacatgcctgatacccactggcttgcctgttggagagcaaggtcccacagctggctttgaaagactgtaatactcaggaggtagacacaggagggccagggccagttcaaggctggtctgggctaataaattaccattcatcatagggacaatgtgctggagagtaccaggtgactgttgctagcaaaagattaattttggaaagccatttccagaatgttctttgaagacttggttgttccttcagaaaggactttagatctgaaccaggtatctctttggctctgacactcttaacaaagcaggtgacatggctccaaaccagggagtgggctgtaattgctatcctggtactggggttgcagagacgttcttaattcacaagatcagaacagtcacatgctcttgggctgggtttctccaaataccagctccaaatattctggaaataccaactggcccaggcaccctcagcgcccccttgccctggccacacccaggccccaggcgccttggtgagagaatgtcgacccctagtggaagaaagcagaactgaagtagcatccctaagtgactatggaggaagcctaaggggctgggaaatccctcatctcccctcttcccctccagtatcagctttgtgagaccccaagtcacactcttaactgctgctgctgggcagtagaatggctcaggggatggaggcagcagagtctttgtggctcccaaatcagagaatcaaaagaaaggactctcaaattgctgctatcaaacatgagcactgtgttctgagaaagtaggtggtggctgggcagtgaatgtggcagctgtaacctgggttttcaggagttccaggccagcctgggctacatagcagaaccctgtttctgcaaaaaaattaaaaggtagactaagcttggagggatagatgtctcctgactctgcccatcactcaaaaagaatcctcatttccctagtccctgcagtccttccctctggtgtccaaatatgggaagacaaccaaccagcgcccagtagcccctcggtgtcatataaggtacccattagactccatctggaacatactcgtccctgtccagttggtttttagtgacatcaactagggacaaactgcctttgtccttagaaccaggcaggcaggaaggatatttccagtcctgcagtgtcctgctggacagtgccccagaaagggacagcaccagtctgtgcggcctcacacacacacacacacacacacacacacacacacacacacacacacacctctccatgtgaggacctcaaggttagctgctctattttcagggtccaggttggtactggtgcatctataccaattttctctgctccattctcctggtcccggagagagaggaagcctgatgctaaaattctactgatttctggctcagaattaggtagactcaggatggttgtctttgccttggatctaaagcagaacatggacagaaagtacgcgcttgcagtccatgcaactttgtggacagaaccgtagacaattagaaattgcatgggtccccaagggccagccacctgctctgcagtgatggatggtcacctgcttccacagagaggcaccgtccttcccagactcctcctcaaagaacctgccgtagggctggaaactggtcccacctcccaggccccaggaacttcttctgtgtctcagcttgggtaaatagctaccgactagttgagttgctagataggttcaccagagcatcttaagagctgagtatttatttcaagaaaactacaggtatatgttgaggcaaatcagggtcatttctagcttgctcattttcccacagttaccaagcccctgaaataactccagacagaatttcaccttgggaagccccccacaggtagtaacttgttacatgtaaacagaggtggggcacagggactcgtgtagtctagaccggcctcctcgtttcatcaggtggccaaggttgacccttctgcctcctcctgtagtttctaactcaagccggttccaccagtcctggattaagtggtggggactgaatccatgcatatcagatagatggattctctatcaacagaggcatattcccagttctaaaggtgactttttgtttagtggactttttgtttgttttgagatgaagtctatagcccaggctagcctccagcccactatgtagctgatcttgaactcctgaccctcctccctctgccttgccaacgctggtctagagatcatcattgcttctggctttgggaaggttttaaccttggtttctattctgtgctcctaagcccttcagtatggcgggacatcaatggccacagtcaactctcccacacagaactgattaaacgtgggacccataacaggcttgaccactgagttacaccccaagtccctaactgaatgcttttaaagtgatacaaactctaattcttcttcccccagaaagcaaatatagatgggactggagttgggaagccaatatgtgggatgtgctggccactaacacatccctgctgggccctctgtgtggttggtgggttggtggggtaaagatacagttggtatttcaagtgttccaccagctcttgccagaagcttccacagggtctctggctgtgttcatcaccactgaaggcagacgccacagtgtcacagtacaagctaggggcaggagaggaacaagtatttattgtgacattctgaacacaaaccagactgcgtcacagtagtgcaatgagctaagggctctacaacagagacttcaaaagatggcagccaacagggcacgtcccagcagcagccggccatggacccacttgccacccaccacagtgggacactgaacacccaggcctttggggatgagctgctggtacccacttctgaagagacaggtggccactggagccctcttggtcccaggatccccccctcaccactccagacttagctttgaacaccctgccctggaagttcggttaggtttctccaggatctcagacatacataggacaatctctctaggctcagcaggtccaggacacagaccacatctcagaattggctcaagacaccaaggctagggggtggctaggggaccaggctcactccagaccgcacagaggatgaaggagcgtcagacagtgggccagtgcatgaggtatctgttttccctcccccagggtcttaggagcctcttcacagagcaaatgacagttggtctgccagtggtctcagcaggacaaggtggcaggtcctctaccctctaaagcaaagcttgccctttctctgtcccactacaatagtcaacagaacaaacacgggcagcaggggtctccatcatgatataggggctgctggcctacacaaagagccctgcatccattctgcccctgtgtgtagacatctacttctctgagtccccaaggggttgggccaagtatacagcagataatacccaaaaggttgcagctgctcctagccccccatcccaggggtcagcattacctaaggggcagcatggggctcctgggacaaaagctgggcccaagttagcaagagggcaaatttggggacacagcgatgacagagtcctccgagcgaatatatttcccagcacagcatctctcagggcggaccagccgctctcagcctctgtaccaggcacacagcagctcagctgcagggcagacacaccctctggggaatgtcgaacaccagccttcagggacagtgggcactcagcaggacacagccttcagagggatgcagcgctgtctggagagggagtagggccagccacagcaactcagcatggcccaagtcacagagcccgggtctcagcctcaatcttctgctctccgtgcaagctttctgggtctgggagctgggccacactctgccggatggcaatctcagggccgcccccatacagactgctcagataggtccaggtctcctccgaaatctggccacagtcagcccctgcggaataggagaggcacccaggcacccttacacagaggccgtaccgtgtaccaggccagggggacacctgccaggtagggaacctaccttgggatggggatggtgccttaggccctcccacaagctactgcacagagaaaagccagaacgacaggactctgcctgttgactcttgtttcccagggccagaggacaaagggtcaactaggctagcagtgggtagaagaggcagggtgtggtgcagggcctggaggacccgcacagaggccaagtgcctgaaatccccctacatggcctggacttggataaaagactttgagacagatggtaaagcttcctggaaggacgggaactctcgtggtgacctggtggtctaaagggggaaagggtggcagggctagtgggtcctgggagactcaccctgctttagctggatatggccactgcctttgacctgggcaatcctgctgttgtcgatgggcccgggaggctctggaatagacagcttagtgttacaggcaggactatccttcatcaaggtgcccacggggccagcctagcctcaggtcacagccatggctaacaaaggatacttggtgtaccaaagccttcctcttgactctaacccaacctctcaggactctggaaccagaaaaggggacacctaataaacctgagttcattttagaccagtgttttggcaatggccaccagtagtagctgcggtgcagtgagtgcacttttctgatctaccacctcatctagccctcagtggcgatgggaatgagaactgtttatataggacagaggtttgagcagatggagagcattgcccagctcagagctgatggaaggcaaggccagcagccaggccacagtcagaagcccagcacttttccaaagcacaaccacactgactgcttcagccagcagggcacagtgtgctggggaacagtggtccaacactctccagtcctgtttgctcatcctctaagatggaggcaaatgcctatcacatgacacttctgggctctgccaacctgccaggcccccaagagcctggctatgacagtgtcccagttccaggactgctactctttactggtgactttaaggaatcctgatagctcacttataaccaggccatcttcatttctgcaaatccaagtcctccagccatcctaaaggtctggaactatccaccccaaggaggcaatcaaaccccaagatcacagccttgcaggagggaagggcagctgcccaggggtcatcaggagtagacaggggatgcagggtaggaacagggctctaccacagtggctaagagagcagtgaagctagcctggaagaagccatgctctctgcatccctggatagagcactaacgccttgctaggcaggccctatcccagaaggcctgggcggctactcaccactgtccttccccttgacgaaggcctcccactctcggaaccagtgcatgctgatacagtagatgaccgcgggagactcctcagcttggaatgccttgttcagctgtgtggtaaggcaggaggcagtcagtcaatctgtcccctgttcctcatgacttcccaaagtcccaccccaggccctgagcctcataaacactggataccccagacagaaaaatcaaggactccttgacacactcaagaaaaaagaaaattcataaggctgcagcgatggctcagtggctgagagcacttgctgctcttgcagaggacatgggttcaattcccagcacctatatggtagctcacaaccatccatacctccaattccgacactcccctctgacttctgagggcaccaggcaacacatggtacacgtacatagatgtacaggcaaaatattcaaatacatgaaatcaatcttacagaaagagggcaattcccccactgacccaccaggtcatggcagataaggcctttagcatctcctaagccgactagctcacagagcagactctcctctcactgactggacggaacatctgctcacaaggttcgccattccaacagctccagtgcttgagctgggcacgaggccagggcagcacaggtgctaagccacacctatgggctggcactagcgcctctccaaggacaaaaggagacctctactattttaaatgcttgtggacccatcctatatcctgttgtaaccagtatgaggatgggtacggccccacccacagcaatccctgtcccagcagcctctttcctgacaggccagtgcgccattccccaggtagcgagtgagctcttcacactttccatgagtctcaggcaccttccacaagagagcctagcgatcctcagctaggagtgctccccagggacagcagtactcctgtgtcactcagcttgaaacactgacccaaggcacaagcagagcactctgcacttcactacagccaatgcctctgctagcctgactgcacacggtccccaggtccccggtgcccacatgcaccttgatgaaagtgtcaatctccaccctcctgcgcttggccagggcctcaatctccacctggcagatggagcacacatacagatggttcacagcagggccgcccccaaacctgctcgggaagggagagagagagccagcatcagcagggaggtcccctctgtgccctcagccgtcagctctatcatactcttgagcacaggggctggcaaaggtccccagtgtctgcttctcttcagggtgtctagagctctgcttcatcctaagcagcactggggcctcgtggcccgagtgcagggcactgaggctgcaggtagatggtgaggtcgccagccttgaggccttacaggtcaagggactgtttctcaccacccactggagctggcaggagctccttccaagggcagatcccacaaacccagcaccacaggaacctgggtctggactgggctacagggagagctgcctactcttggtgtcactacacttgaccctggaagtccccaggctagattagtcgtctctaagtgactagtcccagccccacaccagggagcctgtgcttggtgaggctcctggaggagcttaccaccaacctcagccttgaaggcaatactcaaagggctttccacagcacagccctcaggctgactgattctcactgtctccttccctgggactcggagaaggcggggctgctgctgggctggccagcttccacccactggctcccagtacttgcctgctgtacaggtgctccctgcccccagcacttgcctgctgtacaggtgctcccggcccccagcacttgcctgctgtacaggtgctcccagacgctctgcggcaggatgaccaccaggtcatcgatgtagtggtatttgttgggtgggatacctgtgaagagaagcatggggggagctggggcttggcccaccgcaccccc

SEQ ID NO: 696 - DNA, 2807 bp, Mus musculus
atacaagccatgccagaagcacatcatggaagatggcctgatgaaaggggagatgcttttggcggtgggttggacatgtaaaaagatggatcagtttgacaacttggaaaaacatacacagtggggaatcgatattcttgagaaatacatcaagtttgtcaaggagaggacggagattgagctcagctatgccaagcaactcaggaatctttcaaagaaataccaacctaagaagaactcgaaggaagaggaggagtacaagtacacggcttgcaaagcctttctttccaccctgaatgagatgaatgactacgccgggcagcacgaggtcatctctgagaacatgacgtcacagatcacggtggacctgatgcgctacgttcaggagctgaagcaggagaggaaatcgaacttccatgatggacggaaggctcagcagcacatagaaacgtgttggaagcaactggagtcaagtaagaggaggtttgagcgggactgtaaggaagccgaccgggcacagcagtacttcgagaaaatggacgctgacatcaacgtgaccaaggcggatgtggaaaaggcacgacaacaagctcagatacgccagcaaatggcagaggacagcaaagcagattactccttaatcctgcagagattcaaccaggagcaatgggaatactaccatacccacatccccaacatcttccagaaaatacaagagatggaggagaggcggattgtgcgtattggggagtccatgaagacgtacgcagaggtggaccggcaggtgatacccatcatcgggaagtgcctggacgggatagtgaaggcggccgagtctatcgaccagaaaaacgactcccagctggtcgtagaagcctataagtcaggattcgagcctcctggagacattgaattcgaagattacacacagccaatgaaacgcacagtgtcagacaacagcctttccagctccaaagaaggcaagcctgagctcagatttggcggcaagtccagaggcaagctctggccattcatcaagaaaaacaagtctcccaagcagccaaaggaacccctctcccaccgcttcaacgagttcatgacctccaaacccaaaatccactgcttccggagcctaaagcgtgggggtgtcacaccagaagacttcagcaacttcccacctgagcagagaaggaaaaaactacaacagaaagttgacgatctcaatagagagatacagaaggagacggaccagagagatgccatcaccaaaatgaaagatgtgtacctaaagaaccctcagatgggagacccagccagcctggaccagaagctcaccgaagtcacccagaacatagagaaactgcggctggaggctcagaagtttgaggcctggctggctgaggtagaaggcagactcccagctcggagtgagcaggcacgccggcagagtggactgtatgatggccagacacaccagacggtcactaactgtgcccaggaccgggagagcccagatggtagttacacagaggagcaaagccaggagagcgagcacaaggtcctggccccggatttcgacgatgaatttgatgatgaggagccgcttccagccatagggacctgcaaggccctctacacatttgaaggtcagaacgaaggcaccatttccgtagttgaaggagagacgctgagcgtgattgaagaggacaaaggcgatgggtggactcgcatccgcagaaatgaagacgaggagggttacgtccccacttcctacgtcgaagtctatttagacaaaaacgccaaaggttcctaaaggcgtggtgcacatggccagagtcccccgagagcctcccgggagggagccatcatcgtccagcccgcttgtccccacaggcctccagcaccactcaggctggctgggcagcctccagcccacctgcaggctgggtccccatatcctgcctccccttctccttcacagcatgttcctgtggctccgccagtccctctgcctgtgtacggcacgggtgtttctctcctgcagccccccacgggggctgtccactttactctgctcccttcccacccaggccaccaagacagctgggcatgtgccctgtgtccctgctccttccgggctcccagtccacctgctcatcgcctggccactccttgcacatctcacactgtgcctttgtcaactgtcacccctggtttcctggtgactaacaaaattctgacaaggagggccagttgtgcatcaggtggactgagcacccagctgtcatccatgcgtctcttgggactcatcgtcagatgtgtccttcatgtccagaggctgctgcctcaggccttccctgtcatccagcactgttaccttccacactccattccaggggatctagagtaggactggggcacccagcccccattcacccccactcttgttataaaccatctacatggccctaattcatattggagtcccaaatccagcttgtgggccagccccgctgtcttgtctgtgtctaccttctatgagcgctgcctacctgtttgtggtaccctgtgatggagggcctcacagccacactagttactgtaaggcgggcctgcggagtcccataagtagcatttgaggactctcctctgttcccaccaaagaccttgtgcctcttgtagtccctccaatggctctggccactgcttcttcatcggatcctgttctccagaagccccagagaatggatggagctcgcttttgaagctgttgccctcctagagtggtggagcttgggggagtaccg

SEQ ID NO: 697 - protein, 599 aa, Mus musculus
YKPCQKHIMEDGLMKGEMLLAVGWTCKKMDQFDNLEKHTQWGIDIKYIKFVKERTEIELSYAKQLRNLSKKYQPKKNSKEEEEYKYTACKAFLSTLNEMNDYAGQHEVISENMTSQITVDLMRYVQELKQERKSNFHDGRKAQQHIETCWKQLESSKRRFERDCKEADRAQQYFEKMDADINVTKADVEKARQQAQIRQQMAEDSKADYSLILQRFNQEQWEYYHTHIPNIFQKIQEMEERRIVRIGESMKTYAEVDRQVIPIIGKCLDGIVKAAESIDQKNDSQLVVEAYKSGFEPPGDIEFEDYTQPMKRTVSDNSLSSSKEGKPELRFGGKSRGKLWPFIKKNKSPKQPKEPLSHRFNEFMTSKPKIHCFRSLKRGGVTPEDFSNFPPEQRRKKLQQKVDDLNREIQKETDQRDAITKMKDVYLKNPQMGDPASLDQKLTEVTQNIEKLRLEAQKFEAWLAEVEGRLPARSEQARRQSGDGQTHQTVTNCAQDRESPDGSYTEEQSQESEHKVLAPDFDDEFDDEEPLPAIGTCKALYTFEGQNEGTISVVEGETLSVIEEDKGDGWTRIRRNEDEEGYVPTSYVEVYLDKNAKGS

SEQ ID NO: 698 - DNA, 178024 bp, Homo sapiens
  misc_feature (1)...(178024): n = A,T,C or G
aaagggtcttgctctgttcctcaggctggaatgcaatgagtaatcacggctcactgcagtctcaacctcctaggctcaagtgatcctccagcctcagcctccccagaagctgcaggcgtttgccaccacacctggttaatttttaattttttgtagagacaggtttggggagggggtccttagcacgttgactaggctggtctcgaactcctgggctcaaacaatcctcctgcataggcctcccagtgttgggattacaggcatgagccacagcacctggacaatttcccagatatagtaaactgctgaaccaccttagggtgcgtttcagccttagaggtcttttctctgctagttacaaagcaagatccagagtatcattctaggtttatcaaaaatctctcttccctagacaatggctggatagaggaagaaaaagcaggccctttgattagagacacaccttaatgctggctttacattctcagtcacgtgttttaagcaagatttgaaattccttctctagagtctcgctccagagagcgccctaaaccgaaatgggaaactgaggctaaggttccaagtaccttcaaaccgccggtacagtacaagggcacagaagagcggagaccgcggacaaggaaagccagcataaaagctggaggggagaaagaagaaaggcgatcgggctgccctgagtgaggaattcagggaagccagcagggatttaagagcagcctcccgagtccgtgggggcaacgccacagttcagccccttcccctccctcagctcgagtcttcccgccccgtgccggtcagcccgaagaccccagcgccgcccagacccgccttccccacagaccccgccacctgtcagtgaaaggccgcagccaggggcaaagaggtggtccagtggctcagaggtccccaatgggccaaagttgccctaaaacccgggggagtggcctcggcctccgccccccggcccggccttgccaagctttaccttgagtgccaggtgatggacgcggcccaggccaggctcggccagcaactgcagcaaacccagcattgggagcagccggaggcccgcggccagcctaggaccgcgggaggcgggggagccgacgggcgccagagcggccatgtttgttccagcatcaccagccgcttcctctcccgcccacgtccggggtgaaagggcgcagccgccggaagggcccggggagcggggctcggcggctagctccgctgaccctgtggtcgttttcctggagattgcgacctaggaagtcgtcgaggagcctgtgctgcccacctcggggcccttcgatcggccgctcctgtgcagactttcagttagagatgaagccaacctattggcggttgccataacaacggtggccgaaccagaccagcccgggccgcacctccgcctcgctgagctttggaagcgaccttgggctccggggacccctgatctcagggtcgggggataagctgtgtcagccgcacggtgtcgggccactgattgaactgatttcactgagcgttgactcggaggaaaatatctaaaaattcccggctcgccgtaggggtcctgtggttttctaggcgcttcacactcaaatacaagcgaaatggttgcaataatacgattgattgagcccttatgaggcaatttgttaggccttttgttgtatttaatttttggaacaatttgatgagctaggaggtacgtattatcattattcctactttacaggtaagcaaactgaggctctgagaaataagtcatttgctccaggttgagctgggaatcacacggaagctcttaactcctgtgttctgttgcctcatgctatttcatccaaccccaagtctgggtcttaacatttttctcttaattctgtatggaaactttctttgcttctttcagaaattataggaacttcttttttttgagacggagtctagctcttgtcacccaggctggagtgcaatggcacgatctcagctcactgcaacctccgccttctgggttcaagcgattctcctgcctcagcctctggagtaactagaattacaggcctgcgccaccacgcccggctaatttttgtatttttagtagacacggggtttctcccatgttggccaggctggtctcgaactcctgacctcaagttatcctcccgcctcggcctcccaaagtgctgggattacaggcgtgagtcactgcgcccaacctgctttggagtactttttatcttttaaagttaagtggcatctttgaaaatctctggttttaaatttgaatataatactgtactaaaaacgaaatgaggcctggcagggtggtgattcgcgcctgaatcccagcactttggaacgccgaggcgggcggatcacttgaaagtcagttgttcgggaccagcctgggcaacatggcaaaacctcgtctctactaaaaatacaaaaattagcggggcatcacggccgcgcgcctgtagtcccagctactggggaggctgaggcaggagaagcacttgaacctgggaggcagaggtttcagtaagccaagatcatgccactgcactccagcctgggtgacagagtgagactctgtctcaataaaaaaaaaatcaggtaagaatcttaatcccattttataatacaatagtgatgaaacattaaaatagttttaaataggagacttttgtcttagtttctggacaacagttttataagggcttaaaactgggttcatagcattccttgcttctctatacttgggtattatcatgtgacctacatagggtcataccagtgctgtctgtccaggggtttaagaggatatcttcttctttcacatatttgaaagctgtattgtgccagtcattattttggaattgagaggaataagaatgagggaaaactgactacaaagacattgttgagcattttctctacagttacttcttaaattctagaaaactgctgccttgacaattacatttagccatgtgatttcatagtttcaagaaaagattatttgcataatcatgatgctgtaactggaaacaaacaggctgagtaacagaacaagttatgcctgcttctcctggcaacattttcaaagggacgttacactttaaggtattgactgaaaaagcctgcaggggctggaaagactgatctcctaagcttggcttttagccttactctcttagtcaagtacattttatttttctattttctctccttttttttttgagacagagacactgttgcccaggactgagtgcagtggtgtgacatctgttcactgtagtctccacctcccaggttcaagggattctcatgcctcagcctccctagctgggaccacaggtgtgcgccagtatgctcagctaatttttgtatttttgctagagatggggtttcaccatgttggccaggctggtcttgaactcctggcctcaagtgatctgctcacctcggcttaccaaattgctggattacaggcgtaagccaccctgcctggactattttctctaacttttcaggatcagcttaaggttgctactagaatgtgtagtgttgaatctagtgctattattattaaataattatttgatatcggtttggacattttcagaactcttttaagtaattaatgtgttaatagtctccagtttaagaaagtataattgccatttgtttttcttatcaaaagacttgataggcctggctggtgtctcatgcctgtaatcccagcactttgggaggccaaggctggtggataacttgagcccaggagtttgccaccagcctgggcaacatggtgaaacaccttctctacaaaaaatacaaaaattaggccaggggcggtggctcaggcctgtaatctcagcactttgggaggctgaggtcagtggatcacctgaggccaggagtctgagaccagcctagctaacatggcaaaaccccatctctactaaaaatacaaaaattagccaggcatggtggcgcatgcctgtaatcccagctactcaggaggctgagacaggagaatcgcttgaacttgggaagcggaggttacagtgagcccagattgtaccattgcactccagcctgtgtgacagagcgagattctgtctcaaaaaaaaaaaaaattagcgagcatgattgcaccaattcactccagcctgtgcgacagagcaagactctgtctcaaaaacaaaaacaaaaaaacaaaaaaaaaacacaaaaattagcgggcatggtgacacgcacctgtagtcccagctactcaggaggcagagaggtggtaggattgcttgagcccaggagtcaacactggagtaagccatgacacttttatccagcttgggtgacagagcaagaccctgtcaaataaaaaaaaaaaaagagttgattgatattgcaaaccaaaagcctctgttaagacagtataggaaactagtggtcaaattggggcctagcaatacattcagaagtcaaatgctacttttcattctttggcttgaaacaccatttcttccaggattgcagctaaagttttcatgcatttcttggggtgtcgggaatgcctccaagtgcatctttttgtagaaagtgatcatggaaaagccaggctctgacacactttgagtcctgtggattggagagaaacttcaaaattactcctcaacctgacgaccctagtgtataacttgctcagccacaggacaggcagtctttcttgattttatgtacatctttacaggggaattggattattcgttgtaaaaattcattgcagttttagcatttcactcaccatggagttcctggttttatcctactccactttttccagttgattgctttcttgagtccctagtaagtagttcgaatgcaaaagaagttggaaattttaagctaaaaacaagtaattttgaagaagaaaaaatcctgagaatttcattagaagtagttcttcaccagtagacaaccaatcaactgtaagttcaggcaggcggtcctgctgcatcagaaatgtttaaaggcctgtattcccagctactggggaagatggtttgaatccaggaattcaaggctgcagtgagctatgatcatgccactgcactccagtctgggcaacagagcaagacctctctaaaaacaaaaacaaaacacaaaacacacacaaaaaaagaaaatgctgaaaggattgctttattttctacaataagtaaaaatcctccagaaaacaggaggaaaggaaagggaactgatacttgtgtgtatattatgtgctaaacattttatacatattctttcttttaatttttatttttatttttatttttttttgagacagagtcttactttgtttcccgggctggagtgcggtggtgcaatcacggctcactgcagcttccaactcccaggctcaagcgatcctactgcctcaagcccccaagtagctaagcacaaccgtgccgggctaatttttgtatttttttgtggagacggtttcgccatgttgcccaggctggtctaaatctcctgggctcaagcagtcctccaaccttcacctcccaaagtgctgggattataggcataagccacctttctttcaacctttacaataacctttgaagtagcattatttctattttattttttgatttttgagacagggtctcgctctcaggagtgcagtggcatgatcaaggctcactgcagcctcaatttaccaggctcaagcaatcgtcccacctcagcctcccgggtagctgggattacagttgtgcaccactgtgcttggcaaatttttttattttttgtggacaccaggtttttccatgttgctcaaactggtcttgaatgcctggtctcaagcgatctgcctggcttggcctcccaaagtgttgggattacaggcatgagccactgtgcatggccatatttacattttaaagaagaggaaactggccgggagtggtggctcatgcctgtaatcccagcactttgggaggccgaggcgggcggatcacgaggtcaggagatgagaccatcctggctaacacggtgaaaccccgtctctactaaaaatacaaaatactagccaggcatggtggcgggcgcctgtagtcccagctactcgggaggctgaggcaggagaatggcttgaacccaggaggcggagcttgcagtgagcggagatggcgccactgcactccagcctgggcgacagagccagactcttatctcaaaaaaaaaagaggaaactgggccgggcgcggtggctcacgcctgtaatcccagcactttgggaggacgaggcgggtggatcacgaggtcaggagatcgagaccatcctggctaacatggtgaaaccccgtctctactaaatgtacaaaaaattagccgggcgtgatggcgggcgcctgtagtcccagctacttgggaggctgaggcaggagaatgatgtgaaccctggagacggagcttgcagtgagctgagatcgcgccactgcactgcgacagagcgagactccgtctcaaaaaaaaaaaaaaggaaactgaggcttagagaaggaaagtaattcagccaaagctctctatagctgtctggacagaactatacaaatctggctaacaccaaagactgtactcaaccccagttccttcatttcagactaatgacaacctatgagatccctgtcttttttttttttttttttttttttttttgagatggagtcttgctctgtcgccaggctggagtgaagtggcgcgatcgcggctcactacaacctctgcctcctgggttcaagcgattctcctgcctcagccttctgagtagctgggattacaggcacaccaccacacctaatttttttgtatttttagtagacatgggtttttgccatgttgcccaggctggtcttgaactcatgggctcaagcgatccgcctgcctcggcctcctaaagtgctgggattacaggcgtgagccactgcgtctggccaagatccctgtcttctcaatgagtaaactgaagctcagataatgtaagtaacttgcagaaggccacacaactaataagtagtggaacactgggatcccaatttaacaatttcaaaaccctatctgctttaaaatctcatatctatctacagctatataaatatctgtccacctaagatcccgaattagatgtttattagttgcaagcagggttagaattgccaaaaagccctaatacaattgtttgcctctaaccacacagccatctatacaggctctctgttctgtttgaccggataccttatttcgttgctaatactgtccatgtgatcagattattcagtggaacatgtttgagtcccccactgagagtaggaaaaaaaaaaacataaacttacagggttttttgtttttctttttgttttcgagatggagtctcgctctgttgcccaggctagagtgcagtggtgcgatcttggatcaccacaacctccacctcccaggttcacgcgattctcctgccatagcctcccgagtagctgggactacaggcgtgcgccaccatgcccagctaatttttgtatttttagtagagacagagtttcactatgtcggccaggctggtcttgaactcctgacctcatgatccatcctcctcggcctcccaaagtgctgggattacaggtgtgaaccactgcgcccagctgttttgttttttacttaataattcacataggggacttttgtgaccaaacgtgttgggatttcttcccaccaccaaccaagtaattaattttgtagtggacatcagctgagtgtcctttaatttagtgttcttttaatttttatttttttttagagactgggtcttgctgtcaccctggccatagtctaatggtgcaatcacggcccactgcagcctcgcacttcacctgcctcagccaccatatacctggagatagtgtcagatatcacaaattgagggcttggtcctcaagactgccccccaccccaagtaggtgtcaatcttaagttttaggttatgtgatctgtcttttttgacgaactgtttataaatcagaaatctcaagtcctcctttttgggtttaatttgttacagtgcctcacagaacctagggaaacatgtttattataaaggatatagatgaagagatatatggagtacgggggaaggagagtggaacttctgtgccctctctgggcatgccaccctctaggaactttttttttttttttttttttgagataaagtctcactctgttgccggagtacagtggctggagtgtagtggcgcgatcttagctcaccgcaccctccgcctcctgggttcaagcgattctcttgcctcagtctcccaagcagctgggattacaggcacccatgaccacactgggctaattttttttttggtgttttttttttttttttttttttttgtatttttagtagagacagggctttcactatgttggctaggctggtctcaaactcctgacctcggatgatctgcctgcctctgcctcccaaagtgctgggattacaggcgtgagccaccacgtccggccaactctctagggacttttatgtgtttagctatctggaagttctcagaactttgttttttggagttttaatagaggctttattttatgtagtcatgattgattaagctattgaccattactgaacaacttaactttcagcgcctctccccagtccccggaggttggagtgacagtgtgggtgcagataaaagtcccacacctctaatcttgtcttggtctttatggtgaccagtcccatcttgaggtactaatacttagggactgtcagccatcagtcatctcattagtatataaaaagacatcattttggggtttttaaggattttaggagctatacttcaggaaacaaggttgacgacaaaatatatattttgtaatatcacaccaagatcataattttgtaaatcagtgttccctagattttactgagaggtgaaaccagtatctgcaacccagattaaccccctagataatatcagcgtttacatagagtttagagtacccctggtgaaaactgattcctaagtaggtcaggtcacagtagtttgttaatggggatacttccttgtcttagaatcacttcctcctgctctgaagggaaactgaaatggatttagttcttcctaaaaaatgctgtgctatattttagccttttttctgctggcttatttcattttatctcatggcttcatgatcattggtgtctctctcctttattttttgaagattctgacactttcaagcattttccagttactgccaaagcttaatgaagttaaagatatttgcagtgttgtataattaactcacatccatagagttctgcggcagcttttaatgggttccttcctataactaacaatctcctgcttactcgtcttaaaaagtttcatcttcatgtggtctctttttttcttctgctgtcccttcctcttcctctttctcctctttaaagcagcaggttgttttacttcttgattagagtattttcacaagtggtcactgtttttgagaagtctccaataacttggtcaagattagatcattgtatttgactaaaaagtcaagccctggcaggaaggtgattactgaggcaatgtcttgttagataaacctgcattgcatgtaccgtttccaaattttagcagactaaactgtgcagcattgtttgaatttccccctccaactcactctggctattaatctgccttaggagataggtagctggccgttctcattgttatatatctagcagtctctggaggaaagagaattcagacctggtaactgagagcaaaatatttatacagacacaagaatgggggtgggcaggaagggagggttgtaactgaaaaaaggcagaccaaaacagttttgacaacttaaatttattgtaactgcccaacaaaggaagtagagttggaggtttatctgcaagaggtttttttttgttttgttttttgtttagtagctccacctcttaatttattattattattcattttattttattttttgagacagtctcgctctgtcacccaggctggagtgcagtggcacaatcttggctcactccaacttctgcctcccgggttcaagcgattctcttgcctcagcctcctgagtagctgggattacaggcgccctgtcaccacgcccagctaacttttgtgtttttagtagagacggggtttctccatgttggccaggctgctctcaaactcctgacctcagatgatccactcacttctgcctcccaaagtgttgggattacaggcgtgagccaccacgcccggctttaattcattattgttaatatttttgagacagggtcttgctctgttgctcaagctggagggcaatggcaccatcatggctcactgcaacttcaaccttctaggctcaagcgatcctcctgtctcagtctcccaagtagctgggaccacaggtgcatgccaccatgcccagctaacttttttttttttctttttgtagagacagggtcttgcgatgttgcccaggctggtctcaaattcctggcctccagccatcctcccacctgggcctcctgatgtgctgggattacaggcgtgagccaccagacccgggttagctccaccttttaatggaggagaatgataagcaggttgaaaatggtggggtgggattggagaaatgcatcatcgtaaaatattttttaactgggggcccatgttgggagtcgcacggtttctcagaaaaggatccagtagtagcattaaccgagggagaaagataagctgtggggaaagggctagtgattcaggagttggaattccaaacattttccatagcttgtcaggaacatttgtgcagacctttggatatatagagagggagtccgtctgctgataaaatgagcgctgggtttaccaaccttcggccttggcccacccctgatcctcaccgccgggcagtgagatggacacgttatttgcctccatttggtggactgcgctctgcgcttccagaggtggagcaattgtccgcctccgcccggccagcacgtgcgggaggctggatttgaaccaaacaagttatctgtgtaccccacgcctttgcttttacccactaggcggtaacgtgatttcacgcctgagagtttcttggctgaacaagttggaaatcactggtttcagagattggaaatcactgggtgcacgcccctggattctttccctagccactcgaggccgtcgcgcttgcctcgacgtctctattcgcacagcgcgcagttaccaccgccccactcccaccgcgccagcctgcgggactctcgggcttccctcgggcggtgggaaaagagcctcccgggctgactctgctcggcgcgcatggctgccaggggaaagtattgtccttaaatccagagcggcgatacgcgcaggggagcgatctcagaccgcggcggagcatcggtgatcccagggcctgccgcgttccaaggcaagcgctagtactgcgagcagacagtggtcactaagaagtcattaccagattggcagggggagtcctagggatccgggtcccgccgtccctcacacctccctccgcgtccttccggaccccagggcgacgcggacccggccgggggagcccgggggagggggccgggccggggtggggcgggcgcgcgtgcgcgagctgtcagaccggccccgcccctcccctcccgcccctcccccgctctccgggtgtagggcgggcgggcgctgcggcggccgcggctgctgcttcctcgggccattttgctgtggagcggcggggaggaggagccgccgaggagaccccgggcgaggagctgcgagccggaggaggccgcgcggactccgggctttccgccgtcgcggggatctcggggggcaaagggatcgccggggagggggaccagagagccgcgcccgccgcgcggagcgccccttcgcgtcccctgcaccatgagctggggcaccgagctctgggtgagtgaggggctgggcccgcgggcagatgcggggcgcgcgctgcgtttccccgcggcctggggagggggcgcgggccgcgctgctgggcggaggcgagggcgcgctggtcggggtcctcgcggcctggggaggaggcggggttccaatgcccctcgtccgccttggcccgagcaggaggtgcgggccggcttgtccttcggaggcgaggggagttggtgcgggtccccggcggcctgaggaacggcgcgggcgggcctccctgtccccggcgccccggagcgggccgtgtgtgtcgggccgagccctaatcccccggggcgagccgcggatgcccggggagggccgggaccgggcgtgggggcgtggaggccccggctgcgcggcgctgcgttgggtctcggggcgccccggccgcgagttctgtcctggctccgcggaggcgctggcggatcgggcacttccccgggagcggggcggccggggcgagcgccgggggtcgggttttggggtgctggggcgagagtgcggtcttcgctctggaggcgaggacttctggcccgtggcggctccgggcgcacttgttctttcggggtagctcaatcctgagtgggatgtgggcactgcgacgtctggtctggaggggaaagtgggagttagggagagatcttacgtgatctacctcaggaagaggcgttcgcggggtcaatgatctttaacggttgctcggagaagagtttccagtggggaaagttggcggtgaggggcgccttgcggggatgcttggccgggggatgcgcacggtaaacgggcagccctcagggctgagggccgtccccggaaaggcgaggggctggctgtggatggagctcttttcctgccgtccccggattcctggggaaatcactgggcaggggatgggcagtgcggcggcccgggaaggagcagacgaaatctcagttactgcactgaaatgccctcaagatgagccatttcccaggatgaactctaaagtgcctgaactaccttttggaattctatttgcaaagggtgtggaggagaaagtgtagggtggtgttgctatctgagatgaggccaagaaatctcatatcaaaataaaacaaggttagagcaattacagaaacagagcacatcctcccttgttttttgttttgttttcttttgctttaattgtttttacataaccatttgttaggtacagaagcagctacggttgttattaccaaaatcctgagggcaatagctcccttaaattaagataattcattttataaacatcttctgcctaaaagggattcatgacaaaatttccgctgatgtttacaagtatccattttgaaaataaaatagtttaaaatatttgcacacaccagtttaggcaaaatctatcactttgagtaccgtattgaagtttctttcctcttctaatccttccactccctttagctctctttagcttatctggggtggggaagcaaatcagaagtaatctttgtcaagacagtagaaattgtggcacaatttttttttcacttgttcagacaggtggatggaattatggagggaaaatgtacaatatatttctgagtgaaatagggaccgaacacaataccttggtggacagttcagtgatgttggtgaatgggatagaatataattccaaagagaggcagtggctatgagcaaaactgctaaaacagcggcaattgcttgcattattctgtacatttctttttgagggtgcagaagtgggaaggaaggcagggttaggagtgattgaaaataaatgagagaggccgggcgcagtggctcaggcctatattgccagcaccttgggaggctgagtcgggaggatcttttgggcccaggagttcaagaacagcttggggaatatctggagaggcctcctcttaaaaaaaaaaaaaagaaaagaaaaaagaaaaaagaaaaaaataataaatgggaactggaatatatacaaatattaatgatatgaaatcttatatttgcttcacaataatttgggttgttagtagatgggagatagtgagacagagttggccattattgaagccaaatgctgagtacagaagtattcattacactattctttctagtatatatatttgacattttctacaataaaaataattggaaaatagttttaaaggagaaggatgtgaactatttgtaattttttcacttgacaattttatgaggaagaatgaatcagttaacagttctatatatgcaagtgtatggcaatgaggagtttttaaaaagacattctttttttttttttttctgagacggagtcttgctctgttgcctgcccaggctggcgtgcagtggcgtgatctcggctcactgcagcctctgcctcccaggttcaaacgattctcctgcctcagcctcccaagtagctgggactacacgcgcctgccaccatgcccagctaatttttttgtgtatttagtagagacggggtttcgccgtgttggccaggctggtctcaaactcctgatgtcaggtaatccgcctgcctcagcctcccaaagtgctgggatcgcaggcgtgagccaccacgcttgacgttaaaaaagacattcttatgagtaccagcatttgcctttgagtagcttacagtttaatataggaaaaggaatgaacacatgattgtgctactaagagaaatgcaaaatctaagttttcaggtgaaatgcaaagatgtataaggcttagtagcttttgagatttaaaaaaactagaataatgaaggattatgaaaagtaaaccccagtttctccggtggtcagagacttggtgatgtgcggtacattgggtagcccagcggagggcagtgattaagggttttccttgaatggtggctttggaatcatgcacatgtataatgagataatgatggggcgctcaagccaaacttggcagaattattcttctagatggagaaagagctatggtttgggtggccatgaattatttgtaacaggtggttgcagctttcagggaccttcacaaatactatcagattttacatacattttaggacttcaggttaaaatcaatataggcttttagaaactacaggtttctaatgtgcattttacactgaagacctgctcctaagccacatcctgctttgtagagggagtaaaacctttctcttcctctttcttttttactttttctttaacccctccatagaaataaactttcttttttttttttttttgagacaaagcttcgctcttgttgcccaggctggagtgcactgtcacgatcttggctcactgcaactttcacttcccaggttctagtgattctcttgccttagcctcctgagtagctgggactacaggtgtgcattatcacacctggctaattttttctatttttagtagagatggggtttcaccatgttggccaggctggtctcgaactcctgacctcaagtgatctgcccgcctcggcctcccaaagtgctgggattacaggcgcgagctacctcgcccaggcttacatggccattttgaagtgattgggttctaataaaatagtttacaactcttcataacatagctcttcataacattgccttttaatcaattttcaaaatttttattgaacaactatggtgtgcacaagacaccagtctgaatctgttgtaagttacattatatacattgaaagatatctacgtggaagcatagaaagtaggttttacctctagcttgtaacatcagagtcaaaagaaaaatgtttgtatgtaaaattaaccaaaatacatttactcaagacttgttaaaaaggcagtgttagtaaggtaaatatgttcactgacttgttgaagttgtggctggttgttggagaaatggcaaagcaagagttgcttacatttgaatgttttttttttcttgcctacttactgagggaagtgacaggttactgaagtgttagttcagctttttattagcttgcttattagtgtgaagtatgaataaatccattggaaaattaagccttcctcgtaattattctctttgcagctaacaaattattcagtgacagaacctggttttgctgcctcctagtatcctctctgtctttatttatttgctctggtgctaatgagaaatgaagtatgtacaagaaagagaacagagaaacctgaataatgcatattggttagcatagtaagaagccacatgtgggctgggcgcggtgggtggctgacgcctgtaatcccagaactttgggaggccaaggcgggcagatcacgacatcaggagtttgagaccagccggaccaagatggtgaaaccccatctctactaaaaatacaaaaattagccgggcgtggtggtccacgcaggtaatcccagctactcgggaggctgaggcggagaatcgcttgaacccgggaggcggaggttgcagtgagccgagatggcgccattgcactccgccctgggcgacagagcgactctgtctcacaaaaaaaaaaaaaaaagagccacctgtgttgattgtatgtcttttttttttttttttgagacggagtctcactctgtcgcccaggctggagtgcagtgggtcgcacgatctctgctcactgcaagctccgcctcccgggttgacgccattctccagcctcagcctccggagtagctgggactacaggcgcccgccaccacgcccggctaatttttttgtatttttagtagagacagggtttcactgtgttagccaggatggtctcgatctcctgacctcgtcatctgcccacgtcggcctcccaaagtgctgggattacaggcgtgagccaccgcgcccggccgactgtatgtaattttttttacctgtgatttttagaaccatgccaggcatataatatacattcaactgttgaatatgttgaccctgatcgtggtgtgcactttcaagaggcagccgtttgaggattgtctaccaactgtactgggaacaatgcctgactctgtgtaggagttcaataaatatttattggataaatgaataaatccctttttttccttttgttttaacatttgctttttaaaaataatgggaagataattataacacctttctgcacttcggcagttgtaaaatatatatatgattttaggtatctttttggaaaatagactattttttagagcagtttcggttcatagcaaaattgagaaggtacagagattttccatatcctttctgcccccaaatacacacagtctaagtaccttttttgcctttaaagtagggtttgaaaaattatcccttctctgttgttcattctacttaggcatgatatgtgtacatatgtttatataagaacactttatagtgtgttgaatttttttccctagtgtgtcgaaattttaaactagttttttaatcttaaagtaacaaattattaacagttccaggtattggataattattacctcttcttactgcccttgaatgctaaattggagaaccctattaacaatcgtccctagctcttctactgctcttttttcttttttctttttcgagatggagttttgctcagtcacccaggctggcgtgcagtggcgcgatctcagctcactgcaacttctgcctcccaggttcaagtgattctcatgcctcagcctcctgagtagctgcaggcccccaccaccatgccctgccaatttttgtatttttcatactagagatggggtttcaccacgttgaccaggctggtctcaaactcctgacctcaagtgatctgcccgcctctgccttccaaagtgctgggattacaggtgtgagccaccatgcctggcctctactgctcctttttctttttttttttttgagatggagtctcgctgggttgcccaggctggagtgcagtggcgtgatttcggctcactgcaagctcggcctcccaggttcacaccattctcccgcctcagcctcccgagtagctgggactacaggcgcctgccaccgcgcccggctaattttttgtatttttagtagagatggggtttcaccttgttagccaggatggtctcgatctcctgaccttgtgatccgcctgcctcggcctcccaaagtgttgggattacaggcgtgagccactgcgcccggcctactgctcctttttcttaacccttcagagatttctgtttgggatgaacatggcaagaccaacaggggagataatactccctgaaccatggtgggtagggcagaactgcttcagaagagaaacaaaatcaacttagttttgccatccttacttctccatgagaacaaattttgcacatgtcttttctgtttagtggatattaaaagaaaacaaaccgtgggaggcctggagattttgcagttgatatttagatatcagttttgttgccctcactttgtacattagacagaatcctgaaaatttgtgtaaattgccattttggtaggcaaaactgtactttaagcacataaaagagttttataagtgtctatacttactatgtgaacacattacaactcatgctttacattggtgagacatggaaagtgcttctttgaaggactattcaagtatcacccactaagcagctaaagctaatattatgtttcctgcaagtattactcatacttgtttcatcaacaccacccacatttaaaaataaggctttattttgacacttaaaaattgaaagctactaagaatacatgaatgccctgggaaattaatctaattagattttagaatgtgggtgtgaagtcttctggaattagtgtttataaaggaatatttgtttcctgttttacttgtacactcatactagcttgagcctagtaatgtgtttagttaaaaaaacttttttttttaatgatgaggccaaatatgtgtattatattagagagtaatttgggggtatgtaagtttttgtttgtttgttttttgagatggagtttcgctcttgtcgcccaggctggagtgcaatggcacgatctcagctcactgcaacctccacctcccgggttcaagcgattctcctgcctcagcctcccgagtagctgggattacaggcgtgtgccaccacgcctggctaattttgtgtttttagtagaaatgggatttcaccatgttggccaggctggtctcaaactcctgacctcaggtgatccacccgccttggcctcccaaagtgctgggattacaggcatgagccaccgtgcctgacctctctattatcttaaagtctcgaatgattgttatcattactgccatttattgagtgcctactatgccccaggtgctggacaaagtgtttacatccatcatcttgtttatttgttacaagaatccagcaaggtaactaccatttgtgccaatatcctggaagaagaggcttagatggagtcattagtacagttttactggggagtaacacctgtgaaggggaaagagtggaagccatcagatcacgatgcagacctgacagagtccccaccaggccaatggggagctccagagcagacacaagaatcctctggcagaaatggctcggcctctgtatctctgccttcctttatcattggccagaggtcgtcccaagaagaggatggccttggctgccagcttgcttagtcattggctgggggtgctacaagaagagatgccctcgactcaaaagatgaggtggaccctaaaggaggctgcatgctagccacagtccttgcagctgggcagcgagtcattttttgccacttctccatgttgcccaggctggggtgcagtggcacgatctcgactcactgcaacctctgcctcttaggttcaagtgattctcctgcctcagcctcccaagtagctgggattacaggcacatgtcaccacactctgctaatttttgtattttttttgtagagacggggtctttctatgctgcccaggctggccttgaactcctgggctcaagtgatccttccaccttggcctcccaaagagctgggattacaggcattagccacttggccaaaaactggatcttctgtgttagtagtgcacagttccctttatccccaccactcactcatatttccccatcactgcagtagattttgctttataaaacagttgatgttattcatattgagaatcactgagaatcaatgactcacaccactaaatgctgcagagccagcagaaacagtcatgaatgaagctcgtactcaagcagatgcttcatagatgtctagtaatctcctaatcctttcaaagccagttattgtttctcttttctaatttaaataaatttgtgtggatattaattagtaggagtagtatcaagtttctgaatttgcccaacagaagtatgtcttggcgaaaactatttttaaggaaattgagaaagaacaaggaggaatacagagtctcactctgttgaccaggctggagtgcagtggcacaaacatggctcgctgcagcctcaatctcctgggcccaaatgagcctttcgcctcagcctcctgattagctgggaccacaggtgtacactaccacgcctgaccaacttgttttttttttttttttgagatggagtcttgctctgtcgcccaggctggagtgcagtggtatgatctcagctcactgcaatctccgcctcccgagttcaagcgatcctcctgcttcaacctcccgagtagctgggagtacaggcgtttgcccggctaattttttgtatttttagtagagacggggtttcacagtgttagccaggatggtctcgatctcctgacctcgtgatctacctgccttggcctcccaaagtgctgggattacaggtgtgagccaccgcagctggcctgtctaacttttttttttttttttgagacagagtcttgttctgtcacccaggctggagtgcggtggcgcaatctctgctcactgcaagctctgcctcccaggttcatgccattctcctgcctcagcctcccgagtagctgggactacaggcacccgccaccatgactggctaatttttttttttttttttttttgtatttttagtagaggcggggttaccatgttagtcactgtgttagccaggctggtctcactctcctgacctcgtgatccgcccgcctcggcctcccaaaattctgtgattacaggcgtgagccaccgtgcccagccctgcctggctaacttttttaaaaaagttttttttgtagaggtgggggggtcttcctgtgttgcccaggctggacttgaacttttgacctcaagtgatcaccggcctcggcctcccaaagtgctgggattacaggcgtgagccaccatgcctggccgacattcagggttttaaagttttgagtcttcaggaacaagaaacgaaacactttctctattatctatagcagaagaaaacttgggacctgtaaaggaatctcctccccttgtacttctatttgcacagccaaaattgagaacgggttcctgaaatccatttaaagaccagacaggctctggggacaaacggtgtgggtgctcccagttgagtgaggcagtgctggagggctcagcctgggttgccttgcttacctaatctaatatttattagtatcgggcaagtccttgcatctctgttcctcgctttcccaatctataaagtatggtatgatgcttgcctttctcttgacaagaaggcataaaggtgagagattgttcgtaaagtactttgaggttgttggatgaaaggtgataggtaaacacaaattattataatcatggggaaggttaatgaaaaaaactctggtccctgggaacaaactgtagaactctcctgcggtaagcaggattcatgaaaaatgagctattttctgtcctagccttctgatttaaaatttggtgtacatgttaacaatacaataaacctaatatttggaaaatgcctggaaatcgttgctttggacaggaaatctggatttcaggaggtcatattaatagcatgtttatcttttcctccttgaagaaaaataaaatccactccaaaacactaatcatactaatttttagcagtatacttgggccttcttaagatttaagttttttctagggggaaataattttctttggctattattaccactttaaaaaaaaaaaagttccactgaagtcacattatttcctcacctaaaaagctggatatttgctgcttgaaacatctaatgaattattctgcctatcagcttagtttgggattgatttcttcttggcagagataatgaagaggtttagaagtatttgcattggaacagatatggaaatttctggaaatgtttgggcaaggacatttagatttcataagtgtatatgtgtatgtaaaatatattcttcaccatgactgacttttaaaatttacattttacttattggccaggcacggtggctcatacctgtaatcccagcatttggggaggccaaggcgagaggatagcttgaactcaggcgttcaagaccagcctgggtaacatactgagatcccatctctactaaaaattaaaaaattacctgggcatagtggtgcatgcctgtagtcccagctacttgggaagctgagatgggaggatcacttcagaccaggagttggaggctggctgcagtgagctgtatttgtgccattgcactccagcctgggtgacagagcaagaccttgtctgggaaaaaaaaaaaaaaagtttattttaacttatccttaaaaataggctatttacattgttcagtttcaaaagtaaggtgtacgtgtgaagtctccctgtcattctaggagaggtttagttcttgttacggccatttttggcaagaggagtagtggtggtagtgctcagtgtttataactttgtacataaaaggaaaccaaacaaaattgtaaaaatttcatcaggtcaggcgcagtggctcactcctgtaataccagcactttggaaggccgagtcgggcagatcatgaggtcaggagtttgagaccagcctgaccaacatggtgaaatcccatctctattaaaaatacaaaaaacttagccaggcatgatggcgctcgcctgtaatcccagctactcgggaggctgaggcaggagaatcgcttgaatctaggaggtggatgttgcagtgaactgagattgtgccactgcactccagcctgggcaacagagcgagactccctgtcaaaaaaaagaaagaaagaaagaaagaaattattgtgtaataaggactaaggtagggtaactccatggaaatgtgtacaggagtgtaactcaggtggggaaatggcatccaagtggagtcctgaaggactagtaagttttacaggtgaagtggggtgttcagaagggtggaggggatctggacagagccttccgggaaaagaaggaggaaatggtatgtccaaagggtcatggagggcacagagctctcaaatgatgagcaggtgatggagttgtaataggagcctgaagaggcagactatagctaaaaaccatgtgaggactatgacctcaccttgagagcatgggaaatacccttgaactgctgaaagcaggtacctatggtgccagttttcagtgtggagaaggatggagaggagctcggtagcttcaggccacgctgggccgattggctgactggattactggagtgggtttcagtagagagcctttctatctattgcatttctcaacctgtttatatgtgggtggaataaggctaaaatggattgctggggagccttggacattcaagggaaggcctagtagtgaacaaagaaggcctaggagccaccctctgcctcctcccacttcaagatgttcaagggggaggcatgttccctgctctggcttgtggggtaaatcaaatataggccacaggtccttttttccaccagctgggtgcaaaacctaaacctaccagcactttattcttgtcctctctgtctctgctcagatgatacaaccttgttagggttatcagggtttgttccccagctcttttaagctagcaaatttcttattttcaatatgcctggaggtgactcacactaacctaattcccaagcctgttgaataaaccagaatgaattttaaacttatagtgagaagtatattcataagcagactgaatattcatgttggctgatccgtacgttctcgccctgtaggctaatctgggtggaaagctaaattctttatagcatttcttggagagcataaaatgaaaataggattggatgagtgtaatggctgatgacaatgggagccctaggcttctgcctcctctggaggacagtctacgttacagttagaatagagtctgttttatagatgctgtgtaggtgattcctttcctgttaacccattctttctttaggcagactatagcacagttagttatgtttagattttttttttttttttggagacggagtcttgctctgtcacccaggctggagtgcaatggtgcaatctcggctcactgcaacctccggctcccagtttcaagagattctcctgcctcagcctcctgagtagctgggattacaggtgtgccccaccacgcccagctaatttttgtatttttagtagaggtggggtttcaccatgttagccaggctggtcttgaacccctgacctcaagtgatccacccaccttggcctcccaaagtgctgggattacaggcatgagccagtgtgcctggccctgtttaggtctttttaattccaatctctattcaatctttcatgcctgcgattatattcaggtacccagattgaatgctggatatttattatctcatcactttctagcattccccaaattggcaagtctgagaaatctgtagtttttttatgtgtaagaatctgtaatttttgtttgtttgtactccatcacccaggctggagtacagtggctcaatcaaggctcactgcaaccttgacctcccgggctcaagcaatcctcctacctcaacttcccaagtagctgggactacaggccggcaacaccacaccaggctgatttttgcattttttgtagagatggtgtctcgctatgtcacccaggctggtcttgaactcctgagtccaagcgatccccctgccttggcctccgaaagtgctgggattacaggtgtgagccgctgcacttggccgtttataagaatctgtcattttaaaagctcttctaggtagttttgatgtggcttaggtagcactgtttaacattttgattccttctcatgcattctcagtttttgctcatttttattctttatagcaaatctaaaatctagcaatattctacttccttacccagtcagctactgacaaacattatcatcattttaaggtactctttgttctctatggttttctagtaatgacttattcaggtacccagataagtcatcattcattaattcatttgaaaaagattatagggctgagcatgctggctcatgcctctaattttagcactttgggaggccaagatgggcggatcggttgagcccaggagtttgacaccagcctgagcaacatggtgaaactccatctctacaaaaaattagccagaggtggctgagttgggaggatcgcttgagctcaggaagttgaggctacagtgagtagtgactgcaccactgcactccaggctgggcgacagagcaagaccctgtttcagaaaaaaaaaagaaaagagaaagaacaatattttaaactacttatgtgccaagcattgttctaggcaaagggaaaatggcagttaaccaaatagtaaaaaatgttttgcttatatgtaatctgtatttacagtgtgtcagataatgataaatgctatggacaaaaacaagggaatgagacggagaacagtaggattgagcttgatggggagaagaagtgtagtgctggacattttacaagatgcctgttatataactaattatctaatattgcgtcgatagcctagtatatgcatctggagcccagggaagagatccagcctggagatataaatttggataaccagaaagctagaattaagttggtaaaatgctaagctcttggcagagttgcattcctccaagcactttatttaactttggaactctgttacctagcatagctgtcataacgtgttgcccttttggacagtaactctgcactctgtttgccaaagtgtttacctcactgagaaccattgtgtgaaccgtgttttagactgggaggggtatagactgttaagagtttattggtttgcaaattgttataacaacataataagtggagctggaggttctgataggcttagaagtagaactaatgtaccaagtcataagtggaaaaaaaaaaatgtccactgatgggcattcaatttttggtagtaatcagaagttaatatcacacatcattctaataggcttttgaagacagactaatagtgtaggcttttcctttgaaagctgcccatgtgcttattttgacatggagataaaaagagaaagtttagaattactcagttcacaccttgttgactgagatttctgttgtacctgatatcgtttaactttcctctttatctttcttagagatacttcacatgtgggacagattatattttggaaagatgtccacaacaatattgcccatcccacattgctcatcttacaatgtgatctcaagactcctcccactgagtgggtgagaagggacttataccactttcatttgaatctaggcagatctgtgtgacagccttgaccaatagagtatggttaaagtgatgcccccaggcatggtggcccatacctggaatcctggtttttccgggaggcccaggtgggggtagaggtgagggggatgattgtttgaacacacgagtttgagactaccctgagcaacacaatgagaccctatttttttttttaatgatttctgaagcagaatcacaaatagccgtgcgtttttttcttgcgcttttaggatacttacttttaaaacccagtcaccatattgttaggaagcccaaacagcacacatagagagacatacggagaagccaaccatagaggttcctgttgacagctcagtcgaggtctcaaccaacagtcatacttagctgccagccatatgagtgaagggcttccagatgattctaacgcccagcagttgggtccccccagcctgtaagccttcccagctgaggcctcagcaatgatggagcagagaaaagttgtccctgtccaaattcctgacccatgataaaatggttgtttcccatcaagttttgggagtgatttattatacaacaatagtaactggaacaatatccttagaagttgtaatagatagtattaacactaccccttcttcatttattcaaggacaaagctaccatgtatccttttattctagtttaaagataaaatgaaatcattgtctctttgaaaaaatgcttagaatatgaaatttaaaagttgaggaacattcaaagagttttatacttttttatctgaaaatgagaaaatagcaaaccaaaaagctctgatgtgaagacattaagacttcatgatggcttaatgtcttcataatgcaaactccataaacagttttttctaaggttcttgtcacatgatcatacactttgaatatggtgattctgtcatttttcataaaatctcagggtttttacattattgtcataaccacataaccactgagtcacaaaaggggacatttcattgcaatttcctttagtaagatatggttttgccatttcccccccaaatttcatttcctcttccttgaaatatgagccatgccaatctacttcagaagtgttgttttgaggaatataaaacaaaagacaaaacttttttttttttttttttgagacagggtctggctctgttgcccaggctggagtgcagtggtgcagtcttggctcactctaacctccacctcctgggctcaagctatctttccacctcagcctcacaagtagctgggactaacaggtgtgagcaccatgcccatctaatttttgtgttttgttttttgttttttggtagagacagggttttgccatgttacccaggttggtctcaaactcctgggctcaagtgatccacccgccttggcctcccaaagtgctaagattagaagcgtgagccactgcacctgacccacaactttctatagctttagttgtgaaatagaattactgttctggaggcagtaaatcagccagactaaagttaggcatctcagatctagttctgtctctgctgcttattcattgtgttcactcctcaaatcttgaaagaatatttattttaagatcttttttttgtttgtttttttgagatagagtctcgctgtgttgcccacgctggagtgcagtagtatgatctctgctcactgcaacctccgcctcccaggttcaagcgattctcctgcctcagcctcccaggtagctgggactataggcgcatgccaccctgcctggctaattttggtatttttagtagaaacggggttttgccacattggccaggctggtctcgtactcctgacctcagatgatcacccacctcagcctcccaaagttctgggattacaggtatgagccaccgtgcctggccaattttctcattcttaaaagatttctacaatttagtcagtgtgtcatattgttcaagagtgtggatctggagctagactgcttggttcatatcctgacattaactaactgattgattttggacaagtcatttagcctcagttccttcatctgtaaaatggagataatgatagtgcctactccataagattatatgcgaaataaactctactagtgttggctatcattatccacctccacatgttgctggttgtcatgatatttcattgatatcttttttttctttttttgagatagagtctgtctctgtcacccaggctggagtgcagtggcacggtcttggctcactgcaacctccacctcctgggttcaagcagttcttctgcctcagcctcccaagtagctgggattacaggcatgtgccaccacgcccggctaatttttgtatttttagtagagacagggtttcaccgtgttggccaggctggtctggaactcctgacctcaggtgatccacccgcctaggcctcccaaagtgctgggattataggcgtgagccactgcgcccggccttccattgatatcttgaattccatgtcgagactgaatgatcacttttttattaggggtattgtggacgtgatcaatgaatttggtataaactagactgtgtgacctcgagtcccttcaactcaagtgtttcaaggtaatctgagttccaggatcaactgacactgaaatagtgatcctaggagtactgattcataatgagcagataacatggcaatgccaattacaatagacgatttctaaagttagaaactttacttagaaattttatgttgagtcccacactgtagctcaaataaatgctaatgttaacaggaggtttgtaaagggttcaacaattcaaaaagtgacacacacctagaatcatcaggcacattccttaagttgtgaggcattcggtacatagattgaatgtcttgggtgtgactccataggcaaaaatgtcagggactatttttttttttgagatagagtctcgttctgtcacccaggctggagtgcagtggcgcgatctccactcactgcaacctccaccttctgggttcaagcaattctcctgcctcagtctcctgagtagctgggattacaggtgtgcaccaccacgcccggctaatttttgtatttttagtagagacagggtttcactatgttggccaggctggtctcaaactcctgacctcaggtgattcacccacctcggcctcccaaagtgctgggattacaagcgtgagccgcctggcatcagggagtagtttgctgaacagaaaccttttggctaaggtttattgtttattttgtcagtttggcagatcagcaagtgagtaaggtagataaacaatgtcattgcagaaaaattttaggcagtcaagtgctttatttgccaaaaagattcaaccacctgatggaaatgaaaaacaggatgatacgatggcttcttccttcactttctcactttccttggattatgaaatgccagtaattgagaaagcggaatgaacagtcattagagatggaagaaaaccctagagagaagttggaagtagttgggtgggataaagactttctgataacttcaagcagatctagaaattggcattggattgttagagaaaaattgaaaatgtaaaatgttagttgcatgagtgggcaacagatactctccattagcagtgttcaattacgtgtcaccaatgtgcaatagtctgagacaggcagggtcttgctctgtcacccaggcactgtcagagctcactgcagcctcaacctcctggcctcaagccatcctcccacttcagcctccccagtagctaagactcaggtgcacactaccacgcccagctaattttttaattttgtaaatttcttatttattattatttcctgtttttttggggggggtagagataggatctcactatgttgcccaggctagccttgaactcctggcctcaagtgatcctcctgcctcagcctcccaaagtgttgggattacttacaggcatgagccactgagcctggccaagttctgtttatttagataatatttgcttgtagtatggaccccacccagctcacaagcttggggtgagggacctgggggttaaatgacggcaaatgtaagccaacctaaaggttatatgtatgttgattcttcagatgtggccgagatcaggcaaggcagctcacagggagagtaaagggtactattttatacactaggtacttggtaaccagtctgaattgtgggccagtcctagggacatggggcaaaagtaaagaaaggaaaggaaaaaagactagagggaaatgtaggatacactcacgtggatggaagattgagtccagggaaactgagtaagatgccaaatgctcacgataaaaggatgacgtttccatgggatcctgtaggcatcaccgagagggtactgttgggagaacacttaggaacccagatcacctaacatggagtgagtggggctcagatctgagcagaaacccaacaaggacttcccaactccaagtaaagctaaatttagacaatccttttatgttgctggtccctcttgcaacacagtctcctccggccaggctgccttctccttctttatatgcaccagccttcttccacctcagggctttgaactcctttatcccagctctgccttgcccttggccggggaagtctctagccctaggtgcttcaccttcagctaaccctattgtgtgcaatcccgacctcctggctctctctaaagtcagttacacacgccagtgagctctgagggttcagccaagattgaatacactctgttaaagaaggggaattgggggaaaagccagattttaaaagcatgatttatttcttacttgtttatgtatttttgaataggccacacctggtgtgtgactgccccagtcattaggggatttttttttttcttccctggaggcaaccaccataactggtttcttgtgaattcttccagagagctatcaagcatttatgagtaaactcccccctcccttacaaatgttagcatactagtcacactttttggtaccttttaccacttataatatcttggtgggggtttcttttccttagccgcctcattcttcttaatgtaactattaatccttcttctgttttttgtttttgttttttgacagggtcttgctttgttgcccaggctagtctcaaactcctggcctcaagcagtcctcctgcctcagcctcctgaagtgctgggattacactgggcaacatggccaacccctgtctctatcaaaacaaaaacaaaaattagttgggcgtgctaacgcacacctgtagtcctaggtacttgggagggtgaggtgggatgatcacccgagcctgaggagatcaaggcggcagtgagcggtgattgagccactgcacaccagcgtactgcacaccaggccacagagtgaaaccctgtctcaaaaaaaaaaagagcgagtgttggtatttgtgtgaaatttttattgaggatattaagacaaagtgttgatgttctatactttgaacccaaagctttgtaactcattttctacttgtaactatgtaaaatatgcctgcttagtataccaaacagtattcttaactgtattcttaaggtcgggcacggtggcttacccctgtaatcccagcacttcggaaggccgaggtgggtggatcacctgaggtcaggagttcaagaccagcctggccaacatggtgaaaccctatctctactaaaaatacaaaaaaattaaccgggcatcttggcgcgtgcctgtaatcccagctactcaggaggctgaggcaggagaattgcttgaacccaggaggcagacattgcagtgagctgagatcgcgccactacactccagcctggtgatagagtgagactccgtctcaaaaaaaaaaaaaagttaattttatgttagatgaatttcacctcaaattaaaaagaagagaaagaggctgggtgcaatggctcacgcctgtaatcctagcactttgggaggctgaggcgggtggatcacttgagcccaggagtttgagaccagcctggccaacatggtgagaccttgtctctacaaaaatacaagttagccaggcatggtagcctgcacctgtggtcccagctacttgggaggcttaggtgggaggatcacctgagcccaggaggtcaaggctgtagtgagccaagatagcaccactacactccagcctgggcaacagagcaagaccttgtttcaggaaaaaacaacaggttagtactgggcatcttagctatctcttagacgacaaagggctaatttgggatggacactccttggtgtttggaaatttaaaagccaatgcaaatgctgtataaaacaattgatctttaacggttcagcgggatctataaattttctcctgagtaatgaaagattgctgtgtttttttttgaagtctccttaatgattgtctgtgtacttactccctgttgcaaaacaggtaatgagagtatattaggtgctattttaaaatacacccacaacattaaactaaattcaaagaattaattggaaattgttatttctgcaaagtaatttccaccaaatcagtcattaagctatctactaaaaccagtatttagtggcttttagtcaagttggctaatggtagacttctcatggcacgtgggagaagtaagctgaagtagcagaaaatggtatttgcagtgagtgttcaaggcgaacttttaaaaatactttacagtaattacagcatgtggctgaaaataactatttggttctttttttaaaccactatagttagatggactataaacatcattcagtttccctgtgttgtgattcatttccacaaacatgtattgtgccaggcactgatttaggtgccacaaaaaatagataagaaatggcttgacaactgtccttaagtttaataggcatgagatttctagatactgctctactaatgtgtcattgcctacaactcacctgttctgaatgaccactttttttgttatcctatatcagaagtacttggaaaaaaataaccagcaatttgacattttggagaaatgttttattctcttctgtttttcaccaaccaagcaagcagcagtgatgttttgtttttttaaaaatcagaggcagggatctgagtatttcatagggatttcagttcgtttcagtgatagaggatgttggcactaagtctaagtaccacaacctaacggggccatctcattttacattccccgttgttcctgcaatgggaacgaaggcctgaaagctgcctgccacatgagaaaaatggcagcttttcaaagttctcgaatgttaacctcccttgaatctgttaaggcattcagagcacagtacaagaaacttaaggtttgaattggactgtgtctctgctgagttggcgtagcatattaattttctatttctattggtaacttttgttgttgctaaattcttagtaccttttggttttatgttgatgcgaagtagtttaagtgttacagaaacagtggctttaaagttatggtattgcttttctcaaataggcagcacttagtaaaacaaaaagaaaaaaaattgcctaataagctgggcacgctggctcactcctgtaatcccagcactttaggaggccaaggcgggtggatcacttgagaccaggagttcgagaccagcctgaccaacatggtgaaaccctgtctctactaaaaatacaaaaattagccgggcgtggtggcgggcgcctgtaatcccagctacttgggaggctgaggcaacaagaatcacttgaaacctggaggcagaggtaagcagtgagccaaggtcgcgctacagcactccagcctgggctacaaagctagactccatctcaaaagaaacgaaaaagaaaagtcaaaagaccattctggagtcctctgatgaaatgagatctatgtcgttggtatgaaaatgaacatcattcacattgtttcctaggcagagtcactgcttttgatgctatttgtatcatggtagcgttttgacagccaacaggaatttccttcttagtattcacattgagaaatgtgattaaacatcattctgttgcctaaaaggcaaatcagcagctagaacagctttaaaagggaccatggcagccactctcaagttctgtagccttttttgttttgttttgtttttaatctaatgaggtcctgtgaaaatagcccagtgtttgcatagataaaataagcattgtgggccgggcgcggtggctcacgcctgtaatcccagcactttgggaggcactccaacctgggtgatgaagcgagactccgtttcaaaaaaatgaaaataaaaaataataaataagtaaataaaataagcattatgcatttgaccacttgaaaaaaatgaggtttctctctggctagccattactccaaagatcaaaacaaacaacaaaacaagcaagagtggttatcatttatttctttccagttaactattgccaaatttgaatttatatggcagattttggttccagatggagcagtcatgatgatctgcttttggaagttcactcattgatttttgtaaacttcagcaagttacaaaattgatattccaaaatattttcttaaatcactccaaagttgtatctttcatctgacatcactattgaacctataaagactttttatgaaacctatgcaatctaattgttagtttaatccaaaaaaaatcatttggctggcttatgatcatttttatctgggggagaaatataacaatttgatctttttttttttttttttgagacagagtcttgctgtgtcgctaggctggagtgcagtggcgcgatctcggctcactgcaacctccgtctcctggaagtctaactctcatccaggcgggagtggagtgccttgacgcagtcttggctgactgcaacctctgcctcccagactcaagcgatcctcccacctcggcctcctgagtagctgggaccacagatgcaggccaccatgcccggctaatttttttgtatttttggtagagacagggtttcaccatattgcccaagctggtcttgaacttatgagctcaggcgatccacttgcctcggcttcccaaagtgctgggattacaggcgtgagtctctgtgcccagccctaatcatcttttttgatatattattttactgtttctagctagcaaaagatgattcttgcttgcttaaaataaagtccccacttcaggttttcagggaacaagaatttacagtttgtagaaattctccttgtacaatttagctacactatattcttattttttatgtgataagcaactgtacttaaaagtagactatcttggctggacatggtggctcatgtctgcaatctcagcactttgggaggcagagatgggcgggtgacttgaggtcaggagttcgagaccagcctgggcagcatagtgagctgagatcacgcaccagtgcactccagcctgggtgacagagtgagactgtctctaaataaataaataaataaataaataaatacccaaatgagtaaactaaaaatttacagcactattggtcacaccaagtcttttattgcaaggaagagggaggtttgtaggctctacagcctgagacgctagagctggctgcctgcatgcctgtcacagggtttctgtcttactagtaggggtgaagtcacttcactgctatgttagtttcctcatcggtaaatggaaataataatagtattgtacttaatgcaacagaactattcacttaaaaatgattaacatggcaaattgtatgatatatatatacacatacacacacacacacactttaaacacacttttttttttaaacaaaagggaagagtattagccgggcccagtggctcaggcctgtaatcccagcactttgggaggccgaggtgggtggatcacaaggtcaggagatcgagaccatcctggctaacacagtgaaactctgtctctactaaaaatattaaaaaattagccaggcgtggtggcaggtgcctgtagtcccagctacttgggaggctgaggcaggagaatggcatgaacccaggaggcagagcttgcagtgagccgagatcgcaccgctgcactccagcctgggcgacagagtgaaactctgtctcaaaaaaaaaaaaaaaagaagagtgttgtattggggaggtaaaaaaaaaaaaaaaaaaaaaccacgttagaccagaccatgatgtccattgttttttatttttttgatggagtctcactctgtcacccgggctggagtgcagtagtgcgatcttagctcactgcaacctctgccttccgggttcaagtgattctcctgccttagcctccagagtagctgggactacaggcacccaccaccatacctgggtaatttttgtatttttagtagagactgggtttcgcgatgttggccaggctggtcttgaactcccaacctcaagtgatcctcctgccttggcctcccaaagtgctgagattacaggcgtgagctaccgcacccagcctggatttgtttttaaaacatgatattagtgtgttaattacattcacatttgcctagaagaaatttgtaacagaaataggagctcaaaacattgaaatgagatgaagcaacaaataatttaaagccacttaaaaatagagccaaacatggtgggatttctttgaaatatctgttaatgtttattttttaaagctgaatactgttcagttattaagtagaaccaactacccgtgtataattaatgaaaagaaaacacttgtgctaggtttataggtatataaacacttagatatctcacattctttggcaacagcttagggaaggcagccatgtactagagacttttagcttttttttgcagctgatctcagggacttgaagaactccttatggtatgattgaattattttttaataggtaaaattctcacgttattgcatgctcttcataaattaccttttttttaaaagagatggggtcttgctatgttgccgaggctggtctcaatctcctgtgctcaagtgattctcccacctcagcctaccaaagtgttgtcattatagacatgagccaccctgctctgccaaatgacatttttaacagctccatgagatcaggggactcttctgttcacagttacatccccagcaccttgcagagtcactggcacattcctgaaacccaacataataaactacgtatgtgaacaaaaccaactctgaccacaggctagaaagaattcagtagaagtttccattgactcattcatgcattaagcaaatattttcttttcttttctttttttgagacagagttttgctcttgttgtccaggctagagtgcaatggcgagatcttggctcaccgcaacctcctcctcccaggttcaagcgattctcctgcctcagcctcctgagtagctctaattacaggcgtgcaccaccacgcccagctaattttgtatttttagtagagacagggtttctccatgttggtcaggctggtgttgaactcccagcctcaggtgatccgccagcctcggcctcccaaagtgctgggattacaggtgtgagcccccatgcccggcctcagcaaatattttcaaaggacatctagattggtagtgcagtatgtcttgactgatagtgggggatgtgatgaatcaggtattgtgaagaagaaactcatgttagaactacctgaacaatgccaagagcacctcctggtaagtggagtttcacaaaaggagtattaaaagggcactaatcccattcacaaggggcccaccctcatgacctaatcacctcccaaagggcccacctccaggtaccactgcactggggattaggtttcaacatatgaattgggaaagggaggcataaacattcagtctgtaacaataatatataaaattttaaatcaaactagataaacatttattcaaaataagacagttaccttaatatataagaagtttatgcaaaacaataaatacaaaatttctaatagatgaatgaacaaagattaagaagagaacagttacaaaaggaattccaaattccaaatgaaaatgtctaaaacattaatttcatgaataattaaataaatgcactttgggagaccgaggcaggtgcattgcttgagcccaggagttcaagaccagcctgggcaatatggcaaaaccccatctctacaaaagatacaaaaattagccaggcatggtggcttgcgcctgtagtcccagctactcaggaggctgaggtgggaggatcacctgagcccaggaggttgaggttacagcgagccgaaattgtgccaatgcattccagtccaggcaacagagtgagaccctatctccaaaacaaaacaaaacaaaagaaataaatgcaaaaaaagcaatttgcctaccaaataaggtagtttttttgttttgcaaatggtagtattcagtcctagtcagggttcagcaagttagggatccttgtatactgttggtgagtgtgtaattggttcaccttttctagtaaagacctgggcagtagtcgaggctggatttttagccaggatgcttggtactgctggcctcttctaattggacagggagtctattgataatggattgttaaatagttttattatcattcctgctagcaggtatcaagacactttaaaatgttcatatacagagacctattggttttcctcatgggaatgtaaataaattttgaattaatctttctgatatttctttatagctctgtactgtaaagacctactagtatgtgagctccatgagaatagagaagttgtgtcttcttttacctgctaggccctcagtttctagaatagtatttggcatagtaagtgctcaataaaatatttgttggaagaatggatgggtgtatgtgttttgggcatacagtagaaacagcatatgttgcttactgtaatgttttgtgttctcttttaagaacattttatttgacagtatttattatattaatattactgtggtggtatatgaaaaatatttttggcctttagacagtaatcgtccgggattttttttttttttaagaagtttttcccccaagggtgaagtcttttttgcaatcaatcatcaatccatagttgggtactaaatgatgcccattttctgaaaaatgtttttttttttaagggaagaaaacagaggaacatcaatcaaggaaaaagtaatagttcaatactttatgtaatagctttttctattcacttaagtttttccttcataaatgttttaccttcatttttgatctctaattagcagaggctcaagtgaccttaagtatctcttatcctgaagattttcctatcaaccaaattgtaaactaataaataattatggcatattacaaaagaatgtatgaaaatatgtatgtatagaataatatgtacaaaaatagcagtaaaatgcacatccatgtacatgccacccagcctaagaaatagaacattaggctgggcacggtggctcatgcctgtaatcccagcactttggggggccgaggcaggtggatcgcttgaggtcaggagtttgagaccagcctggccaatatggcaaaaccccatctctactaaaaatacaaaaattagccaggcgtggtggcgtgcacctgtattcccagctacttgggaggctgaggcaggagggttgcttgaacctcggaggcagaggttgccgtgaaccgagattgcaccattgcactccagcctgggcggcacagcaagactccgtctcaaaaagaaaaaaaaaaaaaaaagaaagaaagaaataagaaatagaacattattccagaatctcctgctggcccctccctgatcacatccctttctaagcctctgccaccctatttgagtgttcagaattttgcattgaacatattctgttatttttacagtttcatcctgtatgaatataccagtaaaatacattgtttagttttgcctatttttggacttcaagtagaatcagatggacaggtgggtttgtcttagtctattttgtgttgctatagcagaataccacaacctgggtaatttataaacagtagaaaattatttggctcatgaatctagaggttggaaagtccaagaatatggtgctggcaccagttgaaggccttttgccacttagggcaagagagcaagagggcatcaaactcccttttgtaacaagcccactcttgaaataactaatccactcctttgataatgatattaaaccattcaggagggctctgccatcttttatttggccccatttcccattaagtttctgacacatgaactttggggaacacattgacaacaaagcaggttgttgccaatattttttttagcatgaattatgctgctataaacattcatatgcatgtctcttggtgcacatgagcaagagttattgtctagctcctaaaccttaagatatatacctagagatgtcatacagaggcacaggttcacctttactaggtaaaaccaacctgttttccgaggtccccagcagtgtgtgaatgttgccattacaccacgtccttgtttacacttggtgctctctgactttaaatttttaccagactgatggatatgaaatggtatttcattgtggttttaatatgcatttccctgattactaattaagctaaatatatttattgcttaaaattcttatttatttatttttgccccttttcctgttaagttatttgactctttttagaacagttggagccaggcacagtagctcatgcctgtaatcccagcactttgggaggccgaggcagggggattgcttgagcccaggtattcaagaccagcctgggcaacatagtgatatcctgtctcttaaaaacataaaaaatagaacaattgaaggagtgctatctatattctagataccaattctctgttgatcatatgtgttacaaatatcttctcccagtttgtattttttatgttcactttcctcaatgctatcttttcgtgaacggaattttttagttttttagttttattgacttttttcattatggtgtacactttttgatgtcttgtttaaaaatcatttctggctgggcgtggtggctcatgcctctactcccagcactttgggaggctgaggtgggcagatcacgaggtcagaagatcaagaccatcctggctaacatggtgaaaccctgtctccactaaaaatacaaaaaattagcctggtgtggtggcacgcgcctgtattctcagctacttgggaggctgaggtaggagaatcgcttgaacccaggagatggaggttgcagtgagccgagatcgcaccactgcactccagcctgggcgacagagcgagactccatctcaattaaaaaacaaaacaaaacaaaacaaaacaaatttcctacctcaggatccaaaagatattatcctatattgtctcctaaaagttttatagcctagccttttacatttaggttcttaattcttaatccacctggaataagtttttgtatatttttaaaagtagaggttttatctcatttttcccgatagatatgcaattatccccgtacctcttattgaacagcttgttctttccccactggttgatgacaatgatgatgatgatgatgaaaatgatagcattaacacttactgagggcttaccatgtgccaggcatatgctaagcatgaggtaatttactaatccttttagtaactcagtgagtaggtcctgcttctatcctcttttgagttgagaaacagcaacacagaagttaaatacttgcttcatgtggcatacctagtagtcaaagagccagcattcaaaccaatttattctagttccagaatccagattcttagccattaggctctgcatcttttctacatggctacatctatcctaaatcaaaagtcatttttgcatggacctgttcctggcctttcaattctttgtatttgtctatgtctttgtccctggccaatagcacaaagcctcttaattaactttagaataagtcagtatctggtgtggctaatattcctaccttgttgttcttcaagagtgttttggctattaattgacctttgcatcttgatttaaatcttagaattttgttctccagaaaacttgttggggttttaattgaactgcattgaatctgtagataatctaggggaggattgatatatctataatatatggccttccaatccatgaacatggtatatttctatatttattctgtttttctttaatgttgtcttagtccatttgtgctgctataacaaaatacctgagagtggataatttataaacaacagaaatttatttctcacagttttggaggctgggaagttcaagatcaaggtgccagcaggttcagtgactggtgaaggcccattcctcagatggtgctatctaggtgttggtgttgccacatggggaagggatggaagagcaacagcagctctctgaagcatctttcatatgggcattaatcccatccatgagggtggagccttcatagcctaatcagttcccataggcaccagctcttagtactgtcaccttggaggttaagttccagcatgacttttggaggatacattcattaaaaccttagcaaatgcattttaataaagttttatactttgctctattatgttcttgcacaccttttattatgtttgtttctgtctacttgtaattcttcatgctgttataagtaataatgttatatatattttatatatatatatatatatatatatttttttttttttttttttttttttttttgagatggagtctcactctgtcacccaggctggagtgcaatggcaccatctcagctcactgcaagctccgcctcctgggttcacgctgttctcccgcctcagcctcccgagtagctgggactacaggtgcctgccaccacgcccacctaactgtctcttgcttttccaccttccttccatctctgctgtctgtttggcttggctgatttttacttattcttctcatttcctcttagaaatccctccctctgaaaggccttccctaatcccatgtctatcttgagccctgcaagtctatgtttctactgctcttttagcctagagtgctcattagcactctactgttccctactctcattccagtgccagtacagagcttggctgagagtgagctctcaataagaatggttgaattatagcaacattttggaaggagacaaaaaaaaaaaaaaagacccaaagaaaagtggcttagacaacaagggcacattttctatctcacatgacaaagagtccagaggcagggaaattccaggttggtgtctcagttcagtaatagctgagaaattgtcatcaaaaagccaggtgctttccatctctggctctgccatttcaagcatcacaggtagctatgaccacgtcaagtaaagaagaggagggagccgggtgcagtggctcatgcctgcaattccagcactttgggaggccgaggcaggcagatcactttaggttaagagttggagaccagcctttccaacatggtgaaaccccatctctactaaaaatacaaaaagtatccgggtttttttgggaggaaacctttctcagtacgtgtttagtagatatctgctacatctggttagccagggtaatgtcacatgcccatgtctgtgttgcaagagagatggagaaagtgatcctgtaataagacaggtgctctgccaaagggaagatgggatggatgggggatagctgctagattgtcagccaagatgctcagacaaaagtgtctgttgcaagggatatctcacagaaccagtggctggatgaacaggccagtctcacaagggacttaaattggccagtggaaagtccacaggtacattttgaacatatgggggtaataatgtcttgtgtttgctttcctcttcatctctgcagattagcgttttttccactaatttggcatgcacatggacaaaaattgcctcttagcgatttttttttttttttttttttgagactgggtcttgctctgtcacccaggctggagtacagtggcacaatctcggctcattgcaacctcctcctcttaaattcaatggattctcttgcctcagcctcctgagtagctgggattacaggtgcaggtgcgtgccgccatgccaggctaatttttgttttttgtttttgttatgagacggagtcttgctctgttaccaggctggagtgcagtggcacgatctcggctgactgcaacctccacctcccgggttcaagcaattatcctgcctcagcctcccgagtagatgagactacaggcccatgccaccacacccagctaatttttgtatttttagtagagttgggggtttcaccatgttggccaggatagtctcaatctcttgaccttgtgatccgcccgccttggtctcctgaagtgctggaattacaggcgtgagtcattgtgcccagccatttttttttttagtagaaatgaggtttagtagagatgcccatgttggccaggctggtctcaaactcctgacctcaagtgatccgcttgcctcggcctcccaaagtgccaggattataggcgtgagccactgcgtccagcccctcttagcaatttttaccttttagctctagcacctattcccatagagtttttcatgcaagtccttgagtcagatgctcaactatggcagtggggttgagaagtgggatcccttctcttagaaagggacatcacctatgtgtttgcagagccatcttaaagtgggaagtgaatgaattggcaagcgttttagtggaaaatctttttccttggtgttaactaagtttcagatgccagggccttaaacatttttttcctgtaatatttttgtaatattttgcacccactctaccactgccccctccaacctggaaatatttagagtttagaaataagtcaggactttaaaaatctggctttttcttctcattaataatttagcttgtatacttctttcttctttagtctttggattgcattcaaagttctccctggtatttagagtgagatttctttctctctctatcaccctcttttcttcctttcctgggtcggtcttgaacttgttttctgggggagagaatcacctatggagactagtgtgggatgtttgagaggcacagttggttttccagggctgagaagaatgcaggacagctagaggcggggaagctggttgaacctttgcacctgctgattgatcaagcttgggaaagagaccaattcatatttagacagctttcgtggtccaatctctgcatagaaatcaggaaatgaaccagaagattccgttttcaggttgaagccagacactgaggggcttgactaagctcctcttgcttacaataaaatggagcattttttaaattataaagagcaagattttgctttctgagattagcgtcgatctttcatcagtgttgatgcagccaaacacagttacaagttatatccatccttctaagactaattttataacttcattatccctaatacttttcctcttcaagttatttgacaataccatacctatctggaggagtaatttttaaactatttaaaaaattaggtggttttttcggtttgttttttgagacagagtctcactctgttgcccaggctggagtgcaatggcacaatctggctcactgcagcctcgacctccccaggcccaggtcatcctcccacctcagcctcccaagtagtgggacccacaggcgcatgacaccacacccagctaatttttatttttattttttgtgcagagtgggtctcgccatgttgctcaggctggtctcgaactcctgggctcaagtgatcctcccattcagcctccccaagtgctgggattatagtcattgagccatgatgcccagcagaaattaggtgttttttttttttaatgaaaaaaagtaagcagtttaatttttttttttttttttgagacagagtctcactctgtcacccaagctggagtgcagtggtgcgatcttggctcactgcaacctccacctcccaggttcaagttcctgaatagctgggattacaggcgctcgccaccatacccagctaatttttgtatttttagtagagacggggttttgccattttggccaggctggtcttgaactcctgacctcaggtgatccagccacctgggcctcccaaagtgttgggattacaggcgtgagccaccacgccggccttaaaatcttatttttttacagtgtctttcactccgcatctttggggcagttagagatgtttgtttttgtttgttgcttttaccgcatccgtagaaacaagagaggaactgaaagtgactaaggtgttctaagaacgtcaaaataggctagaagtttattgctgctttttaaagggatacattccatagcagtttcccctcctaatctcatctgctcagactctagcacagtcaaaattctggcactttttctacaggttgtgattttcccctttctcttcatttcagaacacatttggctcagagcaccgctgcattcattagtcctgaggcttctactttctgagcccttccatttgttgcacatccaacaacagcctccttaatgcccttttacacaatataattattgttataaaaatatgaaaatgcaactttttgtactctatgtgtctttctgcattctttttttttttctttttttttttttttttttgacaggatctcactctgttgcccaggctggaatgcagtggtgtgatcacagctgtctgtagccttgacctcccaggctcaagtgatccttccacctcagcctcctgggtagctgagactataggcgtgcgccaccacacccagctaactttgtgtattttttttttttgtagagatgagggtcttgctatgttgccgaggctggtctcaaactcctgggcccaaatgatcctccttcctcagcctcccaaagtgctgggattataggcatgagccgccgcacccggcctccacattctttatatcactaacttcatccatatgcagctgcctcctaaacttcagctaagttttatttttttaacccacacatatatttttatcatatatttgcttacattcttatctcgtgttcagaatgcaactacaaagagccatgaacgtagtgttttcatttctacaacagaaacagactccttagtgttttcatttctgcaacagaaacagacttatgactaattataacaattaagcctaagtttgtacctgtttttattttatttacttatttgagacgaagtcttcctctgtcgcccaggctggagtgcagtggcaccatcatgtctcactgcaacctccgcctcctggggtcaagcgattctcctgcctcagcctcccaagtagctgggattacaggcgcctgccaccatgcttggctagtttttttgttttgttttgtttctttttgagacagagtatcactctgtcaccaggctggagtgcagtggcataatctcagctcactgcaacctccgcctcccaggttcaagcgattctcctgcctctgcctccagagtagctgagactacaggcctttgccaccatgcccagctaatttttgtatttttagtagagatggggtttcaccatgttggtcaagatggatttttttgtatttttagtagagacggggtttcaccatattggccaggctggtctcagactgctgacctcaagtgatccacccgccttggcctcccaaagtgctaggattacaggtgtgagccaccatacccagcctgtacctgtttttaatggcaagttctagaattgcattttaatgagatttgaattcagtaagacctttcattttgtgtgcttttcctttctaattaaaatctgttgtattaacttgaatgtacaactagggcactgtggtgctggagcccctttttgtcagttacctcacaggctcctgctataggagacattttcaacccagggagcacagcaccctaattcaaaaaccagtttcagaaacagcagatgaatatatgattttgtggaatctgcatctactcctattgtcaaaacataaggtatctgtgatccttgaaataaaccttctattcctaagtcaccatagtgtttggaagaaaaacaacaaaaggaaaaaacaaataaaccttctaattctgcctttcacatgtaatttattctttttgtgggcaagcaatgaagtcactttgggtaatcctttttcatcacttttaggttgaaaaatatatttgagtatttctgcttttaatattctcaatttggcagggcacagtggctcacgcctgtaagcccagcactttgggaggctgaggtgggcagatcacaaggtcgggagatcaagaccatccttgctaacatggtgaaatcctatctctactaaaaatacaaaaaattagccgggtgtggtggcgggcgtctgtagtcccagctactcgggaggctgaggcaggagaatcgcttgaacccgagaggcggaggtcgcagtgagctgagatcgcaccactgcactccagcctgtgcaacagagcgagactccgtctcaaaaaaaaaaaaaaaaaatctcaatttgtctatggaaattaatttaaatctttgttaaaagctcgagaagttaatttcaggtggtatttgtgatggcacatttttgtttgtaaagttcttttttgagacagagtctggctgtgtcacccaggctagagtgtagtggtgcgatctcagctcactgcaacctccacctccctggttcaagtgattctcctgcctcagcctcctgagtagctgggattacaggtgcaagccatcatgcccagccttttttttttttttttttttttttttgagacagtcttgctctgtcaccaggctggagtgcaatggcgccatctcatctcactgcaacctccacctcctgggttcaagcgattctcctgcttcagcctcccaagtagctgggactacaggtagctgccaccatgcatggctaatttttgtgtttttagtagagacagggtttcaccatgttggccaggctggtcttgaactcctgatctcaggtgatccacccacctcagcctcccaaagtgctgggattacaggcgtgagccaccacgcccggcctgtaaagttttataaaactttctacgtttctgtaagtgcagcttctttaatattcagaaccaaattgattttttaaaacattttaaatggatattttcttacagttactctttgagtaaatctataccctctgacacattttcctccacagtttgaggaagctaatgctagtaacataatcctaagggattctgtttaaacagagccatttaagtcctgcttcttaaaatgcccaagtcctcaggaaggtgaatttatcaaaaactggagtatacagaaatagcagtctagatagcacagaccaaagtagtctcagtagtgtggaggagatcattcccttcactgggtgaataattcactgcaggagagatttgcttacagagggggactggcctcaggaccccctttcctggagtctgtgccacttacataggtaattttagcaacttagtctcttactagattggcttattccagggattttgaattaatgttggtttagtacactttttttttttttcgagatggagtcttgccctatcacccaggctggagtacagtggcgcgatcttggctcactgcaacatctacgtcccaggttcaagcgattctcctgcctcagcctccagagtagttgagattacaggtgtgagccaccgcgcccagccggtttagtacactttttaattacaggaaaacaccatattaaagttgacctagactttggaggaaaacttccttgtggatgacttgggtctcctcatctcaaagtaaatagcttttctgaatgtagttcctgtgacaactcttctgcataatttgagcaaaaaataggttacagaagactactttttttttttgaggcggagtctcgctctgtcgcccaggctggagtgcagaggtgcgatctcagctcactgcaagctctgcctcccgggttcacgccattctcctgcctcagcctcccgagtagctggggactacaggcacctgcctccatgcccagctaattttttgtatttttagtagagccggggtttcaccgtgttagccaggatggtcttgatctcctggccctgtgatctgcccttctcggcctcccaaagtgctggaattacaggcgtgagccaccgtgcctggccaagactacttttttgttagtttttgtttgttttttgagacagagtctcgctctgttgcccaggctggagtgcagtaatgaaatctcggctcactgcagcctccacctcccaggttgaagttattctcctgcctcagcctcccgagtagctgggattacaggtatgtacctccactcctggctcattttttttgtagttttaatagagacagggtttcgtcatattggccaggcaggtctcaaacttctgacctaaagtgatccgctggcctcagcctccctaactgctgagattactgctgagactacaggtgcgtgccaccatacccagctaatttttgtagttttagtagagacagggtttcactatgttggccaggctggtcttgaactcctgacctcatgatccgcctgcctcgacctcccaaagtactgggattacaggtgtgagccacgtgtgcccagccaatttttgggtttttattacagatttgtgagggcaagattttttttttttaacttaatgaagatataatgacccaaaccaatgccatagcccatgcttattgtaacttaatcagaatatagtacctaaaaccagacctgaaaataattgtaaaaagtagcaattgcatattgattaacacaataacactttcttcattcaactcttcagtttattcagcgtctcataactaacagcacctggcacacacctttggttggtttgaattcaaggagcagtgtgaggtcaaggtcaagggggagtgtaaggtcaaggtgaagtgtgatgttgggtgagtggttcagcgaggttcctgaaaggtaccatcaggttgtaaccaacagcttggaaacatccatttgtagtcctcttggcaatcttagagtgaatagttgaaagtatgggttatagtctgttcagtggtgcttacacaggagtgtccgaggctaggtaattaataaagaaaaaaatctttgtttggcttataattctgatgtctggaaaagttcaagataaggcacctgcatccagaaagggccacaggttgctccattcatagtagaaagtaaagaggagcctgcatggcagaggtcacgtggccagagagggcacaatagagaggggggaggtgctgggctctttctaacaaccagctctggccaggactcatagagcaagaactcacccattacgtcaaggacggcaccaaggtattcatgaaggatctgccgccatgacccaaggcctcccattaggccccacctctgacattgggaatcaaatttcaacatgaagtttgagggggacagacatccaaactatagcagtatgtatacacagtatgcacctataaaataaacattattttctattaggttgtttattacctaagtttcttaatgtttagaatgtgcaactttgaaatataaattttattttatttatttttttagatggagtcttgctttgttgcctaggctggagtgcaatggcgcgatctcggctcactgcaacctccgcaggttcaagcgattctcctgcctcagcctcccgagtagctaggattacaggcatgggtctccatgcccggctttttttttttttttttgaggcagaagtcttactctgttgcccaggctggagtgcagtggcgcgatctcagttcattgcaacctctgcctccaaggttcagatgattctcctgcctcagcctcctgagtagctgggattacaggcgcccaccatcatgcctggctaattttttttttgtatttttgtagagatggggtttcaccatgttggccaggctggccttgaactcctgacctcaggtgatctgcctgccttggcctcccaaagtgctgggattatagccgtgagccaccatgcccggctaggaagaaatttttgtatttttagtagagatggggtttcaccatgttggccagcctggtctcgaactcctgacctcaggtgagccacctgcctcagcctcccaaagtgctgggattacaggcctgagccaccacacccaacctgaaatagaaattttagcatatatgttatatgatagtggttctcaaagtgcagtccctggacctctggagtttcctgaaaccttctcatggagtttacaaggtcaaaactattttattaaggattgtctttttaaccgtgttgacatttgcaccaacgttacaaaggaaatggtgggtaaagctgatgctttagtatcagttaaatcaaggctgtggctccaaattgcactggtaactactatattcttcaccattagctgtttttttttttttgttttttttttttgagatggagtcttgcactgtcacctgggctggactcattgcaacctctgcctcccgggttcaagcaattctcccatctcagtctcccgagtaactgttattacaggcgaccgccaccacacccggctaattttttgtatttttagtagagatggggtttcaccacgttggccaggctggtctcgagctcctgaccttgtcatccgcctgcctcggcctcccaaagtgctggattacaggcgtgagccaccatgcccagcccaccattagctgttttaaaaaatttcagttttacttgaaaatgttcttaatgaaacagtgaagattattcattttactaaatctcaaacccttgaagatacatctttttaatagtgtgtatagtaagatgagaagctctttagtgcagactaaaatacatgatcctgagttgtaagttgaactagctgcttttttcatgaacaccatttttacttcaaagaatgagcgacagacaaacttttgagtatctggcaaacattttctcaaaaataaatgaagtgagcctgtcacttcagggaaacagctggcaatgtttgttgccaatgataaaattctagctttaaagtgaaaattagaacttggggaaattgtttttccactgtgagtttgacagcttccaaatattaaagactcatcagaaaagatgagattggtactgatataaacaaatgtgattcaaaaaaaatattttacaagaaatgtttcaacagttggaagatctgcatatatctatgatataatattttctttttttcttttttcttttgtttttgacatggagtctcgctccatcacccaggctagagtgctgtggcgtaatctcagctcagccgagatcagcaacctccccttcccaggttcaatcaattctcctgcctcagcctcccgagtagctgggattacaggtgaccaccaccacacccagctaatttttgtatttttagtaaagacggggtttcaccatgttagccaggctggtctccaactcctaacctcagacgacccgcctgcttctgcctcccgaagtgctgggattacaggtgtgggccaccatgcccggctgagataatattttctaaatgatcaatgaataatttacatgatcatatacaggtaaaagatccattcaaaatgtaaggtggaccagtggatcttactgtagctgagttggaaactgcatctctatggtttcagatttcatattgcaactagcctttgagaagctatgatttgtcaagttttggtgtggtatcaaaggagaatgtctgcactgatctaaaaagggccttgaagtgtcctttgttttctagctacgtatctgtgtgaagttgtgtttttttcacatatttcagccaaagtaaagaatcgtaatagattgaatgcagaagtctctatgataatccagctgtcttctattaagctagacattaaagagatttgcaaaaatgtaacacggtgccattcttcttactgttttgttttggaaagtacagttttaaaaaataaaaacatgctctttccattaacatgtaatggtaatgggtttgttttctttttaaatgaataaatacctttaaaaatctctccattttaaatttctgattgagtaaatattgatagatgtaactcacacaaaagctcttcggaattctcaatgattttttttttttttgagacagagtctcactctgtcgccccaggctggagtgcagtggtgcgatttccactcactgcaacctctccctcccaggttcaagtgattctcatgcctcagcctcccgagtagctgggactacaggtgtgtgccaccatgcctggctactttttgtttttcttttgtagagatgaggtttcaccatgttggccaggctggtcttgaactcctgttctcaagtgatccacctacctcggcctcgcaaaatgctgggattataggcatgagccactgtggctggctggttctcaaggatttttaggagggcaaaggggcccccagaaccaccgtgatgtgacatcaggcaggaagggatgcatttttgatgacaccatccccaaagtagcaaaggctgtttttaaagagccgtttataatatttgttcacaaaggagtccttttaagatttggatttttttttccattaacttttccacattttagtcaagaatgtaagtgggttgattcgtttttcatctgtcttgaattttcttctagctgctgtcaagtcagtgctgcagcagttcatgtgatagtgagagcgtgggggcatcctcaggtttcacagagcatcaaaagaactctgctatagacacaaacaagcaccagctcatttgttactgagtaaggtttttattattaagatcttctatcttatttgggctctgtcatcttggtaaacgctttattatagcttgtagaatggtcctgaatagagataactttatggaaaacatattgttggattgaggccagtaatttttaaggtggactcaattcaaatgtagatgggctttttctgttgttttcaagggctttggtatcgaaagctgttgctttgtatagtatacatcagtttgaatgcaaagtgatatggtggggggaaatctgtagtcaggttgttaataggccaagaatgaaacctaagagcatatcctctgggcaagttttcaaggtggcacctatgactgctgaaaacaatcaaggctttggagattatgggaaatcatacagggagagggcttttttgtgtttttttttttgaggtggagttttgctcgttttgaccaggctggagtgcaatggccccgtcttggctcactgcaacctccacctcctgggcttgagcgattctcctgcctcagcctcccaagtagctgtgattataggcgtgcgccaccaggcccagctaattttgtatttttagtagagacagggttttaccatgttggccaggctagtctcagactcctgacctcaggtctcaaactcctgatcctcccgcctcagcctcccaaagtgctgggattacaggtgtgagccaccgcgcccggccattttttttttttttttttttttttcgagacagagtctctgtctttcgcccaggctggagtgcagtggtacaatctcggctcactgcaacctctgtctcctgagttcagtggattctcctgcctcagcctcctgagtagcttggattacaggtgcatgccaccatgcctggcaaatttttgtatttttagtagagatgaggtttagtaaagatgactgtgttggccaggctagtctcaaactcctgacctcaagtgatccgcccaccatggcctcccaaagtgctggaattttggatgtgagccaccgcgcccagctgggagagggcttttaaataaaggaaagggtgtttatgtttttggtttttgttttttgagacagggtcttgctttgatgctcaggctggagtgcagtagcctgatcatgactcactgcagccttgaagtcctgggctcaagtgatcctcctgcttcagcctccctagtagctggggctacaggcatgtgtgccatgatgccctgataattgttaatcattttaaaaataaatatgattactgtgaaactagatccacaaagggttactgataagcagagggctttgacgaagtcgtgctctcaatttgtaagaatgatttgtagtcatagcttgagttgtgtgtatatttgttctctcaagtagtttaaggtgatcgtcagtctcgtttacactattagcttacttgatgacccttgactttatagataacataatctagtgtttcttaaactgaaatctaggggtttgtggaatatatattattgaggaccaagaatcaactttaaatattaaaaattattagtcataaagacaaacattttgcacttttgttttataattttgtatttaattttttgagacatagtctcattctgtcacccatgctggagtgcaatggtgtgatcttgactcactgcaacctctgcctcctgggttcaaacaattctcctgcctccctcagactcccgagtagctgggattacaggtgcctgccatgacgcccggctacttttgtatttttagtagagatgggatttcaccatgttgtccaggctggtctcgaactcctggcttcaagtgatccacccgccttggcttcccaaaatgctgggattacaggcgtgagccacctcacctggccaaaatctcagtcataccttaataaagtggttttaaaaaaaaacaggccggccggaggcagtggctcacacttgtaatcccagcactttgggatgccaaggcgggaggatcacttgagcccaggaattcaagaccagcctgggcatcatagtgagacctcctctctgcaaaaaatacaaaaattagtgaaggcatggtggcgggtgccaatagtcccagttactcaggaggctgaagtgggaggatcacttgagtctgggaggcagcagcaagctgagattgcactactgcactccagcctgggggaaagagcacgactctgtctcaaaacaaaccaaccaacaaacaaaaaacagtctgaagtaagacactgaatgtatactgttagattgcacaagcgtaggattaaacactagctttatatttttatatttgagttggcacttccccatttcgcatgatcctcatgactgatttgtgaaattaggaaattagattatagctgcgtcttacaggcaaatgactaaaacttgaaacatttgggggcctgtctctgtgaaatccctttgctggggctagaaccctcatttatgactgttacctctcaggaggcagcaaattttccatggagaattccatttccactggaattctctcttccctgtgatgtgctcatgccccctctggctcgcccccttagtcctttctgggctctgcttcctgggccaggccctctttgctaattctgtgtatccttgctgtcgtctttggtgttctgatcctcggctgttgcttgagatccacctactcacttgatgcccttcttgagttctaaatccttctgtgtttccagctttcttctggacaggccagtccctcattcaacatgtcaaaacaacatttaattttcaccccaaactgtagctctttcttatctggatcttctgtttaattccgggaagcagaacctgaaagtcactctggaatcctccctccccctcatacccttgccagcctccacgtccaaccggccactcacacactagttgattgtgtttgttaaatgtccctagaattcttcccttctgtgcctattttgtctcatctagactgttggagccatttcctggctttctcttccaagtcctcttgtgcctgctggagagtctaaactcctaagctcgtccttcaaggccttgggtgatctagctctgagctgtctctagtttcatcactcgccaactccacttcccttctgccccacccacctccaccttgcactcaaagacaaattcacttgattcctggatatctccatgtctttgcattagctgttgctagcatacctgtcccctctcattctttatttggggggacagagtcatgctcttatacccaggctggagtgcagtggtacaacaccatgcccagctaatttaaaaaaattgtttttgtagagatgggttctgtgttacccaggctccctcttgttcttccagaccagaaaccccaaggcacaatgcaaactcaggctgtatttttgttcattttggttccccagctccaggcactgttcctggctcacagtgtgggtttggtgtatgtttggaagaataaaatccatgtgttttattttaatcatttgaagaaagcaaaattttgtaacacttccccccgttcctcggctcagattcaatcagctgttttgaatgattacccagagataacagttaaggtgcaaaccgtgtgtggctgtgtttgtgtgtatgtttcacctgtcggtttttggcgtctgggaatgacatttttccttgcactgagacatcagttatatctgaaaactatgtttctaaaaggaataggaaatatgaatgaataggtcagagttcagtactccaggcggttttcaaaccaaatttggtaatgttgatttaaaatggctcaacaaaaaagcaccccaagtataatcatggaaaatattagtactactttgtatgtagtaatatgttgttaagagaattattcattgaaattatgttaatcacagggaaagaccataacttctctcttggtttgtttcaacaggatcagtttgacaacttagaaaaacacacacagtggggaattgatattcttgagaaatatatcaagtttgtgaaagaaaggacagagattgaactcagctatgcaaagcaactcaggtaagttgatattgaaaaaggttatttgttaactgcaaaatgatgtaaggataacgtatattctcattttacagtataaatgtatattttaaatatttttccttttatgtaaggtaatatttcaatagaagtgattgtttttcatacagaaaattaattttcatagaacattaaaaataaaaactaaattactgctttaaggcccagttttttttttcaacaagatatttgctgagttttggagcagcttgtttctcagtaaactttttattgaaatatattaataacatatgtacagagaagtacacaaatcataagtgtgcagctccatgaattttgacagtgtgaacacactcatgtaaccgggcacccaggtcaagaaacagaaagaccagcctggcaggccccctggccccctccagctccccactctccccccagcggtaaccactctcctgacttctaaccgcgtggattagtagtgcccacttttgaactttacatgagtgtaatcatttggtatgcattcttgtgtatctggcttcttttgttctatattacgtttgtgagattgaccatgtggtagcatgtggtgggatctgcttattttcattgctgttgagtattttggtctgtgaatgcaccagaactcatccgttctgactaggtgattggttgtttctaatttaagctataatgagtagcgctccaacgagcattattgtacaaggctttttgtgtgtatctgaacacatttcctaggatctacgtaggcatctaattgcaaggtcacaggctactcatatgcttagctttggtggatagggttcagccatttccaatgtgcttgtactaattcacactcccttccgtaatgtgttgaggggtcatgtggaatagtattttaaaagtacttcgggccgggcgcagtggctcacgcctgtaatcccagcactttgggaggcaaaggtgggcggattgcctgaggtcaggagttcgagacccgcctggccaacatggtgaaaccccgcctctactaaaaatacaaaaattagtggggcatggtggcaggcgcctgtaatcccagctacttgggagggtgagacatgagaactgcttgaacccgggaggtggaggttgcagtgagctgagattgtgccactgcactctagcctgggtgacagagtgagactccttctcaaaaaaaaaaaaaaaaagtgctttggggccaggtgtggtggctcatgcctgcaatcccagcactttgggaggctgatgagggaggatagtgtgagcccagagacttcaagaccagcctgggcaacatagtgagccccctgtctctgttttttttttttttttaagtactttggatctccttacatcttttaatgatgagattatccaagaaatttgtgtttttatagaatatatttaaaagttcttggtagaactaagcttgaacttgaagtggcatgcaaagtccttaatgatttcatgttgtatagttgtagttgaattggtttgtggatattgttttaaggcctgttaaagagctagatgattttgatttagaaacatttactttcctttttctttaattttttttttttttttgagacagtctcactctgtcgcccaggctggagtgcagtggtacaatctcagctcactgcaatctccgcctcccaggttcaagtgattctcctgcctcagccttccaagtagctgggattacaggcatgcgccaccatgcctggctactttttgtatttttagtagagacggggtttcaccatgttgcccaggctggtctagaactcctgacctttggtggttcgcccaccttggcctcccaaagtgatgggattacaggcatgagccaccacgctcggctagtctctctacttgggagtctcatagaaatatcagccttaacacatgtgaaactacgtgtatgatcttcctcctcagacccacttctctcagtcttccttctcctaaagctcagactgacaacctcggagtcaccnnnnnnnnnnnnnnnnnnnncccttttttctttttttttttttttaattttcttcaagctccctcaccattgagttttaatccaaagagcatctgcataagagatatgtgttcttggctgggcgcagtggctcatacctgtaatcccagcactttgggaggccaaggcaggtggatcacgaggtcaggagtttgagaccagcctggtcaagatggtgaaaccccgtctccactaaaaatacaaaaatgagccaggcatggtggcgggtgcctgtaatcccagctattcaggaggctgaggcaggagaatcgcttgagcccaggaggcagaggttgcaatgagccaagatcgcgccactgcactccagcctgggcaacagagcaagactccatctcaaaaaaaaaaaaaaaaaaaaaaagagctatgtgttcttataagggtttctgttgttgtttcagcaagctgggattacaggtgtgagccactgtgcctggccccagattttgtttttattgagtgaataacatgtaaaacatcacacaatgaaataatttttataagtggagaatccagatcagtttctagtgccctgtgtgcatatcagtctcgtcaacacgtcaggggcttttcgaactgaaagtaggaatagaacatggtctgtttcacgttgattatttgaatgctgcactattagtcatgcaatgttgtctttcatgtgaaaatgggctacgtgcgagctctcaagcgggctactggtattcttcccacgacagtctcccttgctggcccctgctcttcccctgcctcttcacattgctgtgcccagcatctgcttctcagtccttctcccttcccagtctgtactctcctggtgacctcaactgtctcatggctttaggtataatccatatggcaatgactcacagatatggatctctaagccagacctctctcctgaattccagaaacagcttgctcaaagtctccacttagaaatgtctaaaaacttggctgggcgcggtggcttatgcctgtaatcccagcactttgggaggctgaggcgggcggatcacgaagtcaggagatcgagaccatcctggctaacacggtgaaaccccatctgtactaaaaatacaaaaaattagctggaaatggtggcgggcgcctgtagtcccagctacttgggaggctgaggcaggagaatggcatgaacccagaaggcagagcttgccgtgagccaagatcacaccactgcactccagcctgggcgacagagtgagacgccatctcaaagaaaaaaaaaaaaaaggaaatgtctaaaaaccatctgaaatgatctgaaatgtaacatgtctgaaactgaactccggatctccccaacttaaaaatccacatgtctaggccaagtgaagtggctcacacctaaaatcttagcacttcaggaggccgaggtgggtacttgagcccaggagttggaggccagcctgagcaacatagcgagaccctgcctctaaaaagaattttaaaaaattagccaggcatggtggcgcacacctgtagtcccagctacttgagaggctgaggagggcggatgcttgagcccaagacgctggggctgcagtgagccatgattgcactactgcactccagcctgggcaacagagcaagaccctatctcaaaaaaaaaaaaaatctgcatttccacgacctaggttttcctccactcacctgagggtagctgcatccttcctggtttaggtcaaaaaccctagcatcacccaggtgcagggggatcactggaggtcaagagttcaagaccagctgactaacatggtgaaaccctgtctctactaaaaatacaaaaacattagccaggcgtggtggtgggcgcctgtaatcctacctactcaggaggctaaggcaggagaatcccttgaacccaggaggcagaagttgcagtaagctgagattgtgccactgcactccagcctgggtgacagagcaagactccatctcaaaaaaaaaaaaaaaaaaaccctggtgtcatcatcatctctgtctgccttcttttctcacacactcacactccccagctcaagccatcaggaaatcttgacttctctacagatttatccaggatctgacacttgttatcacctccactgctgccactgtggtccatgtcacatggcctacgtggtccatgatcttttgcctggttatgatgagtctactaactagtttcccttattctacctctatcccctattccctgatttctacagagcagccagattacagtattcctctgttcaaaattccagtgcgtccccatttcattcagagtaaatccaaaaaccttacggtgaaagtcctccaaaaccttgtataatctggttcccacacctttctgacatcatctgttttaactctcttcctcctcctctctgctgtaaccatacagaggcctccttcctgttttttgtacatgccaggcatcccctcacccgagagctattgcgctagcccttccatgtagatatcacctatgtgttcttccccaggctccaagtggctgactccctctcctgcttccagtttctgctcagtgaggcccacctcgtcccttagcccacttagcctgctttgctttttcagttttcctatattactggtaactttctaccattttatatagttttcttgtttagttttgaaaattgacaaaatatgtatttctatattatttgtatataaaattgtatatatttatggtatacatgatgtcttgaaatatgtatacgctgcagaatgcccaaatcaggctaattaacatatgcattactactcaaacttaatattttttttgtgggaagaacattaaaatctactcttctagcaatttagcaacccctcccctcccctccccttccctctttcttgagacagggtctcactctgtcaccctgggtggagtgcagtggcacgatcttggctcacctcccgggctcaagtgaacctcccaccacagcctcccaagtagctgggaccacaggaatgcgctgccacacccggctaatttttgtatcttttgcagagacagaatttcaccatgttgcccatgctggtcttgaacttctaggttcaagcgatcctctgaccgaggcctcccaaagtgctgggattacaggtgtgagcacccggcctggcaattttcaagtatacaatacattgttattaactggagacacaatgttgtacaatagatctcttgaacttatttctcctacaattttgcctcatttgaataacatctccccaaaccttcccagagaaatctgggtattatatttactgcgcattgtctcctgcagcctctcagctagaatgcaagccccttaagggtggagatctttgggttgtgctcactaatgtgtcatagtgcagaacagtgcctggcacatagtaggtgcccagtaaatatttgtagattgtgagtgaatcggtagggtacaggcctaagatatttagccagctttgctttatggggaattatgtgtttgcaccggcctgtgagagctgatgagattttaacaacaaaaagtagaacaacaaggtgccagccgagtttcaatcactagggatgcttgaatgaacgagacacaggaagtgcctgaacctggagtgctcacctttcacagcagaaaacagaactgcatgcaaattagcaaagaattcgagcatttaaagatagcatgtatgactccaaatatgtaaacgcagtgatgtgatagagattgaagtgggggtggttactgagctaggctggtcagggaaaacccatcacttgagaagtgaattacaaaaagaagccagacatgtaaggatgtggggggagagagtgcaaaggtcctgagacgggaacatgtagaaggaatagaaaggccagtgtggctacagaatattcaacagatacttggttgaaatagtaatatgatgttgaaaaatcattgtggcctttgggagagataactatcattaaatattttttttctgcattgcaggggagaatgctaacttattttagacataaacgtgagactttgattcctgtaggtcaggtcttagcatgggccaaatccatccactacttggttttgtaaataaagatttgttggaatgttgccgtgcccatgtgtattgtctatggccacttttgcaaacaattggcaattgagtagttgcaaaagagatgcatttacctgcaagtctgaattttttttttctcttcgagatggagtctcgctctgtcacccaggctgaagtgcagtggtacaatctcagctcactgcaacctccacctccagggttcaagcgattctcctgcctcagcctcctgaacagctgggactacaggcgcacaccaccatgcctggctaatttttgtatttttagtagagacaggatttcaccatattggccaggctggtcctagactcctgaccttgtgatccacctgcctcggcctcccaaagtgctgggattacaggcatgagccaccgcacctggccctgaaatatttactttctggtcctttacagaaaaagtttgccaacccctgaggtcactatctattcaaggtagtataggttgaaattcctaatataatttttttttctgagtctgaacaacctaattttatttatttttgagacagtttctgtcacccaggctggagtgcagtggcatgatctccagtccctttccagaaactatggcccatgacactccattagcagagtaacagggcctgctcaacctcaccctcactgctgctttctgtttccaaaccgatctttgtcaatttgctacttaacaactggtacatctaggtcttaaattgcatttctcttagtatgcatgggggttgaacatcttttgatacatttgagccatttatggttttaaaaaatgaaccattcaagtcttggtctgtttttaattggagctcattgtatatagagggtaactaggtagaaatcatattatacaacaaattgcatatcgtatatatcatatatataaagaaatgaatttaaatttaacagtacaaacgacagtaaagtgaaactgagggatgcgctaagctttaaatattaaactcttaggccaggcacggtggctcatacctgtaatcccagcattttgggaggccgaggtgggcagatgacctgatgttgggagtttgagaccagcctggccaacatggtgaaaccccgtctctctactaaaatcacaaaaattagccgggcgctcctgtcatcccagctactcaggaggcagaggttgcagtgagccaagatgacgccactgcactccagcctgggtgacagactctgtctcaaaaaaataaatattaaactttggtaaaatttatcaaaaagattatgaaaaacttacaggatgtcattattgtgtgtgtgtacttccatgttgaaattctaaacaggctcaattgactcactgctataaaagattaggaaaataatatatacatgttttgctccttcttctagttgagttgtatgactgggttctgaaacccgaggccctcagttgatttgtcgtggttctatatttgaacgtagagtcatctcagcacttctctctacaacagcctctctccttgactcttggcattaaggaagaatattctccccctcgttagagcttgggacgtgttccctgcgttctttcttgcttgaaaatgccaccatactttacagcactttgacttggttgtctctggtcacactttctctctccatgtggctgcatcgtcttttggaggaaaagtctggggccagccagatgtttctctctgtaggcaacatggctgtttctgagtaaaaatatgaataattttagttcatcttagcagtctgataacttcactaagcaatgccttggagttgatcatcctttatcagatagtttttcttagtgctctttcctgtgtaaattctatgcttcatttatttcaggagaaagttctttgattatgtctgaatgttttttctattctacttactgggtcatatacttcagagatatgagttatccttatgtttcatcttattcttatttttatttttttatttttaaaattttttttcttgagatggcatctcgctctgtcacccaggctggagtgcaatggcgtgatctcagctcactgcaagctccacctcccaggttcaagcggttctcctgcctcagcctcccgagtagctgggactacaggcgcccgccaccacgcccagctgatttttacacttttaatagagacggggtttcaccatgttggccaggatggtctcgatctcttgaccttgtgatctgcccacctcggcctcccaaagtgctgggattacaggcgtgagccaccacgcccggcctatctttagatcctttttttttctgattgttttcacattatggttatttcagacctttcctctattaaatttgatatccaccctcatttattgatgggttctatagtggtatattttagtccttagttcatttcctcagctttgtgtcttccttctcattccattttattttatcccatagtattgggattcttgatttattgcctttgtgtttttactaagtttgtctatagtataaataatctgaaggagggtgatttttgcttattttccttatatgttttcttgcagactggattttggatttttcttttgcttctgtattacctgtcatatctttcactttgcttatatttattatttaatttttttttaagacaaagtctcactctgttgcccaggctggaatgcagtggcacgatctcagctcactgcaacctcagcctcccgggttcaagcaattctcctgcctcagcctcccaagtagctgggattacaggcacacaccaccacacctggcgaatttttttttttttttttttttttttgagatggagctttgttcttgttgcccaggctggagtgcaatggcatgatcttggctcactgcaacaccgcctcctgggttgaagcgattctcctgcctcagacttccgagcagctgggattacaggcatgtgccaccacacctggctaattttgtatttttagtagagacggggtttcaccatgttggtcaggctggtctcaaactccttaacctcagttgatccacctgcctcggcctcccagagtgctgggattataggcatgagccaccacacctggcccacggctggctagcttttgtatttttagtagagacagggtcttgccatgttggccaggcttgtctcaaactcctgaccccagttgacctgcccacctcggcctcccaaactgctgagattacaggccaccacccctggccatgttgcttatatttaataggggcagtttagtgaagtggttgagttcagactcaagagtcccaatgcctgggatgtaatcctggttcttccacttaacagccatatgaattgggttaaattactctccttgtttcatgattttcatctgtaaagtgtgaatcatcatcatcatcatcattctcaccttataaggttgctgagtgggcttaataaggtaataaagagcataaaggtcttaggccaacactggcgtgtgtttgtttctaacgtgagccgcaccagtgccctgtctgctctgatggagtgtaggtgagtgttccttgccacacttcgttccatttctggtaccattggtctttccctttgagttccacttgaggctggggtattatatgttctgcttggtttgctgaaggccgaggacaggtgtttatagagtcagggtcgcgaaagggcctggcttcgagactctgagctctgtcatttcttctgaaactttgttagaggttctgttatggggtttacgccattaggtcaaagattgccctaattgtattagtccattttcacgctgctgataaagacatacccgagactgggaagaaaaagaagtttaatttgacttacagttccacatggctggggaggcctcagaatcatggctgggggtgaaaggcacttcttacatggcagcggcaagggaaaatgaggaagaagcaaaatcggaaacccctgataaacctgtcagatcttgtgagacttattcactatcacgagaatagcacgggaaagaccggccccccccatgattcaattacttccccctgggtcccttccactgcatgtgggaattctgggagatacaattcaagttgagatttgggtggggacacagcgaacccacatccctaatcctgtggaatccctgggtttggggcgaacccccagggcactcagcctggaggtctggaaagtggacctccggggggtgagccccggctcctgcccaaggccttgggtggtcagcatagatgtcttcctctcagaatttttctgtcactattccctgagcgcttgcctcccagtttacttctgtctgggctgattttcagggtttgtggacgtatttcccttcctgtgatggggaggaaggagtcagcacccattctaagctgtcccagaattttctgttgctcttcttggtcatcattttctaaagtgtatggactgagattagactcctttcttcattttttttattttttttattttctgctgttaaaattttccctggcttttattttttcaccttttgttgttgggaaagcacaattctctggctggattttattctgccatcttgatccagaaatcttgtggtgagctttaaaaaaataagagtgaaaaaaacacaaaacattcttgggccccaccctagaccttctgttgcagaggctctggaatagggccgagtaagtcatttttaaagccttcctgtggttcttcgaatcagccaggtctaaatccaccatccttataaaagaatgtttattttttcttttaccttttagtcaggctacctgaaaaacaagtcgagattttctacctgaaaacacatcagatttctcagaaagaccccataaatcaaaagtttttttaagtggtttatttgcttgttcatttttgttgttgttgttgtgggtttttttatttgattgttttgttttgagacgaagtcttgctctgtcacccaggctggagtgcagtggcatgatctcggctcactgcaacctccgcctcccaggtttaagcgattctcctgcctcaccctcccaagtagctggggcttcaggtatgtgccaccactcccagctaatttttgcatttttagtagagatggggtttcaccatgttggccaggctggtctcgaactcccgatccacctgcctcggcctcccaaagtgctgggattacaggcatgagccaccgcgcctgaacgaaccgtgttcattttttaaataacggtaatacaaatagggcaaaaaccttgtcccaagagaacagcaatggaaagttgatcttttttttgtagcagttcttgagataaatatcctttgaaatgaagttcactttgagatctctttagcttcttggtttatgctggtatttatagagtgaattatttattagtgcttttaagaagcattttgaatgctatatatgccagtattgtcaaagtgattcccattcatcagaactcgatggtcttttcagtatatcacctacaagggatctaatttaatcctgtttaggatttgactggtaaaagagaactataaagaatactggtttacctggatcaatagattcagagtcacgtaaggcttccttcaactagatataaaacttacatgatttttatggctgctaaggactgaaaggaagctacaaagaaaatgtggatttaacattttggaataatttttatatgaggtgtgaatttagaagtggtattttcaatttgtaagttacaggtaacagaagaaatgattaatatttaaaatcatgcagtagtctgggcacagtggctcatgcctgtaattccagcactttgggaggctgaggtgagaggactgcttgaggctaggagtttgtgaccagcctcagcaacatggcaagactctgtctctacagaaaataataaaaatgagctgggcatggtggtgtgcacctgtagtcctagctacttgggaggctaaggtgggaagatccctggggcccaggagttcgaggcttgcagtgagccatgatcatgccactgcactctagtccgggtgacagaacaagaccctgtctctaaaaaaattaaaataaaaaataaaaatgaattgtaaaataaaccacgcactagaaatatctcacatgcagccactacgcttttccaatactctaatcacccatatgtgctgctctcaatatatttggaaaataacccattgattatgtagtcatctgttttgcgcacatttccctttctttttttctttctttcttttttctttttttgagatggagtctcgctctgttgcccaggctggagtgcagtggcacagtctcagctcactgcaacctctgcctcccaggttcaagccattcccctgccccagcctcccaagtagtttggattacaggcatgcgccaccatgcccagctaatttttgtatttttagtagagacaggatttcaccatgttggtcaggctggtctcgaactcctgaccttgtgatctgcccaccttggcctcccaaagtgctgggattacaggcgtgagccaccgcgcccggccccctttcattcttgatccttgtgatggtgtttttaagaagtgattgtgatcataatccaactcaaagacctgtactgtgcttttaacataaaatatttctcttttttgcattgttttttctacaagggacattctttaaggaaataattgctttttcacattattttgcatctagaattattaaactctgctatgtatcctcagtatcagcagagaaagcatgtcatagttgatatgttgacgtgtatgccaacatgatctcagttttgaattaactacattctttcatcagtcggtctaattataacttttaaactattatatatacatgcctccattttttgaataattgcagcagttaatattctactggatgttatctagtcccacagaatttcaaaacaagaaggacaatggaggtcatgtcgtccaacccctgctgacgtacacattaggaatgggaagcacagactggctcatttgctgaggtcatgctgtccgggcacatggtctcttgattcccagagcaatgccctttgtactgaagccggtggcctctcccgtcatctagtagcatttgttacagatgaaaccacatgtcacttggtatgcaaaacataccatgatcaaaattgtaaattgattatcacatatttttctaggcacatctgtagatttgggggaagtagaagaaataaaagtaacatgtgaaataataaagaggaatagcaacagggaattaacaaggaagtgaggactgagatgctgacacatggagttcctactgtggattactgctcagcatgctctcgctatttcttggccgggtgcagtggcactttggggggccgaggcgggcagatcacctgagctcaggagtttgaggccagcctggccaacgtggtgaaaccccgtctctactaaaaagcacaaaaattatctgggcgtggtggtgtatgcctgcaatcccaggtactcgggaggcgaggcaggagaatcacttgaacccaggaggtggaggttgtagtgagccaagatcatgccactgcactccagcctgggaaacaagagtgaaactctgtctcaaacaaacaaacaagaaaacatgctatggctatttctctttttttttttttttttgagacggagtctcgctctgttgcccaggctggagtgcagtggcgcgatctcagctcactgcaagctccgcctcctggattcatgccattctcctacctcagcctcccgagtagctgggactacaggcgcctgccaccatgcccagctaattttttgtatttttagtagagacggggtttcaccatgttagccaggatggtctcgatctcctgacctcgtgatccacccgcctcagcctcccaaagtgctgggattacaggcatgagccaccgtgcctggctgctatggctatttctctaactatagtcacctaaagtcaggacccaggagaaatcagtcagtagaaccagtgttagtgagggttttttttttttttttctgtgattacctcttagtttttgtgtctatttgtgaatataaagaaaaatatttagattcttaacgtggagatgagattaggaagggaaactaggatgattttggctaatctgaatgtgttcaatgcaaacctgctaggcaggttaaaagtttttctagttaaatgtcttagcatcaacacccccaaaatattgtcttgacttccttcaagaagatttattcacaggtggttttcatgcgctcgctggtagagcagccacacagccttagaaacatgcccttggcactctgattttttttttttttttggagatggagtttcgctcttgttgcccaggctggagtgcaatggtgcgatctcggctcaccgaaacctcctcctcccgggttcaagcgattcttctgcctcagcctcctgagtagctgggattacaggcatgcgccaccatgcccagctaattttgtattttttagtagggacggggtttctccatgttggtcaggccagtctcgaacttccaacctcaggtgatctgtctgccacggcctccaaagtactgggattacaggcgtgagccactgtgcccggccggcactctgatttttaaacatttggacacagttttccttggatttgaagaaataatgccccaactcaggatgaccacgagagaatggtggcctgagaagaaaaacagctcagtgctacaaatgaaagccactgcacagccgggcaccgtggctcacacctgtgatcccagcactttgggaggccaaggcaggcagatcatttgaggtctggagttcgagactagcctgaccaacatgatgacaccccatctctactaaaaatacaaaaaaaattagccagatgtggtggcgtgcacctgtagtcccagctacttgggaggctgaggcaggagaatcgcttgaacccgggaggcagaagttgcaatgagctgagatcacgctaccgcattccagcctgggcaacagaatgagactccgtctcaaaaaaaaagaaagccactgcatatttacacatggtctgtcctctccaattaaataattctgttcttatttgctctgctttgagacaaaagatgaaaagctgtgcacgttcttaataacagtagcttcatcacacatgttgaaagattgaaggaaatggatttcagctgtggactttttttgtttgttttaaacttgtaacaaaagcactaatgttatctttcattcctgatttcttaattctctttctatataaagctgacatgtctgcatttttatttcaggaatctttcaaagaagtaccaacctaaaaagaactcgaaggaggaagaagaatacaagtatgtttaccattgaaaattgtcttgtaatagacacatgccattgatgactacacacggaaaggagaaatacatgtctataaaaataagttgcatttcccattcattttgtgtcagtttttaaattggaggagagaacaataaaaacataattaacttttcttatatggagtcactggacctatgccagattgtttcaattaaagtaattaggaaaactttagaatgtaattaagcaaaaacaggaagtatggaatctgcattctagagttgatttggtttggcactgtcaggagtccctgtcatgctagtcattcatccaagaaatatgtcaatttcagtcagcaattaaggcatcttaacacagaccactcaaatattacatctctaatgtatatctaaatatcctttacattagtacatatagcatgtatatgaattttggattatatcttgactaagtatcaatgaagccaaatattacattatgcggagcggttcagttttgcaaaatgaaaagtgtttcaattgtaattaattctgagccattttgttgagaacacttgatgtgtaatgaatactcaggatcctatgggaggtggatgccaattaacctgattttaattaatattttcttggtgtaaagcagaatatgaatgaatgtggccttgtgtgaaacagagtggcgtgtgttctgttccataggtatacgtcatgtaaagctttcatttccaacctgaacgaaatgaatgattacgcagggcagcatgaagttatctccgagaacatggcatcacagatcattgtggacttggcacgctatgttcaggaactgaaacaggagaggaaatcagtaagcaaaactttattctttttcttcctaaaagatggaccaaacacagtgggaatatccctagaagattaaaattaaataaaaccatataagactatgggtcttaaactcatacctttgagaatcatataaaagttatggaccccagctgggcacggtggctcatgcctgtaatcccaggactttgggaggccgaggcaggcggatcacaaggtgaggagtttgagaccagcctgaccaacatggcgaaaccccatctctactaaaaatacaaaaattagccaggcatggtggcatgtggctgtaatcccagctactcaggaggctgaggcaggagaaacgcttgaacctgggaggcggaggttgcagtgagccgagattttgcacctgtgctccaacctgggcgacagagcaagactccgtctcaaaaagaaaaaaaaaaagaaaaaaagttacagaccctgttcctagaaagtgtttctaggtctctacgtaaaatgtcaagggtccttcagacactctgaaactcatctgtggacccatattcaaaggaatatgcatccctttgaggaatttaaatatatttcagggtatcagacatttaaaaaacaagtaagtaatataatatggtgtatgctctgtggaataaatggtattaaaattagtacttatcagtcgggcatggtggctcacgcctgtaatcccagcactttgggaagcctaggcagatggatcacctgagctaaggagttcgcgatcaggctggtcaacatggtgaaaccccttctctactaaaaatataaaaactagctgggcgtggtgacgggtacccataaccccagctacttgggggtctgaagcacgagaattgcttgaacccaggaggtggaggttgcagtgagccgagatctcgccattgcactccagcctgggtgacaagagcaaaactccacctcaaaaagaaaaaaaaaaaaaaaaaattagtgcttgtaagtaggtcaaaaaaatggaaagatgtccccagttacatccattcttttcctcagctcattcattgctatctaatgaagcaaaccttattgttcctcttgccaccattatcgtcttttcataaataggttttgttggtaaccaaagagaaaaatggatgctcaaagtctattcttagtcatgattttgtcttaagggatttatctttaagccatggtctgtatcattgtacttcgattgcatgtgaagtgcggaaaaatttgttactagtaataaagtaatcacgttggccagtgataacattttttttttttttgagatggagtttcaccctttggtccaggcccgagtgaagtggtgcgatctggactccctgaaacctccgccccccgggttcaagcgattctcctccctcagtagctgagattacaggtgcccgccaccatgcccagctaattttttgtatttttcgtagagatggggtttcaccatattggtcgggctggtctcaaactcctcagaccaccgtgatctacccgccttggcctcccaaagtgctgggattacaggcgtgagccaccgagcccagccacaacagttcttttaatgccctggggatacatgagccaacaagattactatggcttctgctgaaatggaggagacattaagtaataatgacaaaagtgattatttaattgcaattatggtagttgccacaaagtaagagtagaacgtgctatgagagcatataataggatttctgatatgctcatgctctggggtcaggaagaagcttcccaagggacttcgcagttaaggccttaacaagacttgagggatgattaggacctgcctgggacaagcattcaatagagagcagccagggcgcttgggcaggaaggtgtttgaaaatgtctcaatttagttctttctaaactataaatgtgtagcatatggccttggataggtttaaaagttaggaagagataaatgccttaagatcaacccattggtttaaaacaacaatatgccaataaactgagatgaatcttcatctgttgacattagcacagtggttctcaactagggacagttttactccctactccagccacatttatcagtgtctggagacacttttggttgtctcagggattgtggctaaggggttgctactggtatctagagagaagaggccagggaggcagctaagcctcctacaatatacaggacagctccccaacgaagaatgacctggcccaaaatgtctatagtgctgagagtgagaaaccctgcactggagccctaaattagatgacagtttctgctggaccattcattaaagatttctttagtgacagaaaggatgcagtgaaacagaatactaaggttcagaatgaagtacaaatatctaatataataaaataaataccagaaatcttaacatgatcctggactgcttccctggaccctgaacttcccttgaccttgcaaaggtttatatttttttcctggttgtttcttttgtcaatgctttgtctctctccttttttttttttttttttttttaagatggagtctcactgtgttgcccagactggagtgcagtggcacgatctcgcctaaccacaacctccacctcccaggttcaagcgattctcctgcctcagcctcccaagtagctgggattacaggcacatgccactatatccggctaattttttatatttttggtagagatagggtttcaccatgttggccaggctggtctcgcactcctgacctcaaatgatccacccgtcttggcctcccaaactgctgggattacaagcgtgagccaccgtgccccctcgtattcctttgctgtgttatggtcaagttgttttatattttatttactcactgttaatgatgacttttttatagtctgtcatatctgtatttcggatttagttccttttgttaatcaaaaattacagtaatttatggaataaattataggtggtacagatacacattaaatatcttgcaatacatagtgttccttttattttaagaagaactgcaagtacaggtttctgagtcagatgttctgttgggaggagctgtaaacatcatgctcttttgaaacattctgttattaaattaaaatgacattttagaaaatcatgaaaccttttgaaatattagaacaaatatcagtaagcaaatgtgtgtatttgtgctatttaatttatttatttaattttgtttgagacggagtctcgctctgttgcccgggctggagtgcagttgcacaaactcggcttactgcagcctccgccttctgggttccagtgattctcctgcctcagcctcctgagtatctgggattacaggtaccccctaccatgcccggctgatttttgtatttttagtagagatggagtttcatcatgttggccaggctggtctcgaaatcctgagctcaggtgatccgcctgccttgacctcccaaagtgctgggattacaggcgtgagccactgcacctgacctgtttgtactattttaatataatgcttcatgagcattttttttctttttccttttttctttctttcttttttttttttcttcagggtctcattctgttgcctaggctggagtgcagtggtgcgatcatggctcactgtagcttcaacctcctgaagtcaaatgatcctcctatcttagcttcccaagtagctgggaccacaggcatatgccaccatgctcagccagtttttaaaaattttgtagagacaaggtcttgctgtgttgcccagtctggtctcaaactcctgggttcaggcgattttctcacctcagcctcccaaagtgctgggattataggcataaacccccatgcctggcctgttttttcttttctctacataatcgttgccattattttgaatgagtaaatgatgaattagcattatggtatactaaccactgtaatttaaaaaatgattccaataatattggaggcctggcgtggtggctcacgcctgtagtcccagcacttcgggaggccgagtgtttagcctcatgcttgctatagattataatagctaacctcaatggggactgctggttctccagattttacccaagatatggaccctggagcacaggaaggtgcagtgagctgggtgtgttgctctgttgcagagctggggggtccccaggctgcttccctctcggggcagtgcgtgtttgtaggcatggttttttttccagtgagtttttttcgacataccttcaaggatgctggagtaaacagtatgaacatcctcatctgcagctagtcttagaaaaagagctgtttggctgggcgcggtgactcacgcctgtaatcccagcaattgggaggctgaggcgggcagatcacttgaggtcagaagttcgagaccagcctggcaacgtgatgaaaccccttctctactaaaaatataaaatacattttaaaaaattagctgggcatgatggtgcatgcctgtaatcccagctactcaggaggctgaggtacaagaattgctcgaacctgggaggcggaggttgcagtgagctgagatggcaccactgcactctagcctgggtgacagagtgagaccctgtctcaaaaaaaaaaagaaaaaaaaagaagaggccaggcgcggtggctcatgcctgtaatcccagcactttgggaggccaaggcaggcggatcatgaggtcaggagatcgagaccatcctggccaacacggtgaaacccgtctctactaaaaaaaaaaaaaaaaaattagccgggcatggtggcgggcgcctgtagtcccagctacttgggaggctgaggcaggagaatggcgtgaacccaggaggcggagcttgcagtgagccgagatcgcgccactgcactccagcctgggcgacagagtgagactccgtctcaaaaaaacaaacaaacaaacaaaaaacagaaaagaaaagaagaaaaggagctatttaagaccttctcgtaataaccaacatttctcctttagagcttttacttttggctaccctgacttgacttagtaaacactattttattgtaaggatgattcttaaaacaacagtggaatgctatcatttctgtcttctggtgaggttaattattggcgcacacagcataacagagttagagctcaaatccaggttttctgaggccagactcagtcgccttcccactatgctgtgatgaggggctgacagcatgcttcaggtctgtcttaaaagacagggagaggccacataagttctgtgttcacagagctggagccccctgcttggtggtgggcagcgagaggaaaggatgcaagctttccagccaacaaccctgctcaggattcctggcagccctgccctaggcaggttatgaaaactctatgagcatacacttaggaatctgtaagctgaggctgattatagccaccttaggaagttgtggggacaattatgagaagacaaatatgaacctcccagcacaacgttccagtatactgataaatagatgctgcatatccagtttctcttgctgtaatcattctgttacttaatgcagaatctcatttccatcccagagcttctcgatcagggcttgttacagaaaacggagcacctataatcccagcacattgggaggccaaggtgggcagatcacctgaggccaggagttgaagaccagccttgccaacatggcgaaaccctgtctctactaaaaatacaaaaactatccaggcacagtggcgcgtgcctgtaatcctagctactcgggaagctgaggcaggagaatcacttgaacctgggaggcagaggttgctgtgagcggagatcatgccattgcactttagcctgggtgacagagtgagactccatctcaaaaaaaaaaaaaagaaaaagaaaacggagcatgtttaggccttctgtgagcaggtgtcatacggtagttgttcagtgattttaaaatgacctttctaaaaatgtgtaattgggccaggcacagtggctcacttgaagtggtaatcccagcactctgggaggccgaggcgagtggatcacttgagaccaggagttcgaaaccagcctggccaacatggggaaaccccatctttactaaaaatacaaaaattagctgggcgtggtggcaggcacctggaatcccagctacttgggaggctgaggcaggagaatcgcttgaacccgggaggcagaggttgcagtgagctgagattgtgccactgcactctagcctgggcgaccgagcaagactccatctcgaaaaataaataaataaataaaatgtggaattggttgatggcataggaaacaagaagctgcttttaacattttagacccagctactatttttcgtggctgactagaaataatgccttacttaagtaccatccttaaccatcagcacagtacagattgggccatttgatacagcggcagaatcctggctgcccaaagggatgattttgaatttacaggattactgctggatctcattactgcatatagaaagaatgtccaagttcagtggacaatactggttgaaaattactttttatctacattttgctgtgtttaaatggatgaatctctgacaagggtaagcgtgatgaaaaatggctctctgtgcaaagacgatgtttccttcctttttgttgtacggcattcttgcctttgtagccctaccagctgtttgatctttaagtcttcaaatctaactgtaggatgggcacagtggctcacgcctgtaatcccagcactttgggaggccaaggcaggtggatcacctgaggtcaggagtttgagaccagcctggccgacatggtgaaaccctgtctctgctaaaaatacaaaaattaaccaggcgtggtggcatgtgcctgtagtcccagctactctggaggctgaggcaggagaatcatttgattccaaaaggcagaagttgcagtgagctgagatcgcaccactgcactccagcctgagtgacagagtgagactctgtcttaaaaaaaaacaaaaaacaaaaatctaactgtaaaataggattactacttctacttaagtatctaggagaaaagatgctttttattctgcacatatactgtatttttgtatcacaacgcagttcattttaatgttatgaatatccattgtttttcctgatgaacaaaactgtaggctcattttggtgaaaatgttggtttttaaaaaatgcagattcacggccaggcgcggtggctcacacctgtaatcccagaactttgggaggcggaggtgggcgtatcaaaaggtcaggagttccagaccagcctgaccaacgtggtgaaacgctgtctctactaaaaatagaaaaaaaaaaaattagctgggtgtggtggtgtgcgcctgtaatcccagctactcaggaggctgaggcaggagaattgcttgaacctggaggcggaggttgcagtgagccaagattgcaccactgcactcaagcgtaggtgacagagtgagactccatctcaaaacaaaacaaaacaaaacaaaaagcagattcactaaaaagagaacctttcccccctgcaagaacttagcagtttaggttcttccttgcctgacatctgagcctgcatctgtctctttaggaaaacatgagcagtcctggaagccctggacaaggaggtcctatagcttcttcacctagtgggttccacttagggcaattgcattttcagtgagatgttcgccatctctttagacataatggaatcagtggccagtccttggggtgcatataaaaagaatattactaaaacggaattaaaggacaaaatctcacaatcccttataaatcaaaaatcctcatttttcaaagttttcttcctgatatcatttgcagatatgtataacatttaagaatattggctgggcgcagtgtcttatgcctgtaatcccagcactttgggaggccaaggcgggtggattgcttgaggtggcgagtttgagaccagcctggccaacatggtgaaaccccgtctccactaaaaatacaaaaattagctgggcttggttgtgcatgtctgcaatcccagctactcgggaggctgaggcaggagaattgcttgaatgcaggaggcagaggttgcagtgagccgagaacgcgccactgcactccagcctgggtgacagacaggactcagtctaaaaaaaataataaaataaaaggccaggcgcagtggctcacgcctgtaatcctagcactttgggaggccgaggtagggggatcatgaggtcgggagatcgagaccatcttagctaatatggtgaaaccctgtctctactaaaaatacaaaaaaaaaacaaacccaaaaacttagccaggcgtggtgggaggtgcctgtagtcccagctactcaggaggctgaggcaggagaatggcgtgaacctgggaagcggaacttgcaaggagccgagatcgcgccactgcactccagcctgggccacagagtgagactccacctcaaaaaaaaaaaaaaaaaagttaggaatattaatcctactatagctataatttatattcttcttgattctccatttaatattgtaagcattttccatgtttctacctcaaaaagtatacgtttttgtttttagatttaaaaaaaaatttttttttaattttttttagggacagggctggctatgttgcccaggctggtcttgaactcctgggctcaagcaatcttcccgcgtcggcctttcaaagtgctgggattataggagtgagccgttgtgcctggccaaaagtgtagtttaaataattggaattttttcaaagttattggaagagatattaaaaaagaaagaaaaatatttggaattttagtagctgtgcattgttctaacaaagttataatttgcctaattgtgtattgtttgatttatagggtattaccagtttttgactcatttacttagttagttgtgtaaacaatacagcagtaaactctttacttccaaagctgtttgcattgtgtgtgggctgagattacttccccaaactaaattcccagaagtgagactgtgaggtcaaagcatacatgattaaacatacatgatttatggttcttgataaaactctgataatttatgttcagataattatagtagaattacagatagaattatcaatagatttacagacttatagatagatttccaaatgtcactgaaatgatcaacatgggtgtggaattagcttatctgagatgtgggtaattcagagttgataacacatatattcctccataagaactactgtaaatgtactcttatcagcaacttttgaacattgagtcaagttattgaagaaaagagttttagaggttgtttggtgtagctgcagcctttgagtacgtctgggcttttccacagcgattaccactaatcatatatgagaaatttgtgaagatttatagctccagaaggagaaccaggaggttcttgccaacattttctggaattccaagaaaacttctccctgcaggtggaaaatatggttcattactcacaaagtgttggccagaagcagaatcactttttggcagcagttatctgaagagttctagaggaaacaattatacaatactttcagtgactcactaaaatgtttataaacctcagacctgtatgcttacagactccacattacttagaattgaccatttaaaactactcgcgaggtttctgaaatgtttgaaaatggatactgcactaaaacctataacattcttttcaaagttagatattcaataggtcctatttatggatcttatgaaggggcttaatttcctataagccagttctgcagcatggactgactccaatacatttaggaaaacaaaatgttgttataagagatgacagcaaataggtaaagcttagcatgaaggaaagcaaaaactaaaaggagtttatgtatataatctagctacttacaagtccatttctgattttttttttttttttttttttgagacggagttttgctcttgttgcccaggctggagtgcaatggtgcaatctcggctcactgcaacctctgcctcccagggtcaagcaattttcctgcctcagcctcccccatagctgggattacaggcgcctgccaccacacctagctaatttttgtatttttagtacagacgaggtttcaccatgttgactaggctggtctcaaactcctgacctcaggtgatctgcctgcctcggcctcccaaagtgctgggattacaggcatgagccaccatgcccagccatcttctttgttttgaaagaacatgtaaaagtggcattctgttcattaaaagtgggccctttcaccactgtggttgtttcacctgcaaaaccactggtctggtgacccccccgccaaaaaaaaaaaaaaagttttccagctacctgaaaggctgaggcaggaagattgctcagggccggggagttcaagaccagcctggacaacatagtgagatccaccccccaatctcaaaaaaaaatttctttttaaattttatcattcatgggataacatacttagtaaacaggacactcaaattcttttcttcatttcatgggcttgaaatgtgatcttggattttgtgtttctcctttgcaagctagaattaatgatttccttttcttctgggaattgtgagaattacttgactcacatttcgtatctcacatgattcttgttcggccacctgtttgacatctctccttagatgcctaatacagcatcaccattgcacctttgtcagcagaggactggagtccagcaagtgtgaatgatggctccagagtggtgtagtgcagtgaccctgttagcccaccccaaaacaaactttttttttttctgagacggagtctcactctgtcaccagtctggagtgcagtggcgctatctcggctctctgcaagttccgcctcccggttcaagccattctcctgcctcagcctcccaagtagctgggattacaggcacccgccaccacgcctggctaatttttgtatttttaatagagacgggattttgccatattggccaggctgatcccggagtcctgtcctcagctgatctgcctgcctttgcctcccatagtgctgggatcacaggcgtgagccaccgctcccggccccaaaaccaacttctgatcccccaaagtccttatccatgttccattccagtctgcactccctccagttctcaataaatgggacaccttttcttacactcaggtgctctggccaaacacatagtcacccagagcttttctcttttctcttacacaccatctcttatctgttaacaagtctagctggctctgccttcagtaaatgttctgagtccaagcacttctcacccctcttccacatctaccccagtcctgtgcctcattatctctcatctagaggactctgctgagcctcctaattcatttctctgcttccatgcttaccctgtggccagtggtccaactgtccatctccatgtcagagccaccaccagctctcccttagagagagtgcaagtgtaacagcctccccctgcagcagccagcttgacattgaaataatgtagatcaggccatgtcacttcctttcttttgttgttgttgttgttgttgttgttgttgtttagacggagtctcgctccatcacccagacttggaatgcagtggtgcgatctcagctcactgcaacctccgtcacccaggttcaagcaattctcctgcctcagcctcccaagtagctgggattacaggtgtgtgccactatgcccagctaattttttttgtatttttagtagagacggcatttcatcatgttggccaggctggtctcgaactcctgacctcaaatgatccgcccatctcgacctcccaaagtgctgggattacaggcgtgagccactgcatccggctgtcacttcctttcttaaatcttccaacatgcttaccgtggctggtgaggctgtccatggtcaagcccctgcctgccctccgtccctgtgccctttaccttggtctagtggcactggcatccagctgttcctcaaacagggcaagccccttcacactcagagcatctgcacttgctctgcctgcggcttggagggtattcctcagacccttgtaagttcactcccacgttttatgcaagtctctactcaaatgtcatcccagactgcccttgtctaaaatagctaccttcacctacacccatccctccttattcctttaccctgtttgtcttacttctggatccactcagtttcactgggacaggggactttgttttgtttacacagctttcctcgtgcctggagcagccctgttcacaagtgggcatgtcagtgagcatgggatgatcaccctggcactctatctaaaaatcttattgatgggagattttctgtatcagatgctgcaagtaacagctttatatcctcagaagggatcaggcaagaaaatgagccattccatgagaggaattaagatttcttgattgatttccttccttccttccttccttccttccttccttccttcctccctccctccctccttcccccctccctccctccttccctcccttccctcccttccttcacttccttccctttcttcttttctttttctttctatgtgtgtgtgtgtgtgcgcgcgcgcgcgtgtgtgtgtgtgttttaagagagatggggtttcaccatgttacccaggctggtctcaaactcctggcctcaagcgatccccctgcctcggcctctcaaagtactgggattgcggcctagggatgcgaatttcaaggaatgtgaagacaggattgctttgaaaaacagataaaagatcattgctgcatgtggagccttctgggtgagaataaccgaggaacagtgagcagaggagtagccagagaaggagggagggaaaatgctgctgcttaggcctgaccctggcccattgcctcatgctgctcagtgttacgggtaaagtcaagcaactgagcatgcctctgagaggcaggcatttagaaaacttcgaacacgttcattaagaaggtatttttactatggataaacttggaaaaataagccttgctaagtaaaaatagaatgtgtgtcccttagtgaacgtttctggtttctggtttgggttttaagtggggtacgacatacccacttgaacaggactaaggcgttttgccattacgccacatggtccatagaaatatccacgccgcttagagttctagctcaattaaaactgggagtcctgattcagacttggaagctgctcctgttcaaacccactactacgctgtgagtttagaggaaacaggatttgtcacaggcatgtttgctggaagctccctctttctttgcccttttcaagtctttttgtttctttgtttgcatctgtggaatctgagttttatttaaaattccagatggttgactgttctcagttgagtgtttattcttatgtttttttctactttttttttttttgaaagggctgttctcacatcagtgccatattttgctcttttaactgttaatggtttaatatctatataaatagcaaaaatgagcagctgttgtacctaattgcagtgtgaatactaaacattctcatagcatttgtgtgagtttgtctgttctgtctgtgatttcttgcagttcagtaaaattgtctcaaaagctttgccattgtcgtttttcttaaagttaatgcttgcttattttagattctctgtgatttttttttttttttaatctcagccacctctgttcactgggaaatttctttaaaaaatttgaagggtgatttgatctgtgtagacttttatttcaactaaaaagttgaaataagtaagtgtagctgtcaccccagaaactattagggtttgggtttttttgtttgtttgtttgttttagcttattattatgttttaaaagaaactaaaagcatcttatgacagcagaaagtaagaagcatttctctgggtctctagagatggcatttcctgtctcttttctgataggagagaaaggagctgtgatgacttcattctatggctccaaaagaagcactttttatctttgtccggagaacaattcctccttctttagtgcttgcaggcacactttttagacacacacttgctcactgtccagaaaagaaatgttcggccattgttggtaaacaacaaatacatctggcaaagctggtttatttgtttaactttgtaactgttaaaatagcttttccggtgaaagcagcgaagatagagctagaaacaaaccccagctattcaggtcatggtaggcacagagcacaaaggagggcttttgttccctcccttaatttcctgaaggatcccccagcacggatagtttttcgtatgttatggccaaataaatgatagagggacaggtactgtgaaaaaggctggggctgggcatggtggctcatgcctgtaatcccagcactttcggagtctgaggcaggcatatcacttgaggtcaggggttcgaggatagcctggtcaacatggtgaaaccctgtctctactaaaaacacaaaaattagccgggcgtggtggcgcgtgcctgtagtcccagctactcaggaggctgaggcaggagaattgcttgaacccaggaggcggaagttgcagtgagtcgagattgtgccactgcactccagcatgggtgacagagacttgttttttttaaaaaaaaaaaaaaaaaaaggctggaaggaaggaagatgggcatcacccacaatctcctaagccccatgaaatggtacgatgataattgcagttttcaggtagtggtttaataatgtggggagaggtgtggctgagcagtcttcatgagagataacttaccagtaaattcaaggtgcacaccgtgccttaaacacaaatgcatatttattatatatttacactaaggagtggcaagggaaccactctatggatttttcaatcaaaatcatccctcgtgtttttaaaataagacttttttttttaagactcttgtcttcagagatttattttatatgaaagtcaggtgacatgtcccaggcaatgcctgtcattgtctgctgggcttctgtgcatttcctgtctccacccacagcattgccccaagctggagggagctttcactttgttaaaacattcactttcagaggtgctggagagatagatcgtcaacctcgagtacagctctgaattggtgctggggttttctctttttgttcctgtctttgaatctcaaagtaaaacttttgggagcggctgcatctcttcagcaaactgcgtaactcggtgctccggcttaggaaatgggatctttctcttcgcagagaagtcacccgataaagactttcaggaccagaggtgccttccaaaaagggcacagttgagcccagatggtttgaaattgacgctctggtctctggggggtcctccctgaaagcgtggctttcagaaaacccgcttgtattttctatacgttctccactaaggtccagagtttccctaaccctgtccttggctctacttcttaattctcccacagcctggatcccttcttttctgttctatccttatgtccattacaagagctgaaaaacgaagccccaaggggctccccctgggtttgcagagaccaaaaaattgctggatagataaaactgactgcaaagaggcgcttaaaacagtgaaactcgacctcaaaagagagacaagaaaacattcccttataaaggagcactgttctaaatctgatgttgtctctgccttcccagcctttccagttgtcagctccattttctgactccgctaaatcctaggttctgacgaggtacgggaaaagctccgaggctctacctagtggacctctttgtttttatccttccttcacctgaccttctctgcagtgcacccctaacaccaatgcttaccttgtgagccagaaaacagacagcacattcaaactcagtaattgaaggaaggtcggttattaaaaggagcatttacaacgtggcggatagagtttaggaaaagcagtgaggatggttcagtaccctggagcaagtcacagtggggagctgatgttgcccccaggcctcacagggctggaggagccttccaggaatttcacagatgaggaacttctgaggttagctgcatgcggggcactgcctgactggagctgtgccctttggtccaaggacccagccaacctgtatcatctcagtgaggagaagctgcaggtacagtttcctgccctctgatcactcagaacatccttgtggcaaatctcatcagaaccagagggcaagggttcatgagatccctgcatgtcagtctctggggacccagacagggtggagaatgcacctgggaaatttgcaggacattgaccaagtcagcgatggtacagtgtggaaggatactaaaagatttaggggccgggcacggtggctcacgcctgtaatcccagcactttgggaggccgaggcaagcggatcacttgaggccgggagttcgagaccagcctggccaacatggtgaaaccctgtctctactaaaaatacaaaaaattagctgggcgtggtgggtcgcacctgtattcccagctaccagggaggctgaggcaggagaatcacttgaacccgggaggcagaggtcacagggaggcagaggtctcagtgaaccgagatcacgccactgtcctccagcctgggcaacggaacaagactccgtctcaaaaaataaaatatataaaggatttagggaactggtgattttaggtcactgaacaaaaaaaagacaccattctcttaacatttctgcatatttctagcacttccttccttgggatctttgtcttctttggtctcctggctttaactatccactttatactgaagactcccaaactggtctttagtacagaccgctccctaagctcagatccacaagtccaagtacatattagtctctctacttgtttgtttgtttgtttttcgggggtttttttgagatggagtctctatctgtcacccaggctggagtacaatggtactatctcggctcaccgcaacctccgcctcccagttcaagtgattctcctgcctcagcctcccgagtagctgggattacaggcatgcgccaccatgcctggctactttttgtatttttagtagagacggggtttcaccatgttgcccaggctggtctagaactcctgacctttggtggttcgcccaccttggcctcccaaagtgatgggattacaggcatgagccaccacgctcggctagtctctctacttgggagtctcatagaaatatcagccttaacacatgtgaaactacgtgtatgatcttcctcctcagacccacttctctcagtcttccctctcctaaagctcagactgacaacctcggagtcaccctgggcagctcattattgcacatctcatcttatctcccagaaaatcctggaagtttgggtgatcaaaaggtgcccaaaacctgacccctctcaccacctgcactgctcgctacctacaacctgtccaagttgcagtaatctccaggattgttacaaaagcctcccaccatctgaaatctttccttcacaacatcttagagttactcatcgactctggttcattcaggcaaaaaagcctacaagaccctatacaactccctctttcttctctgacctcatatgatattctccccgaggctcctccagatctggccgccaggttaacaccacaccagagcctgcctcagggcctttgcagatggccaggagggaaatttatctttatatttaaaataatctaataatgaaaacagccatgcacacaaaacactcaaaactcttactcaagtgtttatagcagcaattttctttttctttttctttttctttttctttttttttttttttttttgagatggagtcttgatctgtcacccaggctggagtacagcagcgcgatctcggctcagtgcagtgcaacctccagccccctaggttttaagcaattatcctgcctaagcctccggagtagctgagattacaggtgcacgccaccacgcccggccagtttttgtatttttagtagagacagggtttcaccatgttggccaggctagtctcaaactcctgacctcatgatccgcccacctctgcctcccaaagtgctggcctggccgcatttttcataatagcccaaacctagaaacaactctgatgtctatcaactgttgaatggataaacaaaatgtgggatagccacatgatggaataatcatttggcaataaaaaagaatggagtactgatacatgtgacaatgtcgaccttgaaatcatgcgaagtggatatgaggagataatgaacacatcccagttaccaaaggcctcagaccatgtctccattcataggaaacagccagaataaacaaatccacagacagaaacaggctccctagggctgaggaagatggagggtgacggctagtgggtacaggtttcttttaggggtgataaaaatattctaaaattggtcgtggtgatggttgtacagttttgtgaattgcttagtttaaatggtaaatcagatcatatctgaatcatatctcgaagcagttaaaaaagatgaagcgatcgctgtcttaaaacattcctgtcgtttttccaagtggcatatatgtcttcaaattttattttatttttttattttttgagaccgagtcttgctctgttgcccagagctggagtgcattagcacgatctcagctcactgcaacctctgcctcccaggttcaagcaattctcctgcctcagcctcccaagtagctgggattacaggcacgcaccaccacgcctggctgatttttgtctttttagtagagatggggtttcaccatattggccaggctggtcttgaactcctgacctcatgatccacccacttcagcctcccaaagtgctgggattacaggtgtgagccaccgtccagcctattttatttttttgagatggggtctcattctgtcactcaggctggagtgcagtggcacgatcacggctcactgcggcctcaacctcccaggcttaggtgagcttccaacctcagcctcccaagtaactgactacaggtgtgctcaccaccatgcctggcctgtcttcaaattttatacagttgtacctaaagctgtaaagggaactctgtgactgctttttttccccccaagtgaaacttgtttcatctgtgatgactattcttgttttcgtttccacattaagctttttattcccttttccttttttttttttttttttttttgaggcagagtttcactgtgtcatccaggctggagtgcagtggtgcaatcacagctcaatgtggcagtgtcaacctccctggacttaggtgatcctcccacctcagcctccagagtagctgggactatcagtgtgtgccaccacatccagctaatttttctatttttttgtagagtggggggtctcactgtgttgcccaggctgtcttgaactccttggctcaagcgattcttcttcctcagcctcccagggttctgggattacagatgtgagccaccgcacccggctacccctttcaactcttaaatttctttggagcatacatactagaggttcaatatttagatgttgtttaagtggatgaaaatgtttcctcctgggttcataagagaagcagagggtactaatcaccagtgtgttttcccctttgcagaactttcacgatggccgtaaagcacagcagcacatcgagacttgctggaagcagcttgaatctgtaagtgaacaatgcacagcaaaagaaacggctttatagattttttttttctttttttttgagacggaggctccctctgttgcccaggttggagtgcaatggtgcgatctcggctcactgtaacctctgcttcccaggttcaagtgattctcctgcctcagcctcccaagtagctaagattacaggcacacgtcaccatgcccggctaatttttgtatttttggtagagatggggttttgccatgttggccagggtggtcttgaactcctgccctgaagtgattcgcccacctcggcctcccaaagttctgggattacaggcgtgagccactgcacccagcctaggaaatgtctttatagattttccagtttcaatttaatttaagcttgagtcaatcagaaagtaaaaaacatgcacataaaaacactaatgaaacatctttatagatttttctcatttaatttgtttctagaaccattatctaaagttgagccaaaagagctcaagttgagtatttttctaaaagtcacgtggaaataataaagattagacagttttgatggaaataaatgcagattttaaaataacttctagaaattatgacatataagaaatcaattcagagaagagtattcttgggccagacacattggctcacgcctgtaatcccagcaatttgggaggcagaggcgggaggattgcttgagctcagaagctcaagaccagcatgggcaacatgacaaaacctagtctctacaaaaaaatgcaaaaattagctgggcatggtggtgcatgcctgtagtcacagcagctagtgaggctgaggtgggaggatcacctgagccgggaaggtcaaagctgcagtgagccaagatggcgccactgcactccagcctgggtgacaaagtgagaccctgactgaagaaaaaaaaaagaaaaagaacaatgctctttgggagctttagataaaattacatcttctcgtaggactcttatggtttcataattattttcctctgattttagagtaaaaggcgatttgaacgcgattgcaaagaggcggacagggcgcagcagtactttgagaaaatggacgctgacatcaatgtcacaaaagcggatgttgaaaaggtgaggtgaaagctcaagtgtgggccgggcacggtggctcacgcctgtaatcccagcactttgggaggctgaggtgagcggatcacctgaggccaggagttcgagaccagcctggccaagatggtgaaaccccatctctacgaaaaacacaaaaattagctgagtgcagtggcaggcacctataatcccaactactagggaggctgaggcaggagaatcgcttgagcacaggaggcgttggctgcagtgagccaagatcacgccactgcactccagcctgggtaacaagagcgaaactatcgccaaaaaaaaaaaaaagacaaaagaaagctcaagtgtgtctttcatttcccctgtgagtgttcatcaccgaccacccatccccaagttctcatttctaatgtagccacaaaaggcgctacatggggaatcattttcattttgtgtcaaccattgtggggaccagaagctcaagtgtggggaatcttcggtgttagaatttgagacgttttatctgttgagtcaccagggtgataaagtggagacttagactatgaacagtctgggaacaacgttccagaaggttgtggctcttaatggcttttcaaagagaaagtcaatttcttgagagccggaggagacaggacagggccatctggaagagcttggctgcttataatggttcctttagagcaatagtctcactgcttgcctgacttctaattgattcctcctggttgataacagtgaggttgtagttgaagccttgcatatttcagtcctctcaaaagcttttctctaaatggacttgtattgccaactagaaatattataaagtgtatactgtttctcattgtggctcaatatgcgttttttccctagaagctgaattttatttttattaaagtcatcaatacaatgtaaacaaaattaggcttttacataacaaggactcattcatgatgcccatggttgtttgggcattcatagcttcatgctgtatgtgggtgaaagcactgagtttttatagatttgttgagcttttgacagatcagttagagttgagtttagttgggaaatggtgtgaactattatttgccaaattctgccaaattccttgcttaaagactaggtatacgttaatattagtatgcctttctctaaaattattaaatatattaaaatacatattcttgccaggtgctgtggcacatacccctagactcagctacttaggagactgaagcaagaggattgcttgagcccaggagtccagactgggcaacataacgagaccccatctcaggagcaggggagtgttctcaatatctgtatttgatctcaaaatggagatacttactttaccaaaagacattaatttgctgctaaagttaaatatttaaaatgttattcaattaaaataagttagattagcccaaagtttcaaaagatattttatgttgaatgaggcaaatcagtgtatgtatcattcatatatgtgtgtgtgtgtgtgtgtgtgtgtgtgcgcgctaaaagaagtatatatgtatatattttagagataccgagatatggtctctttttattttattttttatgtttatttatttatttttattttttattttattttattttttgagacagagtctcgctgtatcgcctaggctggagtgcagtggtgtgatcttggctaacaacaacctctgtcttcagggctcaagtgatcctcctgcctcagcctcctgagtagctgggactacaggagcccaccacaccctgctaatgaccctgtctctaaataaataattttttttttttttttggtgtggtgtatgggctcatgcctataatcccagcactttgggaggccaaggtgagcagattgtttgagtccaggagttcagatccagcctgggcaacatggtgagaccctttctccataaaaaatacagaaaaattagtggagcatggtagcccatgcctgtggtcccagctactccggaggccaaggtgggaggattgctcggtcctgggaggcagagtttgcagtgagccacaatcctgctgctgcactccagcctggatgacagagccagaccccgtctcaaaaaaaaaagcactcagcctctaaactgtcatttcatttctgtttttttctgtagagatggtcatatcagcagcaagtaatgatagttgcatttcttttccaatcttcatgccttttgttaattttttcttatcttaactctgctggttatgccctctgttttgctgagtcatcattgtggacttcctcagcttgttcctgattgcaaagagagtgcttcaaaaggttccccattaagaatgatttttttttttttgagacgaagtttcactcttgttgcccaggctggagtgcactagcgcaatctcggttcattgcaatctccacctcctgggttcaagtgattctcctgcttcagcctcccaaattgctgggattacaggcgtcaccacgcccagctaattttttgtatttttggtagagatggggtttcaccacgttggccaggctggtctcaaactcctgacctcaggtgatccaccagcctcggcctcccaaagtgctgggattacaggcatgagccactgcgccagccaagaatgattttaatataccctttattggttaaacaattttccttttcctgtgttgccaagagcttttttttaagcttgacttattattgaatatcattaaatatttgttttgcttcctttaattcattaacgtggtcaattacattaatcagttttttttacattgagccaaattagtgttcctgggacaaattcaactagattatgatgtattatgtttttatgtgtagctgaatttattaatattttatttaagatttttcattgaaatggtctgtattcattgaaattgatctataattttcctttcttgtctgttctactttgcattacttatgagttttggagtgtttgctcttttttctgaaataatatatgtaaaattaaactcactatcccttaaatgttttatgatacttctttgcgtaaatcagttacaaactacggattccatattttattgtctacttctgggttgatcctagtgggttacctttttatagtaatatatccatttcatcataaattttcaaatttattggcaaaaagttgcccataatatgttctcaccttaatttttgctgcatatatctcccctatttactcctaataccttttttaatacttttttctttttttctggatacgttttttaagaaattatttatgcttattttattatattattattttttgtatatagagatgggatctcactatgttgcccaggttggcctcagcctcagcctcctaaagtattaggattatgggcatgaaccactgtgcccagccttaaaatcattgttactagtatcagattttatctttgtggagcctcccttttctatttttattttctatttatttaacttcttcccccaccacccccattcccctccttctccttctatcattacctttggatttattccattacccttttaaaaagttctttctttagatgcttacctcagtctttcttcttctccattataaacattaagattacagacttcccacttaagtactgttttctctgtatcccacatattttggtatgtggtattattaatgttgtccatttccagatatttgtcctttcttttactgtttaatctctcacctatgatcaatttagaagcatggttttaaatttccaaatgtatgacatatttcaacttttgttacagatatttatttatttatttatttatttattttttctgagacgtagtctcattctgtcacccaggctggagtgcggtggtgctatcttggctcattgcaacctctgcctcccgggttcaagcagttctcctgcctcagcctccctagtcctgggattacaggtgtgtaccaccacgcccggataattttttgtgtgtatttttaggagagacagggtcttaccatgttggccaggctggtctcaaactcctgacctgaagtgatctgcccgcctcagcctcccaaagtgctgcgattacaggcgtgagccaccatacctggcaagatttctaactaaattgcattatggtcctgggaaatctgtatgagtttgagtcttctctatttgttgagattcgttttatagcctagtacacagtcagtttttagaaatattctgtaagtaattgaaaataatatgtattctctagtatttttattaggccaaacttactgttttatccaaatattcctatcattaaggattttgtttttcaacttgttctaacactttctgagaaaaatgtgtaacatccttatgtcttaatttccttgtctataaaatagggacactgaggaacaggattgatgcgaatattaactgagttaatatgtaaaaggtgcacaaaaccatttatgggatgttgccagtgatctacaactattacagtgataatggtagaggattattgatgttctgtctattttactcttttattatggagttattctattaaacaaatgaagtttagaattgtaatatgttcaagtgatttcatttttcatcaataaaaagtggccccctttcccagtcaagcttaatcccctaaagtctattttacctgatgtaaaccagatatctttaagttaacattgcctggcagatctttcccatactttgactttatacttttctttgtcctcatatttacatgtgtcttttgcaaatggcatgtggctggtttctggttttttgtttgtttttttctgttttttgagtctcactctgtcgcccaggctagagtgcagtggcatgatctccactcacttcaacctccacctcccaggttcaagcgattcccctgcctcagcctcccaagtagctgagattaaggtgcctgccaccacacccggctaatcttcatgtttttagtagagacgaggtttcaccatattgccaggctggtctcgaacccctgacctcaggtaatctgcccacctcagcctccgaaagtgctaggattacaggcatgagccaccgcacctggcctgttttttgttttgtttttttgttttgaaatagagtctcgctctgttgcccaggctggagtgcagtggtgtaatctcagctcatcgcaacctgtgcctcccgggttcaaaccgttctcatgcctcagtctcctgagtagctgagattacaggtatgagccaccacacctggctaatttttgtgtttttagcagagatggggtttcaccatgttggccaggctggtctcgaactcctgccttcaggtgatcctcccgcctcggcctcccaaagggctgggattacaggtgtgagccaccacacccagccttagcttgtttgtcatgcttttcacggtattgttcaagttcactgttaaaagaaagcttactgtgattgcatccaaacctgaagatgctgtgtaaaactgcaagatagaccagcaagacttctgggttatactaaaataattcccccatataagaagtcatataaagctgggtatagtggctcatgcctgtaatcccagccctttggaaggccaaggcgggaggatcgcttaagcccaggagtttgagacaagcctgggcaacatggtgagaccttgtctctacaaaaagttttttaaaaattagcctagcatggtggtgtgcccttggagtcccacctactctggagggtgaaatgcgaggatcacttgaacttaagaagcagaggtttcagtgagccaagattgcaccactgcactccagcctaggtgacatagcaagatcctgtctcaaacaaacaaacaaacaaataaataaataaataaataaatagaaattatataagaaggtacaagtcacctgggcatgatggctcacacctgtcatcctagcactttgggaggctgaggcaggaagagtgctggaggctaggagttcaagaccagcctgggcaacatacagaaacccagtttctacaaaataatcaaaaaattggaccgggcatggtggctcacgcatgtgatgccagcactatgggaggccgaggcaggtggatcacctgagatcaggggtttgagaccagcctagccaacatggtgaaacttcatctctacaaaaaatacaaaagttagccaggcatgatagcatgtgcctgtaatcccagctactcgagaatcgcttgaacccaggaggtggaggttgcagtgagccgagatcgcacggctgcactccagcctgggtgacagagggagactcagtctcaaaaaaaaaaaaaaaaaaaaaattaaaaattagctgagcgtgatggtttgcacctgtaatcccagctacttaggaggctgaggtgggaggatcgcttgagctctggaggtggaggctgcagtgatcagtgatcgcaccactgcactccagcctgggtgacagagcaagaccctgtctcaaaaaaaagaaaaaggtacaagtcgtagtagagaaaactgtgaggttcagagcagactgtgtgtaattatgaatgtgtgtttcgtggatctttaatctatggtgatggaggcctagacttaaagtgggttctcccgaagcgggcattacctgggttcattaccaagctgcattaatgtcagttttcaacttagggtttggactccacacatgctctgagttctggctgtttgtggttcagaaatttccaggatgacttttttctttgtttttctccctgaggccagatccaaggcagttttaacttttaaaaagtgcacttgctgaatccaaaggtgattttaggacttttaacttgtgctgccaaattgaattgctatcctcaactatttgaatatttccaaagatctagtactttttcttacactgggagcatcgttttgctatttttatgaaagtgccacttacctcctttccaaggatatgatgaattacccaattttggcatcacaaacattgaagctgagggagcagcaatgtctaaacattgaaattcttaagttattttgctttggatttgacttgaaacactgtaatttcccaaaacacccagtactttgactgttctatcagttttttactttgttgcctgtgaaggcttatgtcagcgtcaagctaactggaggcagttttagttcttatcattatttaatgtcatctcccattatgatttctgacagtctctgaatctaacataaatgtttctcccccagttcccgcaaatgattaaattatctaattgtattcaaagcagcgcatcctcctttttttctagcagccagccacacagcactgggaacggtaagcctgtgcttacaaaagccttatttgtacatgtgaactttgtcttgtgcttgatacaattgatatgaactataagcatacgttcattttttaaactacctaggatcctgggtataagcctgattttcttttctttttgagagttaatgcccagatatggattgaaaccacattttgaaaccacatttttattagcactgtgttcactgtttttttttttgttttgtttgtttgtttgtttttactttttgtggtgatcgaggttttgctatgttgcccaggcaggtctcagactcttgggctcaagctatcctcacacctctgcttccctaagtctggcaatgcaggtgtgagccaatgtgcctggccagcactgtgttcaaatcacctccattcatccacatccatgctcagacttcggtacgctttggcattgtgttagatgccagcgtgtgaccagatgtttagtagttcccttataagacagtatatgtcatccttaaggcacccagtttaattaaaagtaagtttacagtataaagtagatataagaaaaagctagcagtttttatctctgggcaagagtgcagatttggatgccatgaggatgccatgttccttagaggaaaaatgaagagaggaaatcagcttaattgaacaatttttattggcagggaaaactcaaggaaccatgcagtctctttttcttctttgacattttgcagctgtcatagagttttgaacttgaaggctttgaatgagctcgagtgatttggaattagttaatctgggtttgtacaagaagcagtacatgttgggataggtcatcctgcagctcatgacccctgtgtttcagctgaaggtgaaacaggctcccctgctgccctttcaacgaggtggactagacatccttactctctgttttgggatattgagagggaaactgcaaaggaacatgggaaaattataccatgtccgcatcttactcttgtaaaaaaaaattaattaaaacaccgagataaagtattctttgccattcttctcagaggtagttactcttaaccccttgaggtatgtccttctgaacccttttaaaacagctgttttgggccaggcatagtgactcacgcctgtaatcccagcactttgagaggctgaggctggcggatcacttgaggtcaggagttcaagaccagctggccaaatggtgaaactctgtctctactaaaaatacaaaaattagccgggcatggtggcacgtgcctgtaatcccagctattcgggaggctaaggcaggagaatcgcttgaacccaggaagtggaggttgcagtgagctgagatcatgccattgcactccagcctgggggacaagagcaaaactccgtcttgaaaaaaaaataccaaaaatacaaaaaatgagctgaatgtggtggctcatgcctgtaatcccacttactcaggaggcggaggcagaagagtctcttgaacctgggacggggaggttgcagtgagccgagatcacgccactgcactccagcctgagggacagagcaaaagtccatctcaaaaaaaaaaaaaaaaaaaaaaaaaagacaccaaaataggtgttttgtatgagcaatagcacagacaaataaattaaattaaataggtattttgtttgtttgtttgttgagacagggtctctccctttgttgctcaggctggagtgcagtagtgtgatcaaaacttattgcagcctcaacctcgtggattcaagtgatcctcctgcctcagcctcccaagtagctgagaccacaggggcatgccaccatgcacagcgtagagacggggtctccctatgtgttcccaggctggtcttgaactcctagcctcaagtgatcctcctgcctcagcttcacaaagtgctgagattataggtgtgagccaccacacctgcccccctccttttttttttttttttaaatttaagggaattctagtagaattatgacttcatggacttatcttttaaaaaatgcaactcagccaagtgcagtggctccctcctgaaatcccagcactttgggaggctgaggcacgcagattacctgaggttgggagttcgagaccagcctgaccaacatggagaaaccctgtctctactaaaaatacaaaattagccaggtgtggtggcgcatgcctgtaatgtcagctactcgggagactgaggcaggagaatcgcttgaacccgggaggcagaggttgcagtgagccgagatcacgccattttactccagcctgggcagcaagagcaaaactccacctcaaaaaaaaaaaagtaactcactggtgggattcctaagtcgtgaagtattcacatgtatccattcattcccttgcccgttgttcactgactatctactggcaaggtatgcgggtatagatgccagcacataatcacacgatccttgactctgaggaacttgccttttgttttttctttttttcttttcttttttttttttgagacggagttttactcttgttgcccaggctggagtgcaatggcgcgatctctgctcactgcaacctctgcctcctgggttcaagcaattctcctttctcagcctcccaaatagctaagattacaggcgcctgccaccacacccggctaatgtttgtattttagtagagacgggatttcaccatgttggtcagactggtctcgatctcctgacctcaggtgatccacccaccttggcctcccaaagtgctgggattacaggcgtgagccaccgtgcccagcctgttttctttctaatgtttggtttactgtattgtgaattttcccacttgcccacccaaacaactcttgaatggcattctggtgacaaagactttaaaatcacggtttgtctgtcactctgctttgaaataacaccatgctatacaaacttggatgagaggctacacctaatctttgtgttctgatagtgtagcaatgggtttagtgtggtattgggatgagaaaggaaaaggttatcaaaatgagtggaatgtgaactaatatttctgaacagagagaacagtgttttctaaatgcatgcattaaactgagttcatccatgtcaggcaatgaataattccctttttctaattctcccttgccttatgactgttggctcttacataatttctaaatgcaaaataggatattgtctaacagaatctgcagttagtggttacaaacagctgcagaaattgttagttaagttcaagttatgttttttaaacgccagtaacaatttcttccttttcttatcggtctagtttcatttaacttgtatggttctttttctgctagagtctcaatttatgagccgatgttttccaccaaaagttaatggtgcctcttcattctaattcattgcaattaattctgagtactggatggccagaagagctctctatacagtgcgagaggtttccttatttctgactaattaggagtttttattatataacccgatttgaggaaatgctttaaaacttaagttaaaatctgaccatgagcactgaacagtgtatcagtttctttgggagtttgccttccattttttgtatacagacttctcgaagtatttggctttgaatatgattaactttttaattctacatatagatgtccctgttgtgaagcagaataggaaatcctgagttatttatgaattaaagtagaattctgtgatgtaaattataaaaaataaaatttcatttctggttttttgtttttttttgaaacagagtattggtctgtcgctcaggatggagtgcagtggcaccgtctcagctcactgcaacttccacctcctgggttcaagtgattctcgtgcctcagcctcctgagtagctgggactacaggcgtacgccactacacccggctaattttttgtatttttagtagagataggctttcaccacattgcccatggtggtcttgaacttctgggctcaagtgatccgtctgccttggcctcccacagtgctgggattacaggtgtgagccaccatgcccagccacatgtaatttttaatgtgttatatattctataatagaatattttaaagagaaaaagaaagttatagataggaatctgtcaattttaagcaagaatgaaggagtttactttaaatgatgatcagtttgataattatcttaagaaaacaaacgaaatttagtagtttaggttttcttcggttggaatcagtgttgccaactctgtgaagccaacaggatggagttggctctattctaagtgaagccagctgcgtagcagagtgttaaatttttttaccatttggggaaacagtctctagcacaatgaccactttagttattgtacatataaggaattgtactattgaatattttggttaccattgctgtagtactaggttgacatctttatggaacatgttaatatcttcagtgccttccccacgtttctgtttcttctaaaatgtctgactgtagtcatctgaaggaattgttcactataacaatttagagaacatttttttttaaaaaggaagtggttagtataaatgcaggaaataaattttgcaactgcagcttaatctttttaggcttaaaaaagtttcaaatgctttttattgcaaagaagagaaaagtataaagaattttattataagtattaccaaaaatggatattgttgctataactgttcttttataagtggatcaaggttcaaatgaaagattctagaaaagacacgtttattattctcttctttatgtctgtggagtttatatttactcctaaaagcataattattaacaagcctataagttaatgtacaaaatagcaatcaagcagcatcgttctcataccctagatctgaagatagaaatgaagaaatgaattccctgaatatatatgtatttatttatgtgtgtgtgtgtgtgtttagcttcaacacttggcacttagtatgtggcctgaactgttctaaaggcttttgtatggtaagtcatttaataaggtattttaattttcaatgatagtaaatggcctagcccatggctaagagcttgttcctgatctttgtattacgtggaagtgggttcaaatcttgtttctgtcgcttacaaatggcatgacatgtggcaacttacttcatctctggttcctgttctgtaagtaaggatgcatatgcacctcaagggctgggtgtgaggtttcagtgggtgtgatgtatgtgtagtggcctatttttgaactgcaattgattggctgacactgttattgccatctgtattttgcctgtatccttctccttgcattatttctgcctccttcctcctcatctcttaccctttagtctactttttttttttttttttgagacgcagtctcgctctgttgccaggctggagtgcgggggcatgatctcggctcactgcaacctctgcctcccgggttcaagcaattctcctgcctcagcgtcccaagtagctgggactacaggcgcccaccacgacgcccagctaatttttgtatttttagtagagacagggtttctccaggttggcctggatggtctcgatctcttgacctcgtgatcctcctgcctcagcctcccaaagtgctgggattacaggcatgagctaccgcacccggccatatttttaacattctaggcattctgggcatctagacattcaacaagaatatttatttgacaaagagtgtgaaacaccagtaggactgtaatagatacctttcatgaagtccccagttagcagactggagagagaaggatgagagaagcatgagacggagagagaaggaaaacttgagtcagttggggaataaggtagagtatgatatgtagcatgccaacttgtgtgaagatcatcagaacgatagcaggttttttttttttttttttttgagatggagtctcgctctgtcgcccaggctggagtgcagtggtgcagtcttggctcactgcaagctctgcttcccaggttcacgccactctcctgcctcagcctccctagtagctggggatacaggcccccgataccacgcccggctaatttttttgtatttttagtagagacagggtttcaccgtcttagccaggatgttctcgatctcctgacctcgtgatcctcccacctcagcctcccaaagtgctgggattacaggcgtcagctaccgtgcccgaccacaatagcagtttaaaagcaattaggccgggcgcagtggctcatgcctgtaatcccagcactttaggctgccaaggtgggcagatcatttgaggtcaggagttcgagaccagcctggctgacatggcgaacccgcatctctactaaaaatacaaaaattagctgggcatggtggtgcacacctgtaatctcagctacttgggaggctgaggcaggagaatcgcttgaagctgggaggcaaaggttgcagtgagccaagatcacgccactgcactccagcctgggcaacaagagcaaaagtccatctcaaaaaaaaaaaaaaaaaaagcaattaatgattgctctacatacttgccagtgagataaaggaaaaaaaattataaaaacgatcaatgaggtccatcatatatgaaatcacctggtcctttcatcagcaaaacactaggagctcagcagttgctcctgcattctgcatctgaaaaaggtctgtgcagactgtaggttgttgggacaggcctgaagtcggaatcaggacttgaacctgaaggatatgtagaaacagaaaagagaaagcgccactgaggtagagacaacttcatccagggcactgagggagcatgttgccgacgttgacctgcctgccaggacaggggactctgtgggacctagctggagaagtaagatgagaacagtttgtgaaagatatttaaagccaaatgggccggatgcagtggctcatgcctataattctagcattttgggaggccaaggcaggaggattgcttgagcccaggagttcaagaccagcctgggcaacatagtgagaccaccccacccccaccccaaccaatctcagaaaaaaaaaagaaagaaaaaagccaaatggcaggatgaatgtgaccccgataaaatgctattgaacctactcctcaaaaaacctacactggaaagtgttttatattttccaaagggcttttagtcctctccatgtttcctttatccctttatagataaatagggtaaacctataaaatgtgaaattaccattagcctaaagtggccctgctggataaggtacagccaagactgaagcatgtttctgtgcctcaagttcagtgttcttgccagtttaccattcagctttactactggattgtattaaataagctccttactcttagccaccgctttttcctacagaactaggcagataatagacatgtgagactggcaggttgaggtaagatgacaaatagctattagcacagggcctcagtatcaggacccaataaagagaggtgggggttgtactggcctaggaggcccaagtcagacgtaaagggggcggccattattcaccatccatttacacatctgtagctgtgtggtaatgcagaccaagtgttgtcacatcttccatgtcactccttttggagttaaatttccttcttcctggaagatgggttgttttaatttttttccatgagagtttgtgactggtaaattttctttatttgtttgaaatgtctttatttttgtcctccctctaatgtgatagtttagctagatatagaattctaggttgacaattgttttctctaaacatttcatttgtttgttttggttttggttttttttttttggagacagagtctcactgtctcccaggctggagtgcagtggtgcgatcttagctcactacaacctccgcctcccaggttcaagcgattctcctgcctcagcctcccaagtagctgggattataggtgcctgccaccacacctggctaatttttgtatttttagtagagatggggttttgccatgtcagccaggggggtcttgaactcctgacctcatgtgatccacctgcctcagcctcccaaagtgttgggattacaggcgtgagccactgcacccagcctaaacttttaaaaaatatcattcaggccaggtgtggtggcttatgcctgtaattccaacactttgggaggccaaggtggaaggatcacttgagcccaggagttcgagaccaggctgggcaacgtaggaagaccttgtctctacaaaaaatgaaaagtcacctgggcaggctggtgtgtgcctgtcgtcccatctactcaggaggctgaggcaggatcattgcttgagcctgggaagttgaggctgcagcgggctgtgatcataccactgcactccatcctggttaacagagcaagactctgtctcagttaaaaacaaaatgtaatttcattgtctatcattgtcagttgttcttgggaatttgacattctatttaatagcatttatttatttatttatttaagatggcgtctcgctctgttgcccaggctggagtgcaatgacgcagtcttggctcactgcagcctccacctcccatgttcaagtgattctcctgcctcagcctcccaagtagcctggattacaggcgtgggccaccatgcacggctaatttttgtatttttagtagaagcagggtttcaccatgtttgccagactggtcttgaactcctgacctcaggtgatctgcccgcctcagcctcccaaagtgcggggattacaggcgtgagccaccacacccggccttgacgttctatttaatagcatttctttgtagatattttgctttctcctgtagttgtgaagaccttgtatttccctttggtatccatggcatcaatatgatgtttcaaagcacagactttttatttttaatttattctgtttggggttcctagaggatttgttcctttcataaatatatgaaaactcagtgtggtggctcacgcctgtaatctcagcactttgggaggccgaggtgggcagatcacgaggtcaagagattgagaccatcctggccaacatggtgaaaccccgtctctactaaaaatacaaaaattagctgggtgtggtggtgtgcgcctgtagtcccagctactcaggaggctgaggcaggagaatcgcttgaacccgggaggcagaggttgcagtgagccgagattgtgccactgcagtctagcctgggtgacagagtgagactccatctaaaaatatgtatatatatgtatatatatatatgaaaactctccagcattaactcttcctatattatgttgttattaatattgttggttttgggattcatattagatgtgtgtgaaatttctcattctgttccccacgcctcataacttctttttcatagatttcatttcctatatattacatatgatgtaactttgtcagctacttcatgaagtctcttcaaattattctatttaactcatctattgaattttaaaatttcaatgactgtattttttatttctagaagttccattttattcttttgaagatatacctgatctatatttagagcatcttattattttcttatgattccttttgcatcttttactaacttaatccttcaaaatgttgttttgttgtcattgttgttgtcgttgttttgttgttgtttttgagagagggtcttattctgtcacctaagcccaggctgaagtacagtgggacaatcatagctcactatagcctcgaactcccgggctcaagtgatcctcccacctcaacctctggaatagctaggactacagctgtacaccaccatgccctgcttatttttaatttttttttagaaatggagtctcactatgttacctaggctggtctcgaactcctggcctcaagtgatcctcccacgtcagcctcctctagtgctgggattacaggtgtgagccgctgtgcctggcctgttgttcttatattttctttcacattgttcttttagctcaggttctcatttttcttactatcgcatcagctctcatggtggtttatttccttgtgcatttatattattactaccttttttgtatgagcgtaactttgacagagattgttttttctccgggaatcttataaaaacaggattgtagaagtatccccccagtgaggttttatagtgtttctgccagacaacctggaactaatttttatgttaatttcttggcttggggaatcttgcaccatctgtactagcacaggctgaagcttttgtattttagaagacactcttcccccactccacagcttgagacctacataagcttcctggtcttctgtggtcacaagaagtttctctaattatttcccatctaaaagaagacaaaactaacattgaggttagtgcaggaagggcttatagtcttacatatttacttcattgacagtatattactgaataacatgtgataacatatgcaagatttttttttttttcgggacggaggcttgctcttgttgcccaggctggagttcagtggtgcagtctcggctcactgcagcctctgcctcgtgagttcaagcgattctcctgcctcagcctcccaagtatctgggattacaggcacatgccaccatgcccggctgatttttgtatttttagtagagacggggtttcatcatattggtcaggctggtcttgaactcctgacctcaggtgatccacccgcctcagcctcccaaagtgctgggattataggcgtgagccactgcccccagctacttgggagactgagacaggagaatcgcttgaatctgggaggtagaggttgcagtgagccgagatcatgccactgcactccagcttgggtgacaagagggatactctgtctcaaaagtaataataatcaatttcaaacctaccataatgaaaaactcaagtctcttgccaatgaccatgcgtgagaaaccaggggggaaaggggggccaagtcttggaaaccatcatttacatcttagcaggatctccaagctcgtgctgaatttctaccagcctcccttggaggcttgccaacatcatgatgagaaatatcagcattggcctcttctcttttagcagaaattgtcactcaccttgagtaaatagatatttcaaataaggcaaccagagcatagggaaacagaagaccttttcttaaaactgtttagcaagtgaatgggccatgtgggattgagatgctggtctcactggctatctttctgcattctctccttctatttcagtggccctccacctacaatactggagctagaaagttgtaagactgttttcaaaaaaaaaaaaaagagtcaggaaattgctggaatagttcaagcatatttctttggttaacttattttgaagtttttctctgttttgtattctagctgcccttataatttatcaaagacagactcattgttttggcaagctcctggcctggaagtctccaacaaaaactcacagcactctatctgaaaaggaatttttaaatgcattcttagtcttgaaattgaaaatatattctagatacaacagtttgctgggaaatttaaacaatgccgtttatcatccaacaactttgctctggacaaagagctttttcatctcttccttagtgtcccttctactccattagcttttcagagctttttttaaaaaattaattaattaatttatttttttgagacagagtctcactctgttgcccaggctggagtgcagtggctcaatctcggctcagtgcaacctctgcctcccaggttcaagtgattctcctgcctcagcctcctaggagcagggactacaggcacgcaccaccacactcgactaatttttgtattttttagtagagatggggtttcaccatattggccaggctggtctcaatctcctggcctcaactgacatgcccacctcagcctcacaaaatgctgggattacaggcatgagccaccgcggccagccttttttaaaatttggttcacttctaggttatataaagcatatttctttggttaacttattttgaagtttttctctgttttgtgttttagctgcccttataaatttgtcaaaggcaaactctgataaactttaaaaattcttttttttttttgagacggagtctcactgtcaccaggctgaagtgcagtggcatgatatcttggctcactgtaacctctaactcctgggttcaagcgattctcgtgcctcagcctcccgagtagctgggattacaggcacgtgccaccacacccagctaatttttgtatttttagtagagacggggtttcactgtgttggccaggctggtcttgaactcctggcctcatgatccgcccgcctcagcctcccaaagtgctggaattacaggcgtgaaccactgcgcccggccaactttaaaaattcttaaaagttatatatacatttacttcatcttattaaatatggctttacattgttaaaacaggatatacatagctcatcaaaagtgtgacataatatttaaccaatgatttgtttgtttcaaattattttaaattattggctattataaacagcactgttggatatcttttgttattatatcattaggataaattttcagaagcagaatttttgggtcaaagactagagtaaaattcgtttgattccttttatttttttcccccccttgagacagagtctcactctgtcccccaggctggagtgcagtggcgtgaccttggctcactgcagcctctgtctcccgggttcaagcaattctcctgcctcagcctcccaagcagctgggactacaggcatgtgccaccatgcctagctaatttttgtatttttactagagacagggtttcatcatgttggccaggctggtctcgaactcttgacctcaggtgatccacctgcctcagcctcccaaagtgttgagattacaggcgtgagccaccgcacctggccattagttttattcctaaccattgacaaatcctagagaaatacgaataggattttcagggatttccaacaggttgctattttttctgttctcaaaaatacctagaaatagaaaataatatccagtggcctctacctcatttgtgtgctgtaaaaataccagtgcttattctcatttacctggccacgtctgaaagtcatgatcctctagtggttatcaggagctggaatgtgcagaaacttttatttcttaaaccatacaattctgtaagtttgaattacctacagcaaaatttttttttttttaagcaggagaaaaaagaacaaaaggtggctagataacacaggttgtgaaagtggcaagtttaattttgtccacaaaatgaggtccatggctcaggtagtttggggaggagggaatcgggatcggtgctgtgctggattcttgctgtgtccccagcctctgggtggccgccaggcccatctgccagtcaggaggagctgctgcaggttgctgctcactgaataatgattacaggcatcctgtctgtgggcaaaagagtgcattcttagaggaaagggaataaaatctagcttgagcccccatttccatccatcctaacatataattggtctcttcttgtgataacgacattaaatactaaagatgcagctgttccaaaaaacattgactgttgtttgggctaccagcgatactgtaaaatattccacatggctttccccaaacttttggtgacaaaaggtgggcatttataatttgttatatcctttcaacaaaggaaaagcagctttccaaaagctctggacactgctgctttaagtatcaggttgctgcaaaagtaattgtggtttttgcccttccattcaaatgacaaaaactgcgattacttttgcaccaacctatatagtttatcatttaaggaacagcaatgtataaaactgagagatctggggccatgttaaaaacttagtaagtctctttatttattcattcgatcaatgtataaatagaaccagtctatatttgctcatctagttaaaaggtcaaaagccataggcagccttgaaaaatgatgcaagagggctgggcgcggtggctcatgcctataatcccagcactttgggagaccgagacaggcggatcacgaggtcaggagatcgagaccatcctggctaacaaggtgaaaccccatctctactaaaaatacaaaaaattagctgggcatggtggtaggcacctgtagtcccagctactcaggaggttgaggcaggagaatcacttgaacctgggaggcggaggttgcagtgaaccgagattgcaccactgcactccagcctgggcaacagagtgagactccatctcaatagaaaaagaaaagaaaagaaaagaaaaatgatgatgcaagagtggtaagatgcaaggttataactcggttataccacatgcctcatgtgaaatgagcaagtttcttagtacacttgtattctctgcttatgacaattgagacactgccaagagtgttattctccttaatattttgaaatattaaggaaaaagtaatattgaattaaacaggcctggcatatggtgcctcatcatgcctgtaatcccagcatttggggaggctcaggtggcagggtcgcctgagcccaggagtttgaggctgcagtgagctatgatggtgccactgcactccagtctgggtaacagagggagaccctgtcttaaaaaaaaaaaaaaaaaaaatgagctaaacaggaaatagccacacatttaggccatgctaataatctaaatttagctaactgaatggatgacggtatttttgtctttaaacccattaggatttcaaaatattgggctacagttcagtttctaaaatattgttttctttatttagaaactgcaactctgaccttttaggcagtatggcttagttccataatgatattgagaatggactatgttaagaattaccaagaagtgggctgggcgtggtggctcacatctgtaatcccaacactttgggaggctaacgcaggccgaggcaggcagatcacttgaggtcaggagttcgagaccagcctggccaacatggtgaaacgctgtctctactaaaaatacaaaaattagccgggcgtggtggcgggtgcctgtaatcccatatactcaggaggctgaggcaggaaaattgcttgaatctgggaggcagaggttgcagtgagccaagattgtgccactgcactccagcctgggcgacagagtgagactctgtctcaaaaaaaaaaaattaccaagaagtgaaatcatgtataagccatacatccttaggtctgtttggatttatttgagggagattcccaagggtttgtcaaaaaattctcaagtttaaattctgtcttcctgttggacaacaaaagcagcgtagatctgattctaagacgtctgtgacccagcctaggcagcgggggttattctggactttttagaacattatcttgaaattctgtgacactgactcgttgcaagtaaaacaagccaactctctgtacatctttctgccctgtagtaatattgctgtaagatgcagtgtctttattctcagaatgggaaatttaatttaattgaaagaatagcttatggtctggtttagaatggaaacactatctctttgaggtaatagttgctatttttagactgacttttaaaaagagatgagaagtcatgatgcttattagctccacttagtcttagacattaggagatagtctccaaaataccattaactgttatcccaaataagttctccaaaatacaagatattttaaaggtatttttgtcataatgagtaattgattcaacactagttttagcgactcttaaattccattgtcaaataaacaatttgctaaacagaaatagattttccatagtgaaatttggttagaacaatggtgcattcctaggccagagtttcagaagtggatattaattcaaagcagctggatgcagggactgagaaaaagacagtcctgtctttttgctgcggctttggagaatctgatgtatcacagtattttgctgtttttgaaggtttccctatccttgtagtcagtgagagtgagtgagactgtagaaatagatcgtcctttgcaattgtatgtccaagcatggaagaaaaactcctggagagacagtgttcctttaacataaaaggcagaccgtctaaaatatactttgatttattatcttctacacagcttactttctaggctggactgtagacatgttggtccttattcagcgtcttccacagttcacgtctagggcccttgttatgttttcaggattactgcatagaaacagggcaaagggcattatgaatctattaggaggtaatatgcttacagaaggaattatgcagctaaagctaaaacatgattagggattctgtggagctacaggaagaggatcacagccacttccaaccaaatggtgctgggtggggtacctctggcaccagctttcatgggtaaaatattctacttgggtaaaatattctaaaatattggcgtgagtggatttattgtcagaaagcttttatctgctctcatgggttgtgtgtgtgtgtatgtgtgtgcgtgtaagtacatgcatacatattatatataatgatggcattctgatgtgatgcctgtttgagatcttaagttattttaaaaactcacttagatagaatcttcaaaataaacggggaaactacctcctgagctcttgctgttctttacagaagagatgaagaaatcccccactggatttttgtgagactttctgaggaagccttgtgaataaaatagagactgttttagaaatttgaggtctaatgggaatttttttttaaacattcatagcgaaatgatacatgatgaaactcagcagctgaagagttaatagggcatttgtgctggacgggctcggggaacagatggaatgcatgtaggtgggaaagctattatttaaacagaggagggctactgtgtattggaagggggtggatttttgagggtagctgggtacttaacattttggggctagactaatatatttactagtggacacaggaagaagcagacgccaaggcatatggtcaggaagggagttaacaggccaccaacaaagaggaagaatgcggcagctgaaatcaactgagggtagatgaaaagaggataaaatggcaccgacagatccaaaggccttaagaaactcaaaaaacctcagtaataaggaaatgtgtttggaaatactgatattgttaccttcatttgggaagtgttcacgtgtgaatagggaagaaaataagggaagcaactgtgaattaccttaggctttcaccagatgagtatgagtaaaatgtgtgaagtgaaattcaggttaacccttcaagtcacataggcaggaaaccaataaagaagattgacatgaaaaaaaaagccaatactaaatgttcccatcaagaagaaagtggaacaaatacttcagctttcctctcatgtgtttcttttcttttctttcttccttcctttttctttctctctttcactttctctttctttctctttcattcgtttgttctttttttttcttttcttttttttgagagagatagtctggctcagtcgcccaggctggagtgcagtggtgcgatctcggctcgctgcaacctccggctcctgggttcaagcgattctcctgtctcggcctcccaagtagctgggactaaaggcgcccaccaccacgcccatctaatttttgtatttttagtagagacggggtttcaccatgttggccaggatggtctcaatctcttgacctcgtcatccacccgcctcagcctcccaaagtgctgggattacaggcgtgaggcaccgcacctggcctctttcgttctttcttccctttctttctctcttttcttcttttctgtctttttcttgtgtttctgattttctttctttcatgattaggtcttaattttcttgtttttgtttgtttggtgttttgttttgttttttgaaacagtcttgctctgttacccaggctggagtgcagtggcgcagtcacagcttactgtatacttgacctcctgagctcaagcaatcctcccacctcagtctcccaagtagctgggaccacaggcacacatcaccacacccaactaatttatttatttatttatttattattttattattattattttttgagacggagtcttgctctgtcgcccaggctggagtacagtggcgcgatctcggctcattgcaagctccgcctcccgggttcacgccattctcgtgcctcagcctcccgagtagctgggactacaggcacccaccaccacacccggctaattttttgtattttttttagtagagacggggtttcaccatgttagccaggatggtcttgatctcctgatcttgtgatctgcccacctcagcctcccaaagtgttaggattacaggcgtgagccaccgcgcccagccaatttatttgttattattattttttgacacagggtctcgttctgttgcgcaggctggaatgcagtggtagtgatcacagctcactgcagcctcagcctcccaggctcaagcaatcctcctgcctcagcctcctgagtaactggaactataggcacataccaccatgcccagctaatttttgtagagagaggggtctcaccatgttgcccaggctggtctcagtttcctgggctcaagcaatctgcccacccgagccttccatagagctgggattgcaggcgtgatctaccacacccagccaggtcttagttttctgaaacattggttcagtaaaacaaaacaaaaacaagcaaacaaacaaatagttgccctggttatgttggaagacagcctatttcctgttgtgtttctggcttactgcagtgaatttgccaggtcacttaaagaccaaaaaccctatcttcatctggcaggaggtagttttttgccttgtgtggacctcaaattgtgttagagattcacaagattatatttatcaaaataacaccacaatgctatgtgaatctaaggtggtattaacggcacaacctcttgtacttctggatgactttagaatttatagacattcctgtttgaactttaaaatccattctgcaactagtcaacaattgttgccccttttttaggtatgtgatcaatcagaatatgaattagagaaaaacaaatgtgtaaattattgattttttaggagaaaagcaatgcagtaaaacataaaatagcactcctcaaaaaacataaaaagcataaagaagttgccatacttattccctctttagcatatatactaaatataaacatgctagagagctttagaaaagtctccttaggtcagtggttcatatgcctttttagtgcatgaaccccattgagaactgggtttaaaaattcatggatttcccagccaggcaccgtggttcatgcccataatcccagcactttgggaggctgaggcgggtggattgcttgagtcaaggagttcaagaatagcctgggcaatgtggtgagacctcctatctacaaaaaaaatacaaaaattagccaagcatggtggtgcacgcctgtagtcccagctacttgagaggctgaggtaagaggattgcttgaacccaggaggttgaggctgcagtgagccaggatcgtgccactgcactccagcctgggtgacagagcgagacctggtctcaaaaaaagaaaaaaaaaaaatgaatttctcatcccctcctcaaaaaaaaaaaaatgtgtatatgagatgagcagaggttcccacaagggtcatccaaataatgtaaattggcccaagtgcagacagtatagaatggtgtgtcaaactagaaggtacacgccacgttaaggcagtagggaatggtggaggtttatacaaactaggatgcacattgcttacctaaagtcaattcaattcagaacattaaaaagcacccgcggaatacatttgaggtaaatctggcccctaggcatcccagtgtgcagttctaggcttttattgattgcacccaggcttttatctatggtgtataaacgtaggagtattcttgtttttgccctaaggcccgacaacaagctcaaatacgtcaccaaatggcagaggacagcaaagcagattactcatccattctccagaaattcaaccatgagcagcatgaatattaccatactcacatccccaacatcttccaggtaagtcctgaacatctctcagatttcatgttttatgctttgctttccttagaaacatgacacttctgaatcgtgattgctgggtttgtattctgagtctgagtctttatataattccaaatttccactaattttttttttttttttttttttttttgagacagagtcttgctttgtcacccaggctggagtgcaatggcacagtctcggctcattgcaacccctgcctcctaggttcaagtgactctcctgcctcagcctcccgagtagctgggactacaggcacgtaccactgggcccggctaatttttgtatttttagtagagacggggttttgccatgttggccaggctggtctcaaagtcatgacctcaggtgatctgcctacctcggcctcccaaagtggtgggattacaggcctgagccaccatgcctggcccttttttttgttttgttttgtttttgttttttgagacagtctcactctgttgcccaggctggagtgcagtgcacaatcacgacccactgcagctttgaactcctgggctcaaaggatcaagggatcctccaagttcagcctcctaagtagatggaactacaggcatgcaccaccatgccctgctaatttttaaattttttatagagatagggtcttgctgtgttgcccaggatggtctcaaattcctggactcaaacaattctccagccttggcctcccaaagtgctaggattataggcatgataaatcattttttaaagcatctagatcaagcattgactagcaatatgaatgaaatataataatctcaagattaatcaataactttgcaaatttctatagtttgcacctgcagccaattatttgtcagtcttttttctttttttctttttttcttttttttttttgagatggagtcttgctctgtcacccaggctggaatgcagtggcatgatctcagctcactgcaaccttcacctcctgggttccggcgaatctcctgcctcagcctcctgagtagctgggattacaggcacctgccaccatacctggctaccttttttgtatttttagtagagacggggtttcaccatgttggccaggctggtcgtgaactcctgacctcaggtgatccgcccgccttggcctcccaaagtgctgggattacaggcgtgagccacagcacctatttgtcagtcttaaactatgattctgtgattaatgctgtctttgccaaagggatgattgtggttataaaaatgccaacttaactatagaagtcaaagcagcattcatagagttataggatttaaacaaatgacagttctttcttttggattgttttcttttgctcatgttaggttgtcaaaaatggtatgagaaaagatagacatatgttcttccattttacagattttttgcaactttgagtccaattgtagaaaaaataaataatatatttgcttcttggtgtctacacacacagcaaacaagtccttgtaaattatagttggaagatacactagcatgtattgggctgaggcagttaattaaatactgtgcttttggtaaaaggtaaagtagtagattaaagatggagaaaacgtttgaggtagattacaaatagtgttagtaataaaactattggccaggtgtggtggctcaagcctgtaatcccagcactttggaggcctaggcaggtggatcacctgaggtaaggagttggagaccagcctggccaacatggcgaaaccccatctgtactaaaaatacaaaaaattagccaagtgtggtggcggggggagggggggtggggcctgtaatcccagctacttgggaggctgacgcaggagaatcacttgaacctggaggcagaggttgcagtgagctgagatcacaccactgcactccagcctgggtgacaagagcaaaactccgtctcaaaaaaacaaaaagaaaaacaaaaaagaactattgagtttggcattcttactaaaattagaatggaattgtgcaaagcatatatttgggcagcctaacatgtctagcaatttataaaataaatgtacagctgggtaatatggaggctccgtgtacttagagccgctctaactctaacccattttttcctcaaagagaacttgttagaggtaacaatgctgccgaaaaacaactttgtttaataataatggaccaaacttactttatacaaaatctaatgttgcagaaaatacaagagatggaggaaaggaggattgtgagaatgggagagtccatgaagacatatgcagaggttgatcggcaggtgatcccaatcattgggaagtgcctggatggaatagtaaaagcagccgaatcaattgatcagaaaaatgtaagtattgccatttggacttcattgataactatttgcagatccattatttctccccatcccctttccatttgacctcatgtcatcatctcatggtggatggttgcttttggtggtcacacatgctctgtgtcttggatttagctgtataattccttttttggtaaacacatttaagtggtaaattgtccgagacatgacagaattgaattgaagtatttcctggaaaaaaggtaaaggctttgtttcctctaaggcagggtttctttctctttttctttttctttttctttttttttttttctttttgagatggaatctcgctctgttgcccaggctgcagtgcagtggcgtgatcttgggtcactgcaacctccacctcccgggttcaagcgattctcctgcctcagcctcctgagtagctgggactacaggcgcccgccaccacgcccagctaatttctgtatttttagcagagacggggtttcaccatattggccaggctggtctcgaactcctgacctcaggtaatccgcccgcctcagcctcccaaagtgttaggattacaggtgtgaaccactgcacccggccaaaacagggttccttcagcacttttgacattatctcaggccagatcatttttcttgttgggggcatttcagaatgtttagcagcatcctggcctctacccagcagaggccagtagcactccccgagttgtgacaatcaaaaatgtctccacacattgtcacatgtcctctgggagggcaaaagcttctctggttgagaatactgctttagggcagtgttctccatttgaattcctagagacctatttctcaaaaaaatataaactagaacaccagcataggcttttactgttaatttgaagacacaaatattcaacataaaagttatgctgctggctgggcacagtggctcacatttgtaatcccagcactttgggaggccggagcgggtggatcacttgatgccaggagttcaagaccagcctggccaacatggtgaaaccacatctctactaaaaatacaaaaattagctgggtgtggtggtatgcccctgtagtcccagctactcgggaggctgaggcacgagaattgctggaactcaggaggcagggattgcagtgagccaagatcatgccactgcactccagtctgagtgacagagcgagactctgtctcaaaaacaaacaaaaaaatcagaaaacaatagttctaaattctaaaagctcggatgaaaagctcaaatgatggcttttgagaagaatgaaaaaagctggccagctgtggtgactcaagcctgtaatgccagcactttgggaagccgaggcaggcggatcacctgaggtcaagaatttgagaccagcctggccaacatggcgaaaccccatctctactaaaaatacaaaaattagctaggcatgatggcacatgcctgtaatcccagctactcgggaggctgaggcaggagaatcgcttaaacctgggaggcggaggttgcggtgagctgagatcacgccactgcactccagcctgggtaacagattgagactgtctcaaaaaaaaaaaaaaaaaaaaaaaagctactaggaaaaaagttattatcaatcagtacaatttcgttagttatcatctgtatgagatcatcataattcattgtttttttgagatggagtctcactctgtcgcccaggctggagtgcagtggcgcgagctcagctcactgcaacctccgcctcctgggttcatgccattctcctgcctcagcctcctgagtagctgggactacaggcgcccgccaccacgcctggctaattttttgtatttttagtagagacggggtttcaccatgttagccaggatggtcttgatctcctgacctcgtgatccacccgcctctgcctcccagagtgctgggattacaggcatgagccaccgcacctggccaattcattgtttaaaaagtgtttgcatgcttctgaatgtatttatatgcttgtgggtataatttcaggattcacagctggtaatagaagcttataaatcagggtttgagcctcctggagacattgaatttgaggattacactcagccaatgaagcgcactgtgtcagataacagcctttcaaattccagaggagaaggcaaaccagacctcaaatttggtggcaaatccaaaggaaagttatggccgttcatcaaaaaaaataaggtactgatggttggcgtgaaatgagttttctaaggtgtggagattttgacttgatcttttagtcttagaaaaactaagatcctaaacctgtagtttcagaatgcaaaagaagaagctagtgtgctaccttatgttgagacagtatttctttttggtggtggtatctttgccatggccctgtgtcttatttcagatgcattatcctcgtaccgtgactcccacactaacagagtactgacctctccaccgtttcgcctcatgcctttccctccttcctctcctagactgctggttaccttggctgggagagaggatgtagtgggacattcctgtaacactttatccgcacatctactggaaatcgttaccatgttaataacttggttttgaattcatgttaacatgtgtacccatgaacatttttcattttcttttcatagtgcgatacataggtgcatgacagcattaacctggggacgtagaatatgatcaaggcagcattactgctttaactttagaatgacttactatttattaatttaaacagactgctgtttccacaaccttagcattgaaggtctttcattttctcccatcaagctatgttagtttaggtaatgtagaaatatttaccctctggcttaagctggtttagagtaactaactagagctatagtttgcatgggaaagtctgcacgagcttcttgtcagatatttcttgctcttctgtcgcattacttactaaacctcccaactctcatcatattcttcatttaaccacctcctacatgttttcttttggaccatggcctaaaatttaattgtttgtgttttacttgcgttggatttcaaatattatttgatgcttatttttgttttgtgtcttcttgtttctgatttttactctgtcacggctccatctcttacatgtagcttatgtcccttttaacatccccccatcagcctccccctccccctcctgcctctgcctcaccctctgctgttcccaacggcccccagtctcccaagcagcaaaaggaacccctctcccaccgcttcaacgagttcatgacctccaaacccaaaatccactgcttcaggagcctaaagcgtggggtaagttctgctccggaatcctgtctctctggcgtgctttggttgcatgtttggttctgcataactaattttgtttgtgaatgaatccattgtgttttcccataacatataaaaaagttaaaaaaaaaaaaacaaaaaccattatagctagaaagaaaagccagaaagaggaagaaagaaagaaggaagcatggtggttggaagaaaggagaaaaccaggcagcccagagttctttctatttgtttctttcttttttttttttttccagacagagtctcgctctgtcaccaggctggagtgcagtggcgtgatctcggctccctgcaacctccacctcccgggtttaagcgattctcctgcctcggcctcctgattagctgtgattacaggcatatgccaccacgcccagctactttttatatttttagtagagacagcatttcatcatgttggccaggatggtctcgatctcttgaccttgtgatccgcccgcctcggccttacaaagtgctgggattacaggtgtgagccactgcgcccggcctttttcttttcgtttctagtacattttggaaggactttacccctcttcctctttaaagcatccaagtcatgcattttctaccttaattttaccaaaaaaaaccacttagatttcatttctaaaactagcgacctgagactgggcgtgatagttcacatctgtaatcctagcactttaggaggccaaggcaggaggattgcttgagctcaggagttcaaaaccagcttggacaccatagtgagacccccatctcttaaaaaaatatataaaaattaataggacaagcgcagtgtctcatgcctgtaatcctggcactttggaaggccgaggcaggaagattacttgagctcaggagttcaagaccagccagtacaacatagtcaaaccccatctctaaaaaaaaataataaataataaaaacataaaactagcaacctatgagatgaggaattggaagtcactgtgtaagtcagaaaatattgccttaataactactgaagcaatgtgagtgtaatgaagatacttgcctgagctatgcctcagggtcgaaaggagaagagtcataagtcacagtggtttcattcgctattttagtgagattatataagatgttgataaaatatctgttgattggaaggggcctgatgcagaatttctctttaaaggatgaaacaataaaagcagctgacacttactgagcacttattgtgtgcaaagctctgttctgtgtgctcatttacttttttccagccaccctatgaagcccaggtagtactcatatttccttattttactgtaaggaaattgaggcataaaaaggtgaaggtgggaagatacagagccgggatttagatccggggagtctgattacagagtctgagattctgtgacatccacattcagggagaaactactatattgactcgtaagtggttgttattaagattgaagtccgctgtcctcattaagattgatgtgcgcttacatcatagagataatggaattgatgcagccatccaatgtagataccagtttcgtttacagagaaagattggcataaagcaatgtgtagattcccaaatcattctcaatggccagtctagtctaagccttcccaaaatatcttttataatgaatataatgagtaaacagatctttagactgggcccagtggcccacgcctgtaatcccagcagcgttaacatatccagtaaggtttgctccttttttttttttttaaatcctaccctgtgggagttgcaatacagttgtagtggaatgctttcttgtacaaacataagttttacttttcccttctcctggactctccagtcaactgacggttgggttacttctttccaaatagtacctggtagtgccccaaagccagaggtggatgccatcctttcttgagtgtcaactgacacattggcctgggaaaagattctaaactacaactaattaactagaggagagatgtccttcttagacttggaatcaacagctggttactagtaaaagaataacagtagtcattgttaacctgacaatcgtatttccacaaaaacaattctgtgtaaaaaagaggcctggcacagtggctcatgcccgtaatcccagcactttgggaggccgaggagggcggatcacctgaggtcaggagttcgagaccagcctgaccaacatggtgaaaccccgtctgtactaaaaatacaaaaattagccgggcatggttaatgtccggctaattacaggcgggtgcctgtaatcccagctactcgggaaactgaggcaggagaatcgcttggacctgggaagtggaggttgcagtgagccaagatcacgctattgcactccagcctggacgacagagcaagactctgtctcaaaaaagaaaaaaaaaaaacccatgaaaaaatagccaggcatggtggcatgtgcctgtagtcctagcggaggctgggatgagaggattgctggagcccagccagggcaacagagtgagaccctttctccaaaaaaaaaaaaagtaaagaatgtaaattcataattgataacaagtttattatcaatgctttttaaaaataggggacaaaacaatatttcctcacatgcagagttcctttaatatgagaatctcaaatttatagttggtagaattatcttgaattatcttgctttaatgctatctatcatatcaggttaagaattagaaatgtaatttcctaaagatgtgaaaaaagccgttggtggaaggcagaatacagcttcaaaagtggatgatggattgagctgagatgtataattaggacttgagtaatctgcagcttcttggctcaacgatgctggcgtttagaactccactcattgttaatccaagaatttccaagacaagggtgtttttgctagactgaaagtttcatatgaactgtcagttaacccatctctgccgctttaccaagcactcatgtgttatatttatatattatctctgtatttttttggactctcatgatgaatattcatgattgtttaccatttgtttatgtgtctattccagttttctcttaacattacacagtctgttggccaaaaatggtttgtgaatctgtggttcatgatattctctaactatttagaaaaagaccaaagaattcagtaatcaataaatgtaagaaaaggatggttagaaaaagataagctgggcgttgtggctcacacctgtaaccccagcactttgggaggctgaggtgggtggatcacgaggtcaggagtttgagaccagcctgaccaacatggtgaaaccctgtctctactaaaaatacaaaaattagctgggcatggtggtgcacacctgtaatcccagctacttaggaggctgaggcaggagaatcgcttgaacccaggaggcagaggttgcagtgagccgagatcatgccactgcattccagcctgggtgacagagtgagactccgtctaaaaaaaaaagattaacacttaaaacagtgaaatgggaatcggaaactggttcttttgatgatttaaaggaaaatctctgttttaccataatcagcagtatgaattttatttcttactcctcaaacgtgtgctcagcaaatctttgttaaaaaaaatttcccaaatgatgtgtttattttcctgaggttaaaccacatacatatacccactagaagcaatcgtaaagaaatagagaaatagttttgcttccctcacttttggtcattctgttcttagggtcagaattaatgttccttcctctaggacatagcagtgcaaaaaaagaggaagcacaagctcaaaaagcaaatctaaagtttggagaaatagatttcatttttaagcagtctcaacatggatcttgcatgggacatccatggcatggctgacagcttccgtgaccaacatggtacagcccttcctaccttctcatttattctactttgtaacttaacagcattatgccaacgataatttaactagaaaaagttcctgagagaataacaaatctgtgattttattatgtcttttatcatgttttgcagctttcagattcagatgtcaataatttgtttctatgatcagagtatataaatcccatgcaaacatatctcagcataactgattttgtttctaaataattaaacaggataaaatgttatttgttgtaagctgttgacatttgtaaggaaattttgtttcactgaatatgtttagagatgccgccagaacattaaccattgtttcatttttatgtaagttgaagaaaaatgaaactagatagcatgttctccatttgcagtctacaaaggggaattttattgcttaaattaaagtttcattttctggcctgtgcaagagacttttatatctaaaatatggatgtacgtttttcatattttagagttcattgtatggaaaaataccatcaaagttgaccaaaagattttgaaaatccttaccagttgtttgtcatatgttaaagtcttatggttaattttatttattttatcttgttctcttgctggttattggcagactcagtctttctgttttcacaaagaactcatgaagaggacgatagggaaacccacgtatgcctttgaggctagggactatgttgtaagttcacctgtgatggccaggtcatacagtcatggcacagccactaaccccattcacagcaccaagactggggacccagaggcacttgttatgcttccacactacgaaatgaaattcttaattgagagaactggacaccaggaaaaaaaaaaaaaaagaaaagcctaattgtataaattcaaccatacggaactttatccgaaaagcttgcatgaataaaggaagcaaactttctaataacagtggtgagctgagcttgtttttttgtttttttttttgtttttctcttttcattctagttctggtaaaatctttaaagggactgtgactgccgtctgagatgtcattgggtatgactttaccgcagaatttcacgcataaaacacagctgcagtgcgtggtcacgggagagtgacgctcttacagacggcagtgtagctcagtcacccatatccatgtttgtaacaaatggatccataagggagttatgccctaaagcttggagaacaaacaaacaaatcaaggaagcgtgagcgatctcctagcacagtaaaatgattttgcttctctctatatatatttattttcactgtcccctttctttgtacttgaggttagtactgtgactgtccaataacacatggactcgcctgggctgtgttccccatgtgttattgacgcttgtggctcccacggctctttaactgtcgcctgaaactgacagctttttaattcttcaggtgtctagcaatgcacttaatgaaatcttcaaaattattattttagccaatgatttcgctttctaattttaagagaaattctaattggctggcttacaacttcagactgaaaaccagtatataatgattaaaaagaaattccacgtactgtgatggcacttcttgtattaatagatcatccatcacaaataaagtcgaatttgtctgagaatttggtatttcctattcaatggggatttctgttcaatcctaatgactcgtttttactatgaagtgttaataatcttcctatacaatattttgaggtgagaactctgtctgtggaatgcttaagaaagaatatataactttgcgtaaagaaagtagccgagtagagagcaaatagtgtatctagttgaaatgttagttctttgaattagcaatgtttagacaataatgtgtgagaaaatatctgtatatgatagtgtgccttgtaggaaagatacttggagttttctgctgtgcaccataagtcttgtctgtgcgtacaatgaattccagttgtgataagtagatctatgctcaagttcacaggtgggctggaatcactgtagactgcccatgtcagacagtcaggaatgtgactgtatgtaccattttccccctgcaaaagtttgtctttctggttctttcctttaaaatctcatgtttctatatagggacaatttatttaaaaggttattttttatttacaaggaagtgtcaactttgaatcaatcttaaattaagaattagttttttaggctgtgtgtggtggctcacacctgtaatcccagcactttggaaggctggggtgggtggatcatttgagctcaggagttcgatatcaacctgggcaacatggtgaaacccccatctctaccaaaaaatacaaaacttagctggacgtggtggcacgtacctatagtcccagctactcaggaggctgaggtgcgaggatcatttgagctctagaggttgaggcttcagtgagctgggattgtgccaccatgcaacctgccctgtctccaaaaacaaaaccaaaaatcagcaaattgataagtaaataaatactttaaaaagagcagtcacagctgggcacagtagctcacacctataatcccagcactttgggaggcgggcggatcacgaggtcaggagttcaagaccagcctgaccaacaaggcgaaaccccgtctctactaaaaatacaaaacattagctgggcgtggtggcaggcacctgtaatcccagctactcaggaggctgaagcaggaaaatcgcttgaacctgggaggcggaggtggcagtgagccgagattacgccactgcactcctgcctgggcgatagtgtgagaccctgtctcaaaaaaaaaaagagcagtcacagtggataattctccaaataacccctgtggacagggctgagtttcatagaaagcatcagcagacaccctccacggagcaaggggtggcacacacttctcgggtgggagagaatgttggcctctagcctggctgcgagaggcattctgggtcctgcaggtagtttcttagagcaatgctagtcagccctttgttaccaattcaccaatttcagactttgccttcatgtcaatgtttatatttattagagctccttaagattaaaatattactttcctgtcatggaagtaattggtgttcagacttgttttcgtctgtataaaactttccatgggaaatttggagaacaaaaggttgtgtgattatattttttcttttttttttgttttttttttgagatggagtttcactcttgttgcccaggctggagtgcaatgcgcgacctcagctcactgcaacctccgtctcccaggttcaagcgattctcctgcctcagcctcctgaatagctgggattacaggtgtgcaccaccacacccggctaatactgtatttttagtagagacagggtttctccgtgttggtcaggctggtctcgagctcccgacctcaggtgatccacctgccttggcctcccaaagtgctgggattacaggtgtgagccactgcacccggccctgtattttttcttttatagtcattatgtgtcactgactataagcttactttaatttacatctaggctgaggtggccagtacaggcctgtaacagaaaccctccttttctatctgatctttggctctggcaatgtggagcctaagaaaaatgttattagggagcagcccttcttgtgaacttttgcacagatctgctacaagtcatttttataaatcagcgggtagacgtgtgtgttattttaatatggcggaactgaccaagttcctcttcttctgatgtgttgttgtttttttttctctttctctctctctttctctctatttttcccatacctctccaatttttacatgaagctttctctcaagctggtaagcacaattgttccatgcatgtcctgagtctaatcaggttttctggtgtgtcttttatgaatgctatgccatgcacaacgtatcttcaaagttaacttggtttgtgtttctcttacgtgtgcttttgttggtgtttccttattagacttcttggatacaaaggtccagaatctaatagaggtgatcttaatcttttcaagttgctaagaaaattaacatttaactcacgacttggtgttattcctggggccttgagaggaggacaaatgttaaagtgtctatataaatattaacgtaaaggccgggcgcagtggctcacgcctgtaatcctagcactttgggaggccaaggtgggtggattgcctgagctcaggagttcgagaccaacccgggcaacacggtgaaaccccatctctacaaaaaaccaaaaaattagccgggcgtggcagcgtgcgcctgtagtcccagctacttgggaggctgaggcagagaactgcttgaacccgggaggtgaagggtgcagtgagccgagattataccactggacttccagcctgggtgacagagcaagactctgtctccaaatatatatatatgaacgtaaatattaaatcttggggggtgtctgttggatcattttgaataaaagtaaattaatagttgaaaaatgttgctattagagaaccatagaagtagatgaaaaaatctgggagcctggaggagctgtgcaggaatgatcccagccagcagctgctacccaggtttgaggccacctgtgggaatggaagactgtggaatctttatggtgcgacgtagatatgttggtgccttgtgcatagctgattcaagaggccacaagatgatttcatggacagtgaaaagagcctcctaagcctttttagaattattcactcagtgttttgtgtcgtttctacttaattgtatatgcctagtcaacagtcaaactaatcattaaatttattaaaagtaactaacataacctataactatacttcaaatatgtataatagtttcatagtcttctcaaactccacagctaagaatatcctaaaataatggacagtgatcaactgtgacagttctactaggagtaagatcagcactataagcacactattgataacctaggatagtattttatggtgagatatatatatatatatatatatatatatatatatatagacatatgtatgtatatacataattttttcaacatgacttagtatttggtaatggacccaaccttaaagaaaaagagtattttattaaattaaataaacatttcttaggctgtgaaataaaatcctgagaagagtctttgattaaggtctctacatgaaggaaagagatctagatacttaaatgaactacaagttcatctgcagtatgaacttgggagaaactggatctattgactaggaggccttctcagctgccagggtttccttatttccctttattcattgtttgtctgggtgctaggagcaaaaggtaatatttttaggcagtctttctgtttgaaatacaaattattttaccaacttggtattgaattgttgctttatatcattaccttgaaggcaacaaagaagtgaagcgctggctgggcacggtggtttgtgcctggaatcccagtgctttggaaggctgaggcaggaagattgcctgagcccaggagctcaaggttgcagtgagctatcattgcgccactgcactccagcttgggtgacagagtgagaccatgtctgaaaaaaaaaaaaaagacaaaagaaaaaagatgtgggaccaggtgtggtggctcacgcctgtaatctctgcactttgggaggtgggggcaggcagatcatttgcgcccaggagttctagaccagcctgagcagcatggtgaaacctgactctacaaacaaatacaaaaattagccaggcatggtggtctgtgcctgtggtcccagctatactggaggctgaggcagaaggattgattgagcccaggaggttgaggctgctccagccttgggtgatagaatgaaaccctgtctcaaaaaaaaaactataaaacaaaacaaaaaacccaaaatctgaaaaagtagtattacacggagcttgtgctattttggggtggggggaagctgtcaacaagcaagggtttgatttttttttcttttaggagacagagtctcgctctgtcccccaggctggagtgcagtggcgcgatctcggctcactgcaacctccacctcctgggttcaagcgattctcatgcctcagcttctcgagtagctgggattataggggcgcgccaccacacccagctaatttttgtatttttagtagagacggggtttcaccatgctggccaggctgatctcgagctcctgacctcaggtgatccgcccacctcagccccccacagtgctgggattacatgcgtgagccaccaggcccggccaggtttgattttattagtacatagaacaagcttctcttacagaactccagccacttaaaacataggtacatgtatatgaccctctcttcccataccaactcctcctgttatggcctgtctttgttgttttcttatctatttataagttatcagtacaatgtgttttactgatagatttctttgcacctgtttatacacctgcacagaggctaaagctgttgtccagtgtggtagccactaccatatgtagctgttgagttttttgtttttgtttttgttttgagatggagtctcgctctgtcactgaggatggagtgcagtggcatgatcctggctcactgcatcctccgcctcccgggttgaagcgtttctcctgattcagcctcccgagtagctgggattacaggcaactgccatcatgcctagctaatttttgtagagacagggtttcaccatgttggccaggctggtcttgaactgacctcaggtgatccgctcacctcggcctcccaaagtgctgggattacaggtgtgagccaccacgcccaaccgctgttgagttttaattaattaaaattaaataaatttttaaaaattcagttccacaatttcaccagccacatttcaaatgcttcacagccacacatggcttctgtgttggaaagagcggccatagaacattgccatcactgtagaaagttctgttggactcacagcacatagcaaggctcagcacatattaacgaggtgaatgttgaccacttgccagattttgtgacttttttttttttttttttttgagatggagttttactcatgttgtccaggctggagtgcgcagtggcgcaatctcagctcaccacaacctccacctcccgggttcaagcgattttcctgcctcagcctcctgagtagctgggattacagacgggcgccaccacgcctggctaattttgtatttttagtagagacggggtttttccatgttggtcaggctcgtctcaaactcccgacctcaggtgatccacccgcctcggcctcccaaagtgccaagattacaggcatgagctaccgcgcctggcctagatttcctgatttctgaagcagtgtatcttagcattgtgttttgctgtattccagcttttaaaaaattctcagttctggaaaacatgctcatttgataaaactcaaaccgtttttcctctgctgttccactatgacaatcaacagagaagatttctgtgaccaaatatgtggaggcttccgctatatatcaagcagcagacactagctgggtgtcctttaattcaattccattctgatgctatctacctggagatagtggctgatcctgggggttgagggctcagtcctgaaggactgccccctccttcccaccagtcgcaagtccaggcttccaggacttctgatggactagcttcaagttggggttcccctgaccctctctttgggttcaattaatttgcaggagcagctcacagaactcagggaaacacttatatttactggtttgtttttgggttttttttttttttttttgagacagaatctcgcccgtcgcccaggctggagtgtaatggcgtgatcttggctcaccacaacctccgcctcccaggttcaagcaattctcctgcctcagcctctcaagtagctggaactacaggcgggtgctaccacactcggctaattttttgtgtctttagtcgagacagagtttctctatgttggtcaggctggtttcgagctcctgaccttttgatctgcctgcctcagcctcccaaagtgctgggattacaggcgtgagccactgcgcctggccaccacatttactggtttattacaaaggatattattaaaaatacagatgaagagatgcttagggcaaggtgtgggggagggggcacagagcatccatgccctccccgggcagccactctctaagaatctccccaaaaaccctgtcctcttgggccttttatgagacttcatcagatagacatgattgaagcatggacaaccatgtggaaatgagattggtcagaaactgcctgatcacatcctaatagatcaggtagtgacacccagcagggcctgtctgtgcagattcttcttggcctccctgtgcagccttccttccttcagggtatggggcacgatcctcatgaagcctcttgaatgaggatcatatggccacaatcagaatcctgccttgggcaggtgaaagaagggcacgtggaggtcagatagagagattctgttttctgaggtcgaaagtgctctgatattttaacaaaagactgtagcaagaggccgcgcatggtggctcattcctgtaatcccaggacgttgggaggccgaggtgggcagatcgcctgaggtcgggagttcgagaccagcctgaccaacgtggtgaaatccataatccagaataatccagttttcaaataaatattgtagcaccatagtatacggaaaacaagtctttatttttatattaaaggttagttttgcttcatcttagatttagagtcaaacttctttggtttgctattaggaatagtcacttccattctggtttcactcaactcttatctcacacacacacacacacacattagagagtcagtcagtgtgtctgatgggtgtgtctttgagaacattagctgaaaggtctttgcgtggccttttgtggtcaactatttgctgaatcacacacttcccagcacatcaccctggcattttatcataatcagcctaggaacccagtcataagcccacgtgtaagctgcttggcaaatgcaacttgcttctggaattacattaactgggtctcctctttctaccctgccccaagcctgccttgcccttgtttcaaaagaattgagggtttaaagtaaaatctcttttctaaatgccctggcttatccctggttatttgaagaaatttctctctctctctttttttttttttttttttttttttgagatggagtctcgcattgtcgcccaggctggagtacagcggcacgatcttggctcactacaacctccgcttcccgggttcaagcaattctcctgcctcagcctcccaagtagctgggattataggcgctcgccaccacgcccagctagttttttatatttttagcagagacggtgtttcacattgttggccaggctggtctcaaactcctgaccttatgatccacccacctcggcctcccaaagtgctggaattacaggcatgagccaccgtgcccagcacgaaatttctctctctttatgaacatagcctcacttaagtaaaagcacttgacatcacaatttagccagagctttctaacaagtaagcatatgtcaaagcctgaaactgttgatactttctccttaaagctcatgcacagtgtaaagagagcagctgcttctgaaaagggaatcaagatatcaaaatgcagttcttctgacagattaaaaaccgcggagatgagtttcgtacactgtggaaaactgattttgaggtcagggagggcattctctctgaactctgagaggcttcctaaaggcctaaaagaagtcactaggctgggcgcggcggctcatgcctgtaatcccagcactttgggaggccaaggtgagcagatcacctgaagtcaagagttagagactgtggaaaattagccgggcgtggtggcacatgcctgtagtcccagctacttaggaggctgaggcaggagaatcgcttgaacctgggtggcagaggttgcagtgagctgagatcgcaccactgcactccagcctgggcaacagagtgagactccgtctcaaggaaaaaaaaaaagtaactagacttttagaggcagcagagggaggcgtgcatggggtaaggagaagagattttttttttttaatgttctttttcacccacattctctgaggaatgtgatgtcccatctgtcactttacaggggtggagacttttggcctcagcctgtgtgaagagactggcaggaatactcacgctagggaaaaggcagcagctaggcgtgcagtggttgatggggtttgtattaaggaaacataaatttcattaacacttcagtgttgccactgacattgatggtaacacttggtaggaaaaggaagaagactgtctcaaaatgtgtttttcatggattctccctagagtcagaagtatctcttactctcctttactgtagcgttgctcactgctttttctggggcattctggccagcatccatggaactgggaatggtttatgggacttatgcagtttgcatgcattgatttttgcatctcggctgggtgtagtgggaaagagcttaatctatttcatgaagccacatgcagatgtctgcacccccccatggctgcaggctttgctttcagccttctttcaaggaaagcctggggctttctggtttctcatttatatttgtgtctgcagggtgcaacaccggaggatttcagcaacctcccacctgaacaaagaaggaaaaagctgcagcagaaagtcgatgagttaaataaagaaattcagaaggagatggatcaaaggtatagtgcatcaatatgacttattaagaaattcaaggccaggcgcagtggctcacaacctgtaatcccagcactttgggaggctgcggtgggtggatcacctgaggtcaagagatcaagaccatcctggcctacatggtgaaaccccgtctctactaaaaatataaaaactagccaggtgcagtggcacacgtctgtagtcccagttactcaggaggctgaggcagcagaattgcttgaactcaggaggcagaggttgcagtgagccaagatcatgccacttcactccagcctgggcaacagagcaagcctctgtctcaaaaaaataaaaaataataataattaaaaataaaataaaaattaaaagaaaagaaattcaagttcaggctgggcatggtggttcacacctgtaatcccagcactttgggaggctgaggcaggaagatcgcttgagtccgggagttcaagaccagcccaggcaacatagcaaaaaccctaaaaaaaaaaaaaagaaaaaaactagccaggcatgatggtgtgcacctgtagtcccagctatttgggaggctgaagtggaaggatcacctgagcccaggaggtcctggctgcagtgagctatgatcatgccactgcactccagcctgggcaacagagtgagaccctatctcaaaaaaaaaaaaaaagagagagagaccagccttggcaacatagtgagaccccatctctacaaaaataaacaaaagtagctgggtgtgatggcacacctgtagtcccagctacttgggaggctgaggtggggagaattgctttagcctgggaggtggaggctgcagtgagctgtttgcttaagaatcaaaacccagctgggcacagtggctcacacctgtaatcctagcactttgggaggccgaggcgggcagatcacaaggtcaggagatcgagaccatcctggctaacacggtgaaaccctgtctctactaaaattacaaaaaattagctcgcatggtggcgggcgcctatagtcccagctacttgggaggctgagacaggagaatggcatgaacccgggaggcggagcttgcagtgagccgagattgcgccactgcactccagcctgggtgatggagcgagactctgtctcaaaacaaaacaaaaaaatcaaaacccatttgccataaagcagagatgccatagaggaggagggcctctgtgaggggaaggtgcattcattaaaacagctgtaggaaaagccagtcaaataacacacacacacacacacacacacacacacaccctcactcctagcaagagctaaggatctgtctcaagaggtataccactgcattccaccttgggcaacagagcaagaccccgtctccaagaaaaaagcacaaagtaggatgatagatgttaaataccaagcactccagataccctggggtcaaatctggctctatcagttactactgctgatgtgtcagtgtgcataacatgcttggaaccgtgcctggcacataagtgtctgcgaaataaaatgaatcaatatgttaaaggtaaacaaactacgtgtttcaattaaaagatattctcagaatggaccaaaaaattaaaaacccaatacacaaagcaatgtatgctatctacaaaagacagatctaacttataagctctagaaatgtagaagtaaaaaaatgggagagaagatataccatgcaagggccaatcaaaaggaaactggtgttacaaggctggcttctgggctgaataaaaggaaagaaaaaaaaaaaaacgtgcttgggccaggcgcagtggctcacgcctgtaatcccagcactttgggaggccgaggcgggcggatcacgaggtcaggagattgagaccatcctggccaacatggtgaaaccccatctctactaaaaatacaaaaattagctgggagtggtggtgtgtgcctgtaatcccagctactagggaggctgaggcaggagaatcccttcaaccagggagtcagaggttgcagtgagccaagactgtgctgctgcactccagcctggcaacagagcgagactctgtctcaaaaaaaaaaagtgctcaaagttagtatagaagacttaaattatacatttagtaacattgacctaatacataaacatctaacaactgcagggcacacactgtattagcccattctcatgctgctaataaagacatatttgaggctgagtaatttataaagaaaaagaggtttcatggactcatagttccacatggatagggaggcctcacaatcatggcggaaggcaaaggaggagcaaaggcatgtcttacatggtggcattcggcagagcttgtgcaagggaactgccctttataaaaccattggagctcataagactcactattacgagagcagcctgggaaaaaccgcccccatgattcaattacttcccactgggtccctcccatgacacatggggatatgggagctacaattcaagatgagatttgggccagggcacagctaaaccatatcaacactcttttcaagcccacataagaacattttcaaaattgagtatatctttgtttcacaaagcaaatctcaataaatatcaaaggaaatgtatcattcaagctatattatctatattctgcaattaagctggataccaataacaaatattaagaaattggccaggcgcggtggctcatgcctgtaatcccagcactttgggaggctgaggcaggcagatcacctgaggtcgggagttcaacaccagcctgaccaacatgaagaaaccccatctctactaaaaatacaaaattagccaggcgtggtggcgcatgtctgtaatcccagctactcgggaggatgaggcaggagagtcgcttgaacccaggaggcagaggttgcagtgagctgagatcgcgccattacattccagcctaggcaacaagagcaaaactcagtctcaaaaaaaaacaaaaaaaaaaagaaatatgcctctaaataagccacaaactaaacaaaaaatcatagtagatattagaaagtatatgaaatagaattgaactttaacatacattctatatatagtttgtgggatgtccttaaagccacgcatatagagagatttattgctctgaatgcatattaaaaacagaggtaaaaatcactgagccttagctcacttagatcctcacttacgatctatctcaagaagtcggaaaaagaacagcaaattaagcccaaaggaaatagaagcggctgggcatggtggctcatgcctggaatcccagcactttggagactgaggtgggtggatcatctgaggtcaggagttcaagaccagcttggccaacatggcaaaaccctgtctctactaaaaatacaaaaattagctgggcatgatggggcgcctgtagtcccagctactcaggaggctgaggcaggagagtcgcttgaacccgggaggcagagggtgcagtgagccaagatcataccactgcattccagcctaggcgacagagtaagaccctatctcaaaaataattaacaaaatatatatatatatatatacacacacacacacacacacaattcaacagatccaaaagttcttccttaaaaagatcaataaagttgataaacatgtggaaagattgattaggaaagactgggaggagagaagctaaagataatggatatagacaactctgttgagggcttttgctgagaaatagggaggtagtgggaggtgtgggccatgaagtcaagagacgagacgggtttcggaaaggacatcataagggtggacaacattacacttggcttgtcatgtttgttatttgttaaataaataaatgtttatttaaacatttttaagaacatttaacattatttaaaaatgtttaaaaattatttataaacatgatttttaaatgtttatttaaatatgtatttatttaacaaatattcattgagcatctactatgtgccaaggatggcttcgacacttgggatccatcaagttaacaatgtaacttgagctcatagagcttcctccaagagcttccattgtaacaggaggagacagacagtgaacaataagcataataataatgaatgatgcatgctgtgggaaagaaggcaggaaggaaataaggaagataggaaggaaggaagagaggaaagaaacaagataaagcggctggaagtccaagtgggtctcagcctcttaggtggagggtggtgaggacttgtagaagctctcttcctgttatttctatatttttagttaaactatttctcatgactcagaatgtatcttttggtttgtcttttggccttctattgtattgtatggcctgctttggattttcttttgctgacactcatcaaagttggcccttaaccctggcagtcatttgctctaaatttttaatgactcgaagcctaccaaaagtgccctgcaacaagggtaaaattagtagagctctttggtcttcaacccaaacatgccccaaacttctctagggatgcctgcccgggctaccatgggctgcttccagacatgatttcaggaaggatgtgggatccacagtgtgtagctttaaggctctgtcacttacctgtcgtggataccaactatggattcagtttcttaacagtggaaatgggtgtgtgttaacatttccaaagcaattgactgtgcttcttcgtcaggtgagcacatgcagcccgtgagacccaggatgccagctgtagctttggtttgcatgaagaatgcacacgtggaaatatttgggggtttttgtttgtttgttttgttctgtttgagatggagtcttgctctgtcgcccaggctggagtgcagtggcgtgatctcggctcactgcaacctccacctcctgggttcaagtgattctcctgcctaagcctcccaagtagctgggattaaggggacatgccatcacgcctggctaatttttgtaattttagtagagacggggtttcaccatgttggaaatacttgggttttgaagccagattcggtggctcatgcctgtaatcccagcactttgggaggccgaggcaggtggattgcttgaggccaggagttcaagaccagcctgggcaacatggcaaaacgcagtctctaccaaaaatacaaaaattagccagtctcataacctggtctcaaaaataaattaattaattaaaaatttttaaagtattggcttttatttatttatttattttatctgtgtggcaaagggaagggcaggattaatttatgcttctcagttattggggacaataaggagataaccattagagaagagaactgaaattgaaaaatcagcttctttatttatagccattggtagcagaattcctatagagaatttccagaatggaagctggcccaatagtcccttatccatactctaatcttcccacgtttccattcatatggctttcaaagtggtagaatattggctgataagagtaacctttgccgggtggtgcggtagctcacgcctataatcccagcactttaggaggctgaggcaggcagatcacctaaggtcaggagttcaagaccagcctggccaacgtggcaaaaccccatctctactaaaaatacaaaaattaggtgggtgtggtggcatgcacctgtaatcccagctattctggaggctgaggcagcagaattgcttgaaccctggaggtgaaggttgcagtgagccaagatcgttgcagtgagccgagatcgcaccattgcactccagcctgggtgacaagagtgaaactgtctaaaaaaaaaatggagtaacctttacagcattctactcgttctttctttcagagatgccataacaaaaatgaaagatgtctacctaaagaatcctcagatgggagacccagccagtttggatcacaaattagcagaagtcagccaaaatatagagaaactgcgagtagagacccagaaatttgaggtatgaaacttctgttgtggaaagctttgttggaaacgaagaacaggtgttcctcggtgtagaatggtgtggggccctgacgatcctctcactgggaggtacacagtgggaatggcaggctgtttcaggagttatggtcaaaggaaaaatacactcttcgccgttgaacattctcctactcatcatagcctatcttaatcgtggctgtaaaacctgacaatgtttaatgttgtatctgtatacggtgcggggttggcggggttgttttttaattttagagacaggattttgctttgttgcccaggctggagtacagtggcatgcttgtagctcactgcagccttgatctccttggctcagcctttgaggagctgggattacaggcacatgccaccatacctggctaacttttatttttcaattttttatttgttttagagttgaggtcttgctctgttgcacagactggtcttgaactcctggccttaagccatcctcccaccttggcctcccagagtgctgggattacagctgtgagccactgtgagccactgtgcctggccagtattttttgtactttaagttattctgcttcatctcatggtaataaaattgggagtatagagcgatccgttatcccagtgaatcaaagaagcaatgaaaaaaatcccctgaaatatacaattgttctctcagcaggcccattatggaaagggtgtgtgtgagaaccagcagcaaacacaaaggagaaacaagcaggaaacataaataatcaaagcttgagggagggagaggagcactcaaaagctgtcaacaaaagcctcctgaacccactctccctaccacgtttaaagactacagagcatggaaaaatacattagcaaccgattctaccagtcagaatagattgtttccagcaatgaagggtcaactatggcttttttcattcttttttttgagatgaagtctcgccctgttgcccaggctggagtgtagtagcgtgatctcacctcagtgtgacctccacttcccaggttcaagtgattctcctgcctcagcctcctgagtagctgggactacaggtgtgtaccaccacacccggctactttttgtatttttggtagagacagggttttgccatgttggccaggctggtctcgaactcctgacctcagatgctccacccgccttggcttcccaaagtgctgggattacaggcgtgagccaccacacctggccagctttttccattcttttcagaatccatcattaatgttcatttgagcatttagaacttagaacggtccttttcttattattattcttttttttgagacagagtctcgctctgtcacccaagctggagtgcagtggtgcagtctcgactcactgtaacctccacctcctgagttccagtgattctcgtgcctcagcctcccgagtagctgggactacaggcatgtgccaccatgcccagctaatttttgtatttttaatggagatggagtttcaccatgttggccaggctggtctcgaactcctgacctcaggtgatctgcccacctctcccaaagtgctgggattacaggcgctcaccaccacccccagctaatttttgtactcttagtagagacagcgtttcaccatgttggccaggctggtctgaaactcccaacctgaagtgattcacccacctcggcctcccaaagtgctgggattacaggtgtggccaccgcgcccggccttctcgtcatttttattcctttgacttgtttatactgtttcaaatgctgaaggtcattttatctactttaatttttaagtacaagtttcatttctatcaaaaaaaaaagttacactcctaaaaaataggaagtgtggctttcaaactgagtcactgctttaagcatggctgtaccttcaggtatcacagggcgacctcatggtcaagaaggaactagaagtgacttatccaagactgcactgctgcttaaaagcccaaggggatagcatagtccagtgtgctttctgccccatcgtgggcaaccacataaatatgagtttgtttctatgtctccaacttcgggtgaaatggaagcaaccgtccttcagtacatttgaacagtcgaaggcagaaaacgtggccattctgcccccacgtggacttcctcacattgggttaaatggccaagagtagcccctgagtttgggaccttaggatgctccgggctggccctcagatggcctttgggaccttaggacactctgggctgaccctcagatggccttaggttggagtctctcattgcttttgtctccaggcctggctggctgaggttgaaggccggctcccagcacgcagcgagcaggcgcgccggcagagcggactgtacgacagccagaacccacccacagtcaacaactgcgcccaggaccgtgagaggtacagtatctgcacagcgcctgcctctggcaagggagcctgttggctttgtatttatttctaaattttggaatctggaatgaccataaggcacttgttcaatgccaaaatgtctgttgcgattgacctgtcactttttccatgatgcagatttataattccacatgggatgggtgatctgagcgtgcgatgatttaccatggcctcagttacagcactcgctgaggggcggggttgcaagtgctctccagtcgcagggactcaatctgagtcctccctggggtcagtcgctttagttgctttgtgttttcctttcttgagcagcccagatggcagttacacagaggagcagagtcaggagagtgagatgaaggtgctggccacggattttgacgacgagtttgatgatgaggagcccctccctgccatagggacgtgcaaagctctctacacatttgaaggtgacatttcatgtctgctggattcccctgccttttataaaccataatatctgagttactcttctttcacttttccttccttccttccttctgatcatttttattcctttgtccttccttccttccttcctaccttcccttccccttccccttccccttccccttccttccttcccttcccttccctcccttcccttccttcccttccttcccttccttccttccttcctttttttcatacagggtctcgctctcttgcccaagttagagtgcagtggtgcaatcatggctcactgcagccttgacctcctgggctcaagtgatcctccaacctcagcctcctgagtagctgggactacaggcaagcaccaccatgtccggctcatttttgtacttttgtactttttgtacttttcagtagagacagggtctcactatgttgcccaggctggtgttgaactcctggattcaagcagtactcctgcctcagcctcccaaagtgctgtgatcacaggtgtgagccactgtgcctagccacactcttctctttctgtgaccagaactttctttagaagccttccagatctggccgggcatggtggctcacacctgtaatcctagaactttgggaggctgaggcgggcaggtcacttgaggccaggagttcaagaccagcctcgccaacatggtgaaatcccatctctactaaaaatacaaaaactggctgggcatgctggcaggcgcctgtaatcccagctgctcgggaggctgaggcacgagaatcacttgaacccgggaggcggaggttgcagtgagctgagatagcgccactgtactccagcctgggtgacagaacgagactctgtctcaaaaaaaaaaaaaaagctgcagcagcagccttccagatccttctctactatgcttttatcctactcatggtatgattattatttggttgtatattttgacttttggttcgtataacttaacagcttccagagagcttgcttcactgcagcagacgatagggaggatgatcatttcatccattcatttaatatctagtatctatagcgctcctgtcttgtaaaggcccatgaagtggggggatgcaggtcgtatgatatggcacctgcccagagggaaatcaggcagacacacttaaggagcaagcagcggctgggtgcagtggctcacgcctgtaatcccagcactttgggaggccgaggcaggcggatcgtgaggtcaggagatcgagaccatcctggccaacatggtgaaaccccatctctactaaaaatacaaaaatcagctaagcgtggtagcgcatgcctgtaattccagctacttgggaggctgaagcaggagactcacttaaaccaggagtcggaggtggcagtgagccgaggtcgtgccactttactccagcctggcaacagagcaagactccctctcaaaaaaaaaaagcaggcagtttgcagtgtttgccagaagagggatacagaggaacggggaggacaggggagaatgaggtcgcttccttaaggaagtttggagaacttgccatggcatggggggtgtggccagaaatgggtgtggtgtggctggagcttagatgtcttaagtcctaatagtgaaatgtggcactaaagagtgggaagtgccaatgggggcgaggtagggaaacatctgggttttatgtggcaaacattgaggagctatgggaggtcccctagcagggtgtcgatgcagtcagagctgtaccttaggaaagtcatcgtcagatgtgtaggatccactggaagacatggaggatggttagaaagactagcccaggccgggcatggtggctcacgcctgtaatcctagaactttgggaggctgaggcaggcagatcacctgaggtcaggagttctagaccagcctgcccaacatgatgaaaccccgtctctactaaaaatacaaaaatcagtgaggcgtggtggcgggcgcctgtaatcccagctactcgggaggctgaagcatgagaattgcttgaacccaggaggcagaggttgcagtgagccaagatcgtgccattgtactccagtatgggcaacagagggcaactctgtctcaaaaaaaagaaagaaaagataaactagcttagtgtttctaaaccaatgaaccttgaaacgatgtcctgcagagcgttaataaggaggccatgaaagaagctctcaggccaggctcagtggctcacacctgtaatcccagcactttgggaggctgaggccaagagttcagggctacagtgagctatgatcgtaccactgcactccagcctaggcgatagtgtgaaaccctctctaaaaaataaataaataaataaataaaattacgaaaaagttgcattttaatataatgaataaatttttaaaactagcaatcagagctcaagtaagtttgggaagccctgggataaataaattttacagatttctttactacaggacttttcagagcctttaatagactaaatgttcattgtgacaaaataagaaagacgtaccagtttaaacgttcccagttttacttcatattccaaccatcccccaccgtaccctgttgccctgttaacagctccctaaactctttgccttgcagaaaactggggggtggtgggcagcctttgaaatgatcctagcagaaggtcttgggggccttgttcaaggaatggatacagagatgccgccattgacaaactgcatatattcggggctgatcaaaagccaggaacaaaaaggagaggaaatccaagacggctcccagagttgcattcctgggaggacagagaggtctagggaagtggaaaagcaggaggatatagttaggaggaagaacagtgaatccaggttcatctatgttgtttcaggtgttggggccatgtctaggtggcagtgtgctgcagacagtgggaaaagtggaatcttggctgcagaaagtaccagaatggaagcaatatgtgaggacagtgtttaaagaggagcagttgggccgggcgtggtggctcacgcctgtaatcccagcgctttgggaggccgaggcgggtggatcacctgaggtcaggagttcaagaccagcctgaccaacatggtgaaacctcgtctctactaaaaatacaaaattagccgggcgtggtggcacatgcctgtaatctcagctactcgggaggccgaggcaggagaatcacttgaacccgggacaagtggcatcacactccagcctgggcaacagagcaagactctgtctcaaaacaaacaaacaacaacaacaaaaaaattgggaggctgaggctggtggatcacctaaggtcaggagtcagaccagcctgaccaacatggtgaaaccccatctctactaaaaatagaaaggttagccgggtgtggtggtgcacacctatagtctcagctgctcgggaggctgagacaggagaatcgcttgaaccggggaggtggaggttgcagtgagttgagattgcaccacagcactctggcctgggcaacaagagcaagactccatcccccacaacccccccaaaaaataacagacaaaagagaagcagttggagccacgagggtacctttctcctgagagagatccaagtgagacagaagaagactagagaagagaaccaaagatttatccagtgagaaatacttaccattctgggagggaggagaaagagggccctggaggacttagagagggtccctagagagacagaggtaagaacctggacatttctgtgcagaaggagatggttttgaggcagtgggtgaggggtccgtgcatctgagaaggtccgagtggggtgaattttgtgtggacttcatcttcgacgacacttgtttcattgcgaaggccactgtttgcttcctccctgcatttgccaagacatctaacatatcctgatattgctttttcaggtcagaatgaaggaacgatttccgtagttgaaggagaaacattgtatgtcatagaggaagacaaaggcgatggctggacccgcattcggagaaatgaagatgaagagggttatgtccccacttcatatgtcgaagtctgtttggacaaaaatgccaaaggtgctaagacttatatttaataccataaaaaaaaaaaacttaaaaaaaatggagttgtttctccccacaaccgtgactgttacaggcagttcctcaagagactggctggcaagcaccataatgcacgttctcctgtagtctcacgtggacttcagggtccgggcacctgaattgccttgtctagtttgggctgtaatcaagtttcacttgctgatgaaattttatgtggaaagctgccaaccgccaacttacagctatgtcattcaaaatctgataaacatttcttcttttggcggtatctgtagattaaaaaaaaagttgcattgtagcttctcatctttctgaatttaaaagccggcacgcatcatgcaggtgccaaagacttccctactcttgtttatatctagtatccaccatacactgagctacattaggtggttacagattgtaacttaataaactgaactgtgttagtttgttaaattgtatactcattcacttgggaggaagtcacaagtgaaataacatctccttcttgactaaagcagtaaataagattcttatattggcaccaaaagtgtgtgtttttacttaaacctggtcagcatccttggtagggcatcacgagtaccctgttccatctacatgatcccagacaaccagctgaaatctggaaaagtttggtgaattgaccacttgatttttacattgcattgctgattttccaagtgtcatcaaattgacaggtttttgttgttgtgtttgtgtttttgttgttgttgttgttttgagacagagtctggctctgttgcccaggctggagtacagtggctcactgcaacctccgcctcccccaggttcaagcgattctcctgcctcagcctcccgagtagctgggattacaggtgtgcaccaccacgcctggctaatttttgtatttttagtagagacgggttcgctctgttggccaggctggtctcaaactcctgacctcaagtgatctgcctgcttctgcctcccaaagtgctgggattataggcgtgagccaccgcacctggcccaaattgacagttgatcagatgtgctagtgctgtttagatggagttacttaaaaggcagagcgtgtccctgcatcagctccttttggctgtgatttcctctcacacttggttcggtttctgttggttttccaagtagagctgcactcacgcttgcccaggtggggctataaagagaacgtggtgtggcagcaaatgcttctccccacagacacagatctcagcacattgctgttcaaagactttgggggtttgcttttgtttttttgttgttgttgtttttgttttgttttgtttctgcttttaatcattggcaaggtttggatttactggaaattattttagaatttctggctcattttatacaattaactgtagccagaatgaagtaaaatgtctcaccacatcgaaaggaatctaggccacatgagaatttgcatttttaaattggcattgatgtgggaggggagatagtgaagttggtcacatgcgtagatggttgccaggcatttcactgtgcccatttccagaatccaccccgagatcatagacaacccactacaaatgggtcagaatgaaggtgttgggtcagattctctttttatttgattttgaaaattatttccttgtgtccttcctactttcaagtaggaaattagcccctgcctgcctctacattgtgggttcatttgatcagctcaagtccatttaaagctgattttccaagcagtagctgcacattcgggctctagaacctagtaggggttctggatgctaggggccgtgtttcaagattctcacagccagttaacctttatttagtgacagcctgattttttaaaaaactttttttttttttttttttgagatggagtctcgctctgtcgccaggatggagtgcggtggcacaatcttggctcactgcaacctctgcctcctgagttcaagcgattctcctgcttcagcctcccaagtagctgggactacaggcgtgtgccaccatgcccagctaattttttgtatttttagtagagacagggtttcaccgtgttagccagaatggtcttgatctcctgacctcatgatctgtccacctcagcctcccaaagtgttgggattacaggcatgagcccgtgcctggctttttttttttttttttttttttttgagacagagtctcactctgtcacctagactcaagggcaatgatacaatcctggctcactacaacctctgcctcccgagttcaagtaattcttgtgcctcagcctccccagtagctgggattacaggtgcctgccaccacacccggctaatctttgtatttttttttttttttagtaaagacaggttttcaccatgttggccaggcttgtctcaaactcttgggctcaagtgatccgcccgcctcagcctcccaaagtgctgggattacagggtgagccaccgtgccaggcccaaatttcttttggatacttttgctggcatagtatcaataaagccacccatcccgaccccaggcctctttgtaaatattgcagcaagaaaatcagctgacccttcaaccacaaggatctgtttaaatgagcagtaggaagtttccagctttacccagtaaacaagtgaatgggaaacctaaggtattaaaatctgacctttctatccgatgacaaactcatttccagtctgtgaactcctggacaaagcaaactaaccactgaaaaactcgaaaatagggcaagacgacattaaccttgtgaaagtctgctttgaaaaaaggcattctgtcaagctgtgtatttttttcttgattattcaaatttatttcgttattcaaatttaattcagaaaatagctcagttggtttcagggggaatggggtgggaggggtttgggcacataaatttatgatgataattttaaatgtacgatcattaagttgtatgcctcagtactataacaggtgaatctctgtaatattgactaaacagttaaaagatattttgtaaatttcaggtccatcgcatcaatgcatgaaatattagaaaaccaaattccaaagaatcaggaatttccatttccacccaaagtatactttattatcttctagcagttgtctgttaatataaaagcagcaaaatctcagctacttatataattttctccttttatttgaaagttacacttagagattaataatatgtacagagaagcttttcctgcctactctgtttataactctgtccaacttgcccacaaacactgccctccttcaacccatctgatgtgggcaaagccactgttttcttaggcccataactcagtgcagctgttttatttttataatgccggtcaacctttttgtgtgtgtgtgtgtgtgtgtgtgtgtgtgtgtgtgtgtgtctacgatgtgcttatttaataattgccaaaatatttagactagagtaacttccggtgggtcaattggattgtgactttcttttgtggttttttggttcttcgattgctctctgttaaatattttcataattccccccacagaatacgtgtgtatatactgcaacttaaaaactaaaagcagtactcgaatgagttgttttaatgttgtacttttatctgtttgttttatgggttctcctgctgcctaatgacctttctgtttttataactgccggaaagccgcgaagcctctcgcatggggagctaggtccccgctgcggctccgcacttgagtttattataaactctggggttctgagtaagttttgtttgaatacagcaacatgattgtctctttctattcttatcctaaaagactctgtctggcatcttttagttgtaccctcgtatctgcttctctaataaatgttatattttttctcagtattgtgtattttaagtgacttttcatgtttccaagaaaattattctgtgtaatatgaatatttaactctttcatctccagtaataggggattttctagcccaatgcttttttaaaaattctgcctcccacccctacctcctcctttaaatgatggcacctcccctgtttctgatcttgcgtgcactcagggcctgagaagtctgtgtttcttttgtttcttttctctctccttgagatgaagagcttttcacggtttattgcggaatgaatacagaacaacaggttttccttttcaccaaagattttacattgtactgctgaagagccaagagtttccttctgagagaactggaccttcatgttccttgtaccattctaggaaattgatgcatttcttttcttttcttttttttctggagttgaattctcactctgttgcccaagctgaagtgcagtggtgtgatcctggctcgctgcagcctcgacctccctgggctcaagccatccttccaactcatcttcccgaatagtcgggactacaggcgcatgccaacatgctggttaatttttttttaattttttgtagagatgaggtctggctatgttgtggcccaggctggtcttgaactcctgagctcatgcatcctccctcttcagcctctcaaagtgctgggattacaggtatgagccactgcacccaacctccgtttcctttttttttttttttgagacggagtcttgctctgttgtccaggctggagtgcagtggcccgatctcagctcactgcaacctccgcctcctgggttgaagcgattcttctgcctcagcctcccaagtagctgggattacaggcacctgccaccacgccaggctaattgttgtatttttaatagagatgggttttcaccatgttagccaggctggtcttgaactcctgacctcgtgatctgcctgcctcaggctcccaaagtgctgggattacaggcatgagccacggcgcccagccccggcctccgtttcttactttctctcaaaactaaacttatgagaaagacgagttggggcggatggcctcatcagtctcctgtttgggcttctcttaactctgaaggaaagaccagctaaaggctagagagaaaaccgtgaaagttcctcatctcagacccgccctgtggtaaccgattgctctaagacgccccctcccatccctcccctcccactaccctcccctcccagggcggtgcagtttgtagccaagagcaaaatgcccgcctggaacccgcgccttcctctctaacagagagtttctctttctgtttctctttgtgttgtagattcctagaggggagtgcctgcgagcctcgggtgagccttcctggaggagcctccgtctgcttgttcccacaggcctccagcgccctgccctgtggacagcccacccctccgcagccccatccctgcggggcggtctctctctctctccagcatgctccctgcggccctgccctcccgcccagcccgggccacctcgtgggggacaagtctcgccagcgcccacccccatggctcgggtcagtcctcatcgctccccctccccaccccgcgcaggccactgagacggtgggacacacgcccccacctgctccttcctgggccctcagtccacccgggctcgtcctggcagcccttccgcgcttcacacagtgccttttgtgaaagtgtcatcacgggtcccctgaggagacaaggcaggtccagcgcacatcaggcggactgagcactcgatgtcatccgtgtcgatgtcatccgtgtgtcccagactgcctgctgtagaaaacacttcctcctctcctgagtctgtgaagtcctcagtggtcctttttggattctaggcttgcacctcatactaaacattgaccctttcactatgccctcaacctgggagcatctggcaggcaggggggcaggtacacacacacccacaggcacacccaccagtacacacgcgtgcgcatacacacattttggtttgacgccctgttttcagtggcctggggaggtccacactggaagtcgaattccagctcgccttgttgactcgcctgtgtccaccggccatgaggagcccacgcctgtcctccccatcactttcctgtccctgagaactgtagatcatgcgcttgtgagcgaggccctcccctctgcaccagctcattgcaaagcgaacatcctctcctttccaggagccccaggattagcatctgaaaagggtagcacttccttttttgttgttgttttttttttttttttgagacgggagtctcgctctattgttcagactggagtgcagtggcatgatctcggctcactacaacctccacctcctgggttccagcgattctcctgcctcagcctcccaaatagctgtgattacaggcgtgcaccaccacgcccggctaatgtttgtatttttagtagagacagggtttcaccgtgttggtcaggctggtctcaaactcctgacctcaggtgatccgcccgcctcagcctcccaaagtgctgagattacaggtgtgagctaccgcaccccgccgaggttagcactttcatcaccaaagaccccgtgcctctcgtggtcctttgagggatcccgccgccaccacccttgtattttatcacgtgctcttcagggcatgtggaattcgttgagtttgcttttagagccaagtttctttccctgtgtgggtttttgaggaaaacctgaggtcccctaatctgtggccaccaccccccccccccgccacgccttagagcagagcagcccctcctctcatttggtgcagaaacagtcaagaggaaccattggcctagagctcctgtgaccgagagcgccacggaagcctggggatgacgtcgggcagctttattctttgcttggctttggtaactaggtggtcccctcaagcatcctcagttcctcttgctgtttatgaatctaagacaaggaagtcctatagaagccaaagggacagggacggaaaggacaggtcccaagggatggggctgtctttacttgtggaaaccaggaaattgctcctctcagccaaccaaggttgaccacacaccacccttccggagcagctcagtcagccctcggggacgagaaaccacaagcgcagagacgctgaggcccaggcaggtgaagaggaagtggctttgggtttttaaagtaggtgagcgtgagcctctctgactgcttcttccccgggggggactgcaaaccgctcagggttgcggcagagccatggacttccggtccctgcaacgggtgacctaagcgtggtgcacccatcagtcacgcaggaggactgacttgacagacgaaagacaagcccggatgacacagggtgagaagagtcagggccgcacctctgtccctgcaaaccaacaggtgcatggtgagtgtggcagtccccacagctccacaatgggctcccccgccaacggggacgacagggatcttcaggaacttctgacctcaccaagtcaagtggaccactctccactccacgaggatgtgaaacggttctttaaaatgggattttagagcctcgggaatgcatgtgcgtcgcatctttcatattatgggtcaggatagattcatttcttgcaacatagtggaaaagatataagctgcagtaatttgctctttgaatgaccgtcacccccagtataggatatgcttgtatccccccgtcactcctccgcctgttttttaaacttttccaccacctgcgtccaaaaagaatgttatagcgagtgctcttaaatgttgaacctgggtgttgcttccgggccagtctgcgtggctccatgaaaagctcactgctgccccagccgggcttcttagaggaggtcagttgtcctatgtatcatcatttactctgggaatcctactgtgaaatcatgtctgtatttttctggagcagttcacatagagtagaatgtggaatttcccgtgaacgtctccttcctcccccgtatctgccgcctgtcacttcgccaccgtgctagaatactgttgtgttgtaagatgactaattttaaaagaacctgccctgaaaagttcttagaaacgcaatgaaagggaggaacttgtcctttacccagtttttcctttgtaggatgggaaagtataaaaaggcacagaaggttgtcatgggctgttccttgggggtttttatcctgctcaccgtggagataagcctgcggcttgtctaaccagcgcagcgcaaaggtctcaatgccttttggtaacatccgtcattgcagaagaaagtttacacgacgtcaaaaagtgacgttcatgctaagtgtttttccagaaatattggtttcatgtttcttattggctctgcctcctgtgcttatatcatccaaaaactttttaaaaaggtccagaattctattttaacctgatgttgagcacctttaaaatgttcgtatgtgtgttgcactaattctaaactttggaggcattttgctgtgtgaggccgatcgccactgtaaaggtcctagagttgcctgtttgtctctggagatggaattaaaccaaataaagagcttccactggaggcttgtattgaccttgtaactatatgttaatctcgtgttaaaataaaatataacttgtggctccgtgtcacgggactgttttgttgcatgaagatatgaccctagttgtggaagcagcctggtgtcattggaagccccctgggctggggagctggcccctgggaggagctggagacctagatagctctcagttccacccccatccacggtggagggggaggctctcagaccgtggtgacgtggaattcgggctgatgtagtgcgaggattgcgagaggctgcttatggccaggagtattttttgcatgcacattcaactggttgctgctctagctctttggggacctcattgcttggggctggggcaggaggaggtggtgaaatgagggcacacctgagtttcattatttatctggtatcaccagtgctcaagccggtactcctggtggcgtggctggaatcactagtttctgtgaagctgcaggcagtgcggagctgtttcacgtggacaactcgaaagggcagcagccttgtgcctggcactggctggacatgtgcagtgggaggccccgtttccacagccagctttgaaaatttcaccctggccttttgggggaagataggattggtttgtgcccacacttctctgtgtcccaagggtttttttttttttttttttagcactgttttaggaaaacagttgtccaggaaatgacatattcgcagctacaccaagtgcagacctggcagctctgctgatgccaagcatcctcacttgcggagggcaggaggtgagggcaccaatatggggccattggtaacctctaaccacaagtgcgtgcagttggcttcaaggcaccattgagaattgctggttcccagtgtgacacagtgtggcacaagggaacaaggtggatctactgttatcctacccgaaaccctctcctctaggttgtcagcaaaaaagtccacttgggaagaatatttcgggactgcgcccagccgtctgtggggcggagacgggctgtctccacctgtgaacccccccatgccccacccgcccctgccgagccttctccaagagccgcaccagcgctgagaagcctagaacagagcctgctggtttggggcccccatttccgcgggtgtggacatcacagaggtcgggagcattgggggcgactagtttgttttctgctgcactggggaagcctcttgaagtaggaagttcctgactcaccggctccggggaggccacaagcctgtggggccggctcctccagcgggtcaggaaataccggcccgccccacgccctccacccgccctgggcacgcccgggcctgggaggcggctcctccgtccgcagaggtggtggggacccctggcgggagcagacggcagagcgcagcagtggagggagcaagaagggccccctgcggtgaggaacgagatggcggtggacagaggcaggattcggtcgtgcccccagctttttttaaattgaagcgaaagactcagaaatcgtgaaatgtatgggacagcctggaagctccactttgaactgctgctgccagagaaggatggtgggaaagagccaccatccagacgggttccctggctctgcgcactcgcctgggggaggcctccttttccctggtcctaaaacgctttcccgataggggaggcagggatctgtgttgccagcgccctctgagacccgggatgagcgtgtgaaggctgccagcaggcacgtggcagccccttggtgtgtcagctgcttctccagggtcccactgagtgcccattcggccttgacttgagcactcctgcctcccgttagacctccagatggtatagtgacctccgccggggacatctccggaccacaaaaggtacagaagaagcagaggaaggaccctatccttgtcctcagagctaaggggccgaaagctgtgggaggaaacacggacccactgtccccgtcggggatggggaaggctcccttcctccctgcggcacctgctggacggacgtctcagcctaggacagggccgcatcccttcagtccgcacagcccctggctgccacgctgtgccgagccctgcccttgagaacctgtttccagttccagctctccacaggccccctcatctaggctggtcccgggtcaaatcgaaggaaggaatggaggctgcaccctgagaaaccctgggacacccttccagaacatacattgcctaggctgtctactgctcctagctttccccaaaggcgtgtgtttcttctgcgcccagctcacccttgctccgtccaggtagcaggtgtctctctgtgtaggtgaagttgcagaagggacgagccagagggggctgtgattccgaaacctctgctcacttcccccaaggctctctggggctcaaaattaggtagcattaagaccctcaggataatttatgtttgcactgaatttaaaacagaacaatggtaggaactacactttttgggtggctgcgccttgcaaatgtattcggatgcaggtttgtgagcagcgccatggccgacagaaccacaggcaggcggcaggtctcctgcagcctcccccacggtgcaggggcgcctttccggctcctctaagaagcgctgctgaagccacgccctggcttagcgcggaggaggagccaccgtggggcaccgtggggagcgaggcctgagccccgcctccccagtcaccgagcacttcctgtccctgctcagtaatcaagcacagacttcagatcttggcatctcagtctgaactccttaaaagccaggtattttaaaagaaacgttttaaggcaaattggtacctatttccagcccacctttctgtagtgcaagaactgtctccaaacctcctaaataaatcttccagacaaaactttcattctcattttccatgttcaatgtcaatcacgtggattgacacatatctaaccttcaaatgtaaacaaagccaaaaatattgcttagagattcccacataaagacaaaggttgctttttcctcttccgggaacgctgtctacaggcactcagcatggcccagtttcccaaaccgtcataggctttcctagaatacagcctctaacagcactaggccggcccgaacccctgggaagagaatcgtttacctttataccaagattgggaaactgccaaagtctgcacatggcatgggcctgggctgactccgaggggtttgtgctgtgagacctaaagctcctatgagactgccccaaagcaaaaacatgtcagcaagcggccaggcgtggtggctcacgcctgtaatcccagcactttgggaggctgaggcagaaggatcacttgagcctaggagttcgaggccagcctgggcaacacagtgagaccctgtctacaaacaaaaaacccatcagcagtgcatctggtgcttctgtgtgaacgtgttcccgacaggatcaagtgtgccttcctcatcaaggagcagaaagttgctgggaaggtgttaagggcaggagcacagtcagaaagctcaattttaaaatgatgttttggccgggtgtggtggctcatgcctgtaatcccagcactttgggaggctgaggcaggcagatcacaaggtcatgagatcgagaccatcctagctaacaccgtgaaaccccgtctctactaaaaataaataaaataaaaaataaaattagccaggcgtcgtggcacatgcctgtagacccagctactccagaggctgaggcaggagaattgcttgaaccccaggaggcagaggttgcagtgagttgagattataccactgcactccagcctgggcaacagagtgagactctgtctcaaaaaataataataaaatgaagcttttttcaggaaaaaaaaaaaaaaaaaggcgggatgagggaaccacatgcaaagagccacctctggggtcaggcaaggtggccgactccggaggggccccaggctttccatggaactggcaatgtgtcatcttggttccttgtcaccgtgttatccttgcatatgctgaaatgtttctgtacgctcgtatctgatagcggcagggaagcagaagcctaggggagccagggtgacatcattttgagttcggctccacctaaaactagcaagggaggctgggcccggtggctcacacctgtaatcccagcactttgagaggccgaggtaggcagatcgcttgaggtcaggagttcgagaccagcctggctaacatggtgaaaccttgtctctcctaaaaatacaaaacttatccagatgtggtgacacatgcttgtaatcccagctacttgggaggctgaggcaggagaatcgcttgaacctgggaggcagaggttgctgtgagccgagatcgtgccactgcaccccagcctgagcaacatagcgagactccatctcaaaaaacaaaaaattaggcacagtccaggccagtcacaacctaagatgtttacgtctgaggaagcagctacgtaacgcctgcgaggacaaactcctacgatggagaaggttcagatgccacacaacagtgtatgcttgaagatgaccacagtgaggcttcgatgtgcttatgcactaagatgccaaggatggctttctttaaatcaacagagcaatccactgtgtcaggctgtcagcccacctgacagacacagcgtagcttttctatagctaagacccctacataagaggagttgaaaacagcgacgggcatccctccacttgctttctgaggacgctctactctgtacctgagcagctttcagtaaactcttctcagtgaactctgcgactcaccttgagtttcttcctgcatgagatccaagaaccttctctaggggtctggatcggaacccctttttcctgcaacaatgggatttcacaaataaatgttgataagttatatataaaaatctcaagttcttctctcccccaaaatgagacccaacaaaaaactcagactactgaacaccagtattgctgaacgcccagggccagtgtgcaaaggggaggtaaccccctgctcacggccactctggagccgcctgtctgggtggctggagggagactagcctgtgggatgtgctggcctcaatcactggccacatctggccctacttctctgaggctggggctgattccaggaaaggagatgccaataggcctttatagcagctgggtcccctcttctgctcgcctccacagcctccaggtggtctctggtttcagaaagccacatggaaagccccctcctgggcctggtgatgtgcaatgtgagccccagggcttggcgggctgtccgcgtggcggagagcctcaccttccctccagtaacagaactgcggtgaaggagagacgactgtgtggccgtgggaacatttattctgtgtttattctgacattttgaacacaaactagacagcacagacatggggcccgatcccagcctgcacagaagcctctctgcgtcgcgacagtgcagcgtgcggcctctggctgcagcgccggctttcagaaggctggggccaatgccaggggaaccccaggctcagcagggagggagcaggatctgggacagaagatccgaaaagtgaggcctcagggcctctgcgggacccacctgctggaatttccaccaccacctgcttctacaaagactgatagaaacaaagacgcagtagtgtggggggtctggtcccagagccccttccccacccacgccccgtctgctttgatcctgatgatggtcgcacctcgccctggcggtttctccaggggctttggtgccttgctgtgctcagtggctccctccactcagcatccagaggctgcttcccaggatccacctgagcgctgcaccctgcacagcccccacatccctccaggcgggctctgcactgctgctgctgggaggaagggaaagtctgtcttctttagcatcagctcgggaagctgcctttgcctcaaatggccaagctgtgaggtatccctgtttcatcatccggttccctggtgggggctcagcaaatttcccatgaagatgaactgctgaacttcgaggcaaattacagccaatccagggggcaggctcagcaggacgcggtgtgggggaccagctgcctccagaaacatcccccactggcagaaatccaacctcctcctggtgttccaatcagcaatgagtccagagtcttcagtctgcaggagaagtgctgagagcagcccgggacttcagagccttcctggtgacgcccaggagatgcagaggtgcggcgggaccaccagggaggacctgtgagctcctcactggccagggcttctggctgcgctcaccggccctgagcagctccctccgagtcttcggggctccgggccaatcgcacagtggagacgccgtgaagcagcagctactccctgactctggcccaggccgcagcctctgtctgacaggggtagcatcgggctccagggacaaagctgggccgagctagcaagaggacagttgtgggggacacaacgatgacagtgactggcagaggcactgccaggacaaagacccaaattaacgtcacagagtcttggtcgtttcaacaagcctgaagtgcatatattttctagttgcagcgttactgcaaaccaaaccaacttttctgcctctttacacggcggggttctgcagcagcccggcctctcttctgggcacaaacacgccttccgcggggtggggcacatggggctgtggggacacgggcactcagcagtggggccgggccatgtccagggccctcccacatcctccaggaaggtgctttcagggacctgctctttggatgttcaaaaggacatgtgagggtctctggagagtgaggagaggacccagagtgccatggagggaccagccggggcgacttacagactagcccagcagatcacacggcccgcgtctcggcttcgatcttctgctccccgtgcaggttctctgggcccagcggctgcgccacactctggcggatggcaatctcggggccacctccatacaggctgttcaggtaggtccaggtctcctccgaaatctgcccgtagtcagctcctgcagggcacgagaggcacccctaggctcacctttgcctcctcaaggaagccaccggcctgggcagtgggggctccgcagggccaggccccgaagcgggaagacggcaaccagggcttctatgcaaagctgtcagatggaaatcaggatttcccagaggaatgtccatcccgctaagggccccggataacacatctctggctgtgtcccttgttcctgggggtggggctgacataaacagcagggtgggcaaggccagcagcaggcagaggggtgggacctggaggacacaagcagagaccaagccccttgggccatctctcagccgcctgggtctggactcaggtggacgtctcagcctgactctaagacaggtggtaagggggctcctggaaggacgggactgggcagcagcctggcagccaggaagggcagagaggagcctggctgaccccagggggaactcaccctgcttcagctggacatggccgcttcctttgacctgtgcaatcctgctgttgtcaatgggcccggggggctctgcaacagacacagcgggctcgggttcagcccctgccatgccctccaccctccacagcagcagagccatcccaagtggggccgccccaggcctgggggtcagcgtgaagtctctaatggatgaggcgcctgagccacccaatgctcctctgtggcagtctgaggacccagcagagggaatttccaggacacacgagatggtctcagactctgtgcgggccgcaggagctgcggtggatggcccatgcccttatctctgctggcagctgccgctcaccacgccccttcccctctgcccagctatctcatttagcctcggcaaccacaggacaagacagaggtttacagagacagagccgaggcctgggaaggtgaagtaaccactcaggtcatagctggtagaaggcaaggccagcgtccaggccagggcgagggctccggagctacattctcaaccacagccatgctgaaggcctcagccaccaccagagaggcctcacggtggccctggcaccttccccgactagcgggatggcaatgaggcctcccttcccaagcacaggtgggtgctcatgctccacaccaagggtcccgtgagcagaaccgtgggctctacccaccctgccgggccccggagccacaggttagattatgccccgagggcgccccagccgaaatttttaatgcaggtttaatagtttagagcctgtgggcttccatggcttggttctgctgttcttcactggggacttgggggaccctgggagcttgtgatggggcctgtctccacctctgtaaatccaaggagtcagatgacaaatctgtcatttcgggcgacacactcccctgaggaaagggccttgcaggagggcagagcagcttgctgggcatggcagggagtggagaagggcagggggcgcagagcaggagcagcttcctgcctctgggtggggacagtgatccccactggggactggcaaagccccatgctctctgttcaccctggatgggtggcacctgggggcaggcatggggcctgcaggagcccctgtgtgccagccctcccctgccagcatcccatctcccaggaggcccccagggcaggtaagtgccaggtcccccctcagctcaccgttgtccttccccttgacgaacgcctcccactcccggaaccactgcatgctgatgcagtagatgacgcccggcgactcctcggcctggaaggccttgttcaactggcaggcgggcagggacgggaggagacagagggcaggtcagtctctatttaccttcagcaaggatttcccaaatgcccccgccccagtccctcacccaagagtcttacaaaaacaccagatactcaaggtgaaaaatcaaacccccagacaagctcaaacaaaatgaacacacccatcactcagagaggacggtggtaacattttgtgggtctcttcaataactgtttgacccaactgagaccacaagggagattctactttttgagaaggaatctcactctgtcacccaggctggagtgcagtggcgcgatctcggcttactgcaacctctgcctcccaggttcaagcgattctcccacctcagcctcttgagtagctgggattacaggtgtgtgccaccacctggctactttttgtgtttttagtagagacggggtttcgccatgttggccaggctggtcttgaactcctgacctcaggtgatccgcccacctcgacctctcaaaagtgctgggataacaggcatgaaccactgcgcccggcctgggagatgctaattttctccggttgaatagaatgtgcctatctgctcagagaggcagctctccttctgacaggagcattttctttttcgagatggggggtggtctcactctgtgcccaggcgggagtgcagcggcgcaatcatggctcactgcagccttgacctcctgggctcaagtgatcctcccacctcagcctcctgagtaggttggaccacaggtgcataccactaggcccagccctgacagtctctttttcgtttgtgttctgagacagggtctcactctattgcccaggctgcggtgcagtggcatgatcacggctcactgcagcctcaacctcccaggcttaggtgatcctcccaactcactcagccctccaggtagcggggactacaggtacacatcaccatgcctggctaatttttgtattgtttgtagagatggggtttcgccatgttggccaagttggtcttgaactcctgggctcaagtgatccacctgcctcggcctcccaaagtgctgggatcacaggcgtgagccaccatgcccaggcagcagaatcatttcctaatggccacaaagcacgggcgtccctcagtgtctctc

SEQ ID NO: 699 - DNA, 3938 bp, Homo sapiens
ttttgacaacttaaatttattgtaactgcccaacaaaggaagtagagttggaggtttatctgcaagaggtttttttttgttttgttttttgtttagtagctccacctcttaatttattattattattcattttattttattttttgagacagtctcgctctgtcacccaggctggagtgcagtggcacaatcttggctcactccaacttctgcctcccgggttcaagcgattctcttgcctcagcctcctgagtagctgggattacaggcgccctgtcaccacgcccagctaacttttgtgtttttagtagagacggggtttctccatgttggccaggctgctctcaaactcctgacctcagatgatccactcacttctgcctcccaaaggcgggcgggcgctgcggcggccgcggctgctgcttcctcgggccattttgctgtggagcggcggggaggaggagccgccgaggagaccccgggcgaggagctgcgagccggaggaggccgcgcggactccgggctttccgccgtcgcggggatctcggggggcaaagggatcgccggggagggggaccagagagccgcgcccgccgcgcggagcgccccttcgcgtcccctgcaccatgagctggggcaccgagctctgggatcagtttgacaacttagaaaaacacacacagtggggaattgatattcttgagaaatatatcaagtttgtgaaagaaaggacagagattgaactcagctatgcaaagcaactcaggaatctttcaaagaagtaccaacctaaaaagaactcgaaggaggaagaagaatacaagtatacgtcatgtaaagctttcatttccaacctgaacgaaatgaatgattacgcagggcagcatgaagttatctccgagaacatggcatcacagatcattgtggacttggcacgctatgttcaggaactgaaacaggagaggaaatcaaactttcacgatggccgtaaagcacagcagcacatcgagacttgctggaagcagcttgaatctagtaaaaggcgatttgaacgcgattgcaaagaggcggacagggcgcagcagtactttgagaaaatggacgctgacatcaatgtcacaaaagcggatgttgaaaaggcccgacaacaagctcaaatacgtcaccaaatggcagaggacagcaaagcagattactcatccattctccagaaattcaaccatgagcagcatgaatattaccatactcacatccccaacatcttccagaaaatacaagagatggaggaaaggaggattgtgagaatgggagagtccatgaagacatatgcagaggttgatcggcaggtgatcccaatcattgggaagtgcctggatggaatagtaaaagcagccgaatcaattgatcagaaaaatgattcacagctggtaatagaagcttataaatcagggtttgagcctcctggagacattgaatttgaggattacactcagccaatgaagcgcactgtgtcagataacagcctttcaaattccagaggagaaggcaaaccagacctcaaatttggtggcaaatccaaaggaaagttatggccgttcatcaaaaaaaataagcttatgtcccttttaacatccccccatcagcctccccctccccctcctgcctctgcctcaccctctgctgttcccaacggcccccagtctcccaagcagcaaaaggaacccctctcccaccgcttcaacgagttcatgacctccaaacccaaaatccactgcttcaggagcctaaagcgtgggctttctctcaagctgggtgcaacaccggaggatttcagcaacctcccacctgaacaaagaaggaaaaagctgcagcagaaagtcgatgagttaaataaagaaattcagaaggagatggatcaaagagatgccataacaaaaatgaaagatgtctacctaaagaatcctcagatgggagacccagccagtttggatcacaaattagcagaagtcagccaaaatatagagaaactgcgagtagagacccagaaatttgaggcctggctggctgaggttgaaggccggctcccagcacgcagcgagcaggcgcgccggcagagcggactgtacgacagccagaacccacccacagtcaacaactgcgcccaggaccgtgagagcccagatggcagttacacagaggagcagagtcaggagagtgagatgaaggtgctggccacggattttgacgacgagtttgatgatgaggagcccctccctgccatagggacgtgcaaagctctctacacatttgaaggtcagaatgaaggaacgatttccgtagttgaaggagaaacattgtatgtcatagaggaagacaaaggcgatggctggacccgcattcggagaaatgaagatgaagagggttatgtccccacttcatatgtcgaagtctgtttggacaaaaatgccaaagcatgctccctgcggccctgccctcccgcccagcccgggccacctcgtgggggacaagtctcgccagcgcccacccccatggctcggtggcctggggaggtccacactggaagtcgaattccagctcgccttgttgactcgcctgtgtccaccggccatgaggagcccacgcctgtcctccccatcactttcctgtccctgagaactgtagatcatgcgcttgtgcatggtgagtgtggcagtccccacagctccacaatgggctcccccgccaacggggacgacagggatcttcaggaacttctgacctcaccaagtcaagtggaccactctccactccacgaggatgtgaaacggttctttaaaatgggattttagagcctcgggaatgcatgtgcgtcgcatctttcatattatgggtcaggatagattcatttcttgcaacatagtggaaaagatataagctgcagtaatttgctctttgaatgaccgtcacccccagtataggatatgcttgtatccccccgtcactcctccgcctgttttttaaacttttccaccacctgcgtccaaaaagaatgttatagcgagtgctcttaaatgttgaacctgggtgttgcttccgggccagtctgcgtggctccatgaaaagctcactgctgccccagccgggcttcttagaggaggtcagttgtcctatgtatcatcatttactctgggaatcctactgtgaaatcatgtctgtatttttctggagcagttcacatagagtagaatgtggaatttcccgtgaacgtctccttcctcccccgtatctgccgcctgtcacttcgccaccgtgctagaatactgttgtgttgtaagatgactaattttaaaagaacctgccctgaaaagttcttagaaacgcaatgaaagggaggaacttgtcctttacccagtttttcctttgtaggatgggaaagtataaaaaggcacagaaggttgtcatgggctgttccttgggggtttttatcctgctcaccgtggagataagcctgcggcttgtctaaccagcgcagcgcaaaggtctcaatgccttttggtaacatccgtcattgcagaagaaagtttacacgacgtcaaaaagtgacgttcatgctaagtgtttttccagaaatattggtttcatgtttcttattggctctgcctcctgtgcttatatcatccaaaaactttttaaaaaggtccagaattctattttaacctgatgttgagcacctttaaaatgttcgtatgtgtgttgcactaattctaaactttggaggcattttgctgtgtgaggccgatcgccactgtaaaggtcctagagttgcctgtttgtctctggagatggaattaaaccaaataaagagcttccactggaggcttgtattgaccttgtaactatatgttaatctcgtgttaaaataaaatataacttgtggc

SEQ ID NO: 700 - protein, 822 aa, Homo sapiens
MIHSLLPPKGGRALRRPRLLLPRAILLWSGGEEEPPRRPRARSCEPEEAARTPGFPPSRGSRGAKGSPGRGTREPRPPRGAPLRVPCTMSWGTELWDQFDNLEKHTQWGIDIKYIKFVKERTEIELSYAKQLRNLSKKYQPKKNSKEEEEYKYTSCKAFISNLNEMNDYAGQHEVISENMASQIIVDLARYVQELKQERKSNFHDGRKAQQHIETCWKQLESSKRRFERDCKEADRAQQYFEKMDADINVTKADVEKARQQAQIRHQMAEDSKADYSSILQKFNHEQHEYYHTHIPNIFQKIQEMEERRIVRMGESMKTYAEVDRQVIPIIGKCLDGIVKAAESIDQKNDSQLVIEAYKSGFEPPGDIEFEDYTQPMKRTVSDNSLSNSRGEGKPDLKFGGKSKGKLWPFIKKNKLMSLLTSPHQPPPPPPASDSAVPNGPQSPKQQKEPLSHRFNEFMTSKPKIHCFRSLKRGLSLKLGATPEDFSNLPPEQRRKKLQQKVDELNKEIQKEMDQRDAITKMKDVYLKNPQMGDPASLDHKLAEVSQNIEKLRVETQKFEAWLAEVEGRLPARSEQARRQSGDSQNPPTVNNCAQDRESPDGSYTEEQSQESEMKVLATDFDDEFDDEEPLPAIGTCKALYTFEGQNEGTISVVEGETLYVIEEDKGDGWTRIRRNEDEEGYVPTSYVEVCLDKNAKACSLRPCPPAQPGPPRGGQVSPAPTPMARWPGEVHTGSRIPARLVDSPVSTGHEEPTPVLPITFLSLRTVDHALVHGECGSPHSSTMGSPANGDDRDLQELLTSPSQVDHSPLHEDVKRFFKMGF

SEQ ID NO: 701 - DNA, 90508 bp, Mus musculus
  misc_feature (1)...(90508): n = A,T,C or G
cagaaaccggaagtatcctgtctctggttgttccttggttcctgtgacctgagggatccaagcgggtccctctgaacagaagtggtggtcttacctgtgctcacaggtgtatctacacccctgggagaccagctctctcccagtggtgtttgggtatggagtgctgtgtcacagaatcagctctgggtgctatggctgatagtttcttgatgtatggttgatatggaagggcccagcccactatggaaggtttccctgggctggtggtcttggggggtgtaagaaagcagggtgagcagtccacagacagcaagctagtacacagccctcctccttgcctgtgcttcagctcctgcctccaccttgagctcatgctatgacttccctcagtgatggactgtgctgtggaactgtaagctgagccaaaccctctcctccccaagctgattttggtcatgctgcttatcacagcgatagaaaccctatgtaatggctaagacaccacaagtcagtgtctcagcttcactaaggatctagttaatgtgctccagcagcggcgtgcatctgtgctgcaagtggctgtatctgtcatgggagtcactggtcattctagcagcaagcacaggtcaatgaccagtggatggtcaacaacagctctctggacaaaactggtctgagagtctgatagttatggtgccacacagggttaggatgtgagtggctgacagtgtcatcacattttgtctgagatagatgtcatactctgacacagatgtcacaactgcagattggattacaggtgaaagattagctttctactgggtacaggtttttaccaaggcttccatgttcaagataccagtagtgtccatatgataaacccatctatactcctagctatagggtcgctgactgttggttttctatagctgtaacgttctgatatgtcatttcatcacatcttagtgccaagatttcctgagggagacactgtctctagttttggtttgtaccttgtatagcttttctgttgtcatgctttctgtatttctttgctatctgtctgtctatctatctatcatgtaccatcctatctattttagttttttgagacaaggtttctctgccctggctcttccagaacttgttatgtatcctgtggtccctcagaaggaacaggaaaactgtaggatgaactaaaacccaagtgtctgggactacctgtgagggagtttcttcattggatcatttgcaatgagaagatctaccctaaatctgggccacaccttctggtggcagcacacataaaaggaggtgggagaaggaagctttttggttttgcctgcttgctttggctcttgctggcaggttcatctatgtggacactgatgctgatgcactccttcactggtgtttgaacctacttcttcaggattccaatgtagactgaagaccaacagctctctaggaatcccctgggacttctccactagactgagacttgtcagacatccagtctcatggactaaacagctgttagccaatccattgagagacagcctctgtttgactacacagccacttcctgtaggtcactcataagagtgattaaatctctacactaaaatatctatattagactcactaaatcttgatatactcaaatacactcagatgcatacacccctccccccacagatacacacacatacagatgcacacacacatacagacactcagacacacatatgcacatatttatcctgttaattcagttctattcctctggggaaccctgactaatatattctcctccattttctgtatctcatatgaggagaattgcatcatcctttgatctgctggttttgcgatgtttgagatgggcaatctggagtggttttgaaatatctatgtgtccacacgttcctggtttaatttggtaagttcataagaggcaatgcttcatttgtgtaaataagttacttattcagcacctcatgatgcacacggggcagatagtatttaggggtagcacacaggcatgtggaaattgaaggacaacttatcatagcttgctccttctgctgtgtgggtcccagacattgaatcagtccttgggtttggcagcaagcacctttacctgctgagccatcctgctggcccaggagatggctgtttattgacacaagtaagatgcagactcactgcctcagcattggtgccccaaatggagaaaactgctggttgaaagatggggtcactcaggacaaagccctgcaggggactctgctgtgtgacatgggatatcttagagcatgtacagcttaaaacattcattctctctctctttttcattattccttcacatcttctctctctcttcctccctccctccctccctccaaagttcctccccaaccccctttatttcttcagtttttacctctttctgtttccttcatcttttcccctttccttctgatgtcatttccctataatgactgatggttaagatgagagtatcctgttgatacagaacctccatcatgccatactcccttcttgggagtaccttactaatggttgttagtccctggccttttctgtaaatgtctctgacaggactactcagatgtgttgtgccccactgtctcctacagggacccaggccacctctgaggtaccatgactaagtttcccttttctagtgttctgctcatgcccatttcttcctagatatgggtctcatatttaccctgcagttctgtggagttaacactatctcttttgcgtctttattaaaacacctcccaacccacattggacctgtgagtttccctacctgtcactggataaggagctggggaaaggcctaggacagatcctagctctgaaaaccccacacttttggctttgaagaagtcacttccctacctacatctcacttctgcgtttgtctatgagggtaaggctggctgtctttgggaatccagggctttctggttgcacaggatttccttcatccagtgtttctgtgggaaaggctcacctaacactgaccttgcactccttatggttaattctgttccccaccaaagatgctaggaggaaatttcccatgtcagaatcttctggatggatatttcagattctcccaaaggccacctgacctcagcactcagataaggagaatctgacaagaggaaggaccttgttcagaggtgggagaatgcaaactgggagtggctgctccagcacagtcagtaatgaccttaacttgggtttgctgttggttcattacccggggtgacctgcatactgacgtgtcctcagaagcagtgttacagaaaatctggtaactaacagtcaaggcatttactcagtcgcagctagttgtttaacttttgagagcttgatggtttctctcaaagaattaaaaacatatctaaagcagacccatggtattagctcacattttaaggaagcaaatttaaatctaaacaacgcatgaatttttttctgcccttggctctataaactgaacaagtccacaacacaaacgcaaataaaaactttagcatcaaattttaaaaatttcttttcttttttttttaaagatttatttatttattatatgtaagtacactgtagctgtcttcagacaccccagaagagggagtcagatcttgttacacatggttgtgagtcaccatatggttgttgggatttgaactcaggaccttcggaagagcagtcagtgctcttacctgctgagccttctcaccagcccttaaaaaatttcaaatggcataaaatcaaggaacagattaaacttgtgacattgtgcttcacacttaccatttttctgtattatattttaattaattaattaatttctttattttggattacaggttgttttattagacctggaagacttgctggagatggactattcagcttgagtttctgaacacagaagcagaagtcttttaattttatataccatttataacagtttccaacaacaaagtatgtttgcaaagtgttctgtttcctcatctcttccaccctctccccatttttttggtggtgctggtgttgaatccagggcctggtacaagcaagctatgtgagttcttgttcactggcctctctctagtcccctttactttgtctctctttcttatgtgttccgtgtggaagaaaaggaaggagagcaggtactagtgtgtcaggaactagtgtagagactagagggcaatgttttgggaaaatgttctttcttaccttgtttttaggcagggattttcctctgtctgtctgtctgtctgtctgtctcccctctcctttcaactcttccgtgtgtgtgttcaggtggttgtgggagccagaaggggccagttgattccctagggctgcccagtgtggctgttgggaaccacacccacaagtttctcataactcttaagtaattttttctttttaaagatttattttatttatatcactacactgtagctttcttcagacacaccagaagagggcattggatctcattatatatggtcgtgaggcaccatgtggttcctgggaattgaactcaggacctttgaaagaacagtcagtgctcttaaccactgagccatctctctagcccatactatccttttttgggggtggggggtggggctcaagacagggtttctctgtatagccctggctgtcctggaactcactctgtagaccaggctggcctcgaactcagaaatcacctgcctctgccttctgagtgctgggattaaaggcgtgtgccaccatgccccgccagcccatactcttatgcaattttaactgtggagccatttctccagcccaaggcagagtctttcttgttactacagctttgatgtgcactctaggacagtaagtccgtggactttgggccagttctcctgtctccctcccatattattgtgtgtgtgctggattacaggtgctagaattgaactcaggtcctcaggcttgagtgacaagcattttctttcacctgctgagcatcttcctgaccttcgtcttttgattgtaatcacaatggactatcaatcgagctatatcattgtaagtcagggcacagtgaaaccactgaactagaccacttctggggagaaaggaaggcttattggagatcaaactgatcaaactgtttaagctaactctcagggacagaggacagggggaggggagagagagagagagagagggagagagagagagagagagagagagagagagagagagagagagagagagagagagagactctaggcctgaagaggactttgaaccctaaaagcccacctgcagtgactcacttcctccaacaaggccactactgttctaacattctaacctatcagagttccaaatcctgatgactaagcactcaaatataggagcctgcaggaggggtaggaggtatcttattcaaaccacaagagaaaatctgtgaatctcagcagctacccaggtgaagaaaatgaggaagacaggacatttgtcacttgaaggtagaatggttgcatgcatgagcctggaccatgctccccaccatgataatgatggactaactctctgaaactgtaagcaagcccccaattaaatgctttctttttttaagacttgccttggtcatggtgcctcttcacagcaacagaatagctgtcacggagttttgttttcctttttgtttgtttgtttgtttgaactctaataaagttgtctttgagtttccttttgagtccattcttaaattatttttattaatgagactaagagcccaggattggacttcaatttccctagtaacacatggcaactcctttgggactcttgttttttgtagaactatcactgttttctccaacagttgtttatttagtgtcagaggcagaagctcatgtgtggagtcagagaacaactccacagagtcagttctctctgtccaccaagtgagttctgggaactgaactcaggtcctcaggcatagtagcaagcaaacctaactcacggagccatctggccagcccttgttttcttattttgagcagggtccctagctacatcaactgggctagttttgattttgaagcaatctcccacctctgcctctcgaatgctgggattatagatgtgtggtgctatgtctgctcctcaatcccccaccccaagcaggatgtaatggagcgcgcaccctcccccccaaactctaagtatttgggaggtggaggcaagagttcagggtcagccatagttttgtgacaagttcaaagccaacccgagctaagcaacatattcccaaacaaactataaagctttggtaggtaggacctggagagggcaaaccatgatcagaaccttgagtgaaaatattattttaataaaaacaaaacaacagcaacaaaagctcctcctgtctagttgacagcgtgttctcaattgtggtaactgagaagtggaaatgaaagcacttggcgcctcggcttactatttgaactgtggttactaatgagctccagtgagcacactggcaagacaatgctaggattgatctccagcaaagggctcattgtattggctgcctgtcttctcatggttatgataaaacaccaagcctgaaagcaagctgtggaggaaagggtttctttggcttacacttccacagcactgaaagaagtcaggacaggaacccaagcagggctggaacctggaggcaggagctgatgcagaggccatggaagggtgctgcttactagcttgcttcccaaggcctgctcaccctgctttcttatagaacccaggaccgccgccatggggtggccccacccacagtgggctgggccctcccccatcagtcactaattaagaaaatggcctacagctggatcttaaggaggtattctcttcattgaggtttcctcctctcagatgacttcagtttgtgtcaaactggcgaaacaaactagccagtaccactgcatggctccacattcctgagccgctgtgtggggcctacgactccattctgctgctgctgtgttccactggggttttccaagttctgccgctgtacttggtgagtacgtaggctctgtgcttacctcaggaaccttgtgtcccctttcctttggcataggaccctcaacaatgtgtgcaatctccacgacatcaagttacagctttaataagttaataaactttaatacgtttcttagtctgtgacaatgatgttcaagggctggagagatagctcactgttaaagcgcacctgttgctcttgtagaatggtgttacagctctgaccggaatagtgttagctagtgttacagctcctccagggtggggagagtgtttccccgctgcaagtgttataactctgctctggcccggcacaagaacccaggaaggtggtggctgcctcggcttgtgggggagaagcagcagagacagtagatgaaaacagtgttgtcacagctttccttggggcggagctttccatagagtttgggctttttactttgatggctggccgcgggtgggggtggggggctgagaggggcggggagggaacgaggaggggcagcgagctgagtctgaccaaccattagggaagtgagagtggtctgtgggcggaacctgagtgttggcgtaaggaggtcctcaggggaggggcctagctactcatgagccttctggggcttacaaagaggacctaggttctgttcccacgcccacaaggtgactcgaaccatcttgaattccagatcttgggtttccgagtagtttcctttgaacttgtgggacacccaagcacacacgttgtatatatacatacacatacttgcatgcaaaacactcataaaacaaacaaaaactttaaaaatcttattttttttaaaactataaccaatggtggatattttaacaaaagcaaaattatacccttttatctggggatgaaacagatccaattgagcctgagggtggagcaaaccagatgagggcagatgtgcttgttgggcatagaggtataaactctgccacgattattttgggttcctttctaaataattacagaaggtcgcagtggctctgtataacccgatcagaggacacccaaggctcgaaggccacaagcaagctatgctctagatgcctcttggccagttttcaccccagagctcaggactgggagacctagcctagtaagcatccatgggcagtccttagcctgtagcccgtggcctttctcctttcttcccagagaaacacccagtgtggaaagaccttccaggctcccaggtgtctggctgtaagccaagccagtgtccatgagacctttcctcattgcatagggtgtcggttccccaccccatcacccagtaacaccccccccccccccacacacacacccgtagttcctcctctgcagcccctatcaccatgggcaggtcagaagacacaggcggccgtgagcgatttcttttctttttctttttcttttcttttttttttttttttgctggtttcaggcttttttctgcctgagtggagatgaaacatcactcctcccacagatgggaaagaggtgcaggttggggtaaagtgagggacacccgatgcatcacacgtgcatcacgccggacgttgtgttgggggtgggggtgggagtggactctctaggctcccactcctcgggtcggcgcacgccacttgcctgcgccctaagccgccgagctctgcaggggccagaggcgcgcaccccacccgacacacccggacagagcagcggccgggtctcctacagcgcagggcgccgcccgcccgcccgcccgcccgcgtggtcccgtctccagcgcagcagacaacacacacccggcctgcttttgcggatcaggtgggnnnnnnnnnnnnnnnnnnnnnnnnnnnnnnnnnnnnnnnnnnnnnnnnnnnnnnnnnnnnnnnnnnnnnnnnnnnnnnnnnnnnnnnnnnnnnnnnnnnnnnnnnnnnnnnnnnnnnnnnnnnnnnnnnnnnnnttgtcctggtcactcgatcatttcctctgtatccacttctgaactctaggctctgtcccaccctgaacagtgtcgctgcatctgtttgcttatgggggtctcccgccaccttccctcgctatccgaatagctgatattcagggcagcacagggcagcacagggcagggcagggcagggcagggcgagtagggcagatcagatcctgggaccaccggtactaaccagtgagtgtagaaagcaggaggtgtcttttcctactgtagttaggacagggcgggttggctcttcttatggacaagatggaaaaggggtgcaggtaggggcaaagtgagagacactcgaatttgagagacagacagactcctaacagtgaaggaaggaccaagccaaaatcaagcctgggcaaagtctcaggcactaactttgctgtgttgggtgatgggaggtaatctcgtcacaacttttcaaaccacctcgttcccactgcaaggagacaccatcaagtgtttgaagatggcaggggaacctctcaacaaaacacacacacaaacgttttattattttatatttattttgcatgcaaagtactgtgtttcattatggcattttcatacatatgcgattgcacaaactcttgaaaatcatccaagaaacagcaaagcgggaaataatgttgtggggggggggcgcggaggagagagaacagagactggagagagtgctgtcctccttgctgcgggggccaggaagaggctaggagggcggggatgtcaacgccactagctcctccctcaggaaggaccccagggactcttatttttgtagttttgcttgtctgggccactatcggccccagaacagatctgactgcctctttcattcgcccggaggtagataggtgtgtcttaggaggctggagattctgggtggagccctagccctgccttttcttagctggctgacaccttcccttgtagactcttcttggaatgagaagtaccgattctgctgaagacctcgcgctctcaggctctgggtaggcaaaggcgagggggctcgccatggctcgggttgtccagggattggggcatcaggactacgggagtctctgccttttgatagtgcttccttacagttatttttgggagtagttgcttcttcctgatgggagccgcgtgcgggtccaagctatcttttgcaagtaacaggtgtctggtgactaaatgcagggctgaacacttcacttgggattacctggttccagggactttgagtattggcgcaggccccaaatggcctaggaggggtacctggagaccctggctcctgctcctgtgatcttactacatagaaccgattcttttatttctactttctgtgttaggaacgccccaagaggatgttttggggaggcctcctgtccccattccctgtgattagggtcagttttcagtggaatgcctgagatcagaaggcgggagatcaattgattactgtcaatggccccctgtggctaaactttaccggaagctttctcagtcacagagcaggaaaggccgccttgcactggccatactgactctgagcagccatttgcccggtttctgacacttctgagccaggggctgaccatgggttttattccctgtgcacttctgggtcttggtgaaacttttagtgtacatgggtctcttaggttccccagcctaacaggataagcttggcactgttggctggatttatagagaaggaaatcaaagttgggagaagccaagtcactggtttatgggtgctcagggtttggattgaatctgaggttggaatgcactccagccagcctctaaggcttgtgtgcttcctgtttgtttgtttggagtgtgtggttttgttttgttttgttttgttttgttttgttttgagacagggtttctctgtgtagccctggctgtcctggaactcattctgcagaccaggctggcctcgaactcagaaattcccctgcctctgcctcccaagtgctgggattaaaggcgtatgccaccacaacctggttgctcactttctattcagcatctcccaccatggcaagaaaacgactaaggaacagatggcatgactctggggggaagggctggggagagtggaagggaagaggtagtgggtggggctgagcatttcaacaggtgcagttcaggtataaatattattttttgaagtgaatatgctttctgataaataatcaggggtctttacaagttatttactaatttttaattacactctaatttacgtacactaaaatacataaaccgtaagcattcttggttttaatgagttggaaggtttttagagggacagtccttgtgtttggtctaggctggtcattttctgagaagtggctgaagtcttgtgtgacaaaacttttgccaggggatacagcacacctgtctactcacctggatagtgagtccagggcagaccaaaatacggataccaccaaaatccaacttggcggaccccagagctttattaatgttatttatgggaatataggtgaggggttacttacagaagtatacatgactcatggatagctgtatcatcaaaggacaggtgacaagtcacaaaagctgggaacctggagcatagccttcagataattcaatagttggagagtaccctttccaggtaactgatctaaacctggtctaggcagtccagctggtttctgcttcttccaggcagctggtctggtctcagagtcttctttgcagctcagcttctatcagtctgagagtaactctcagtttttattgcttgctcttgtagggaggggcctagtgaatctggtcagtttcagggacttcctggatctgttttttggttttttgtttttttttgttttttttttttttggttgttgcttacctccctgtttaaggaactcccctgaagtactgaatattttaatctaggaaagagaatgttatacaagtcttgagttgtgtgtctggggaaggggtggagttcattgatacagacacctgaacccaggacctttaaatacccagttgggttgttgtaatccactgagttatactctaagctcctgatattctaccactgagcaatatcctctagcccctgtgatgttttgagatagggacttgctttgtagggcagactggccttgggttctctaattttaagggagaagacaatagtgtgtaatattattataatctttgggactgattagagtgaagttgtgcacagtggtgcgcacctttagtcccagcacttgggaagcagaaataggtggttctctgtgagtttgagacaatcctggtctacaaagtaagttccaggacagccagggcggttccacagagaaaccttatctctggaggaggaagaggggaaagatggggtgggggaagaatgttatgtctcccagggccatagatatgacttagattccattctatgactcttagaaaggagctcacccttaatgggcctcagaaaagtgcccagacctccccatctatgggagaggtccatcttcagtggcttccaagctcattaatgcctgtctagctacctaatatttgcttctgaagagttgagacctaacatttaggacatgggtgcctggtggatctgggtacttgcatctgaaatggaggcataggagggctcagcatctccacacttgctgaccttcaggcccttgaggtaaccctggggagtcagagagaagaaagtcagcgggtgggtcttttgtaaaaagacaggagatacggtagtgtagcccctggggtgaacgggatcattactaagatcatagcagacagaactcatttctgccacagaaatctggacactgtcttcgtggactaaatctgattttgtggatttgtgtaaaactgacaaaccacttagcaggattattgggatgcacagtgttttgtttatggtcagggaaagctgtgttgaccatcttcttttcagaatgtataataatagatctgtctctccatgactcctctaatctagaggacaggtaacttgcaagaactttcaggaccctctgggaagtgtccaatcatcccttacagcctggttgactcaggtagggaccaaaataatggccattcttttagtccctggttcttcatgggctctggtccaaggttggttgactactccccccgcctggccccttcccccggaaggttacttaggacagccctgaagagaagcttggacatagggcacatttgatcacttttaccttttataaggcaggcagatccagcagcaggaggatgtacatattttaatttttatttatttatttatttatttatttatttattttgatcataaagcattcttttccctttctttcttccttccttccttccttccttccttccttcctctctctctctctctctctctctctctttctttctttctttctttctttctattttagtttttcaggacagaatttcactgtgtggccctggctgttctggaactcattctgttgaccaggctggcctggaactcacagagatccacttgcctctgagtgctgggattagaggcatgtaccaccctatgatctgaaagcttcaattacaagtgattggtaactctaacgagttgaagtaaaccctagggacactgtgcagggccaaatccacttctctcttttttaattctcgaggatcaagtttgtccttatcatagagagcacatttgatgagtgaatcatcgttcaaggaggaggaaggctagggagcctgcgaactgtggctggagcatgcactactaggagagccttttatcctaggcacaaatgtgttggaggcttatgggtctagaggaatctctattccctttaggacccagttggtaaactgtttcaagacctaaagaaatcactgttgttcctgatatatttcctctccaataaatgccagccacgaccaaagcaaaggccctaaaacccatagggaccgaaaagaaagcctggagatcaaattgagagaagagccaaagggtaggcaggctcgcttgggccgccatcaggaacctccctccccgagccgcagtgtctggccgtccgttttgtccttgtttatgaatctcctgtagatgacagacacggtctcttttgcagggtcttcatcttgctgttaaaagaacttcgacacaggttccacgggaaactcattttatgaaaaatcgcaagaaaaacaacagggcaggcaaggcataaatcttgttagggctggaaggagctggctaagtgggggaaagtcaggccttttgccatgaggtccaaggtaggctccgcagtggggctgcaagcggcagtgcagggtgggaggtgtcagcagagaaacactgattcagacagggtcacacggagcgtgcttccaaaggaaggacagaggagggtctactgctgggtttctgtgtcaacttgacacaatctggagttatcacagagaaaggagcctcccttgaggaaatgccgccatgagatccagctgtaaggcattttctcaattagtgatcaatgggggagggcccaacccatggtgggtggttccatccctgggctggtggttctgggttctttaagaaagcaggctgagcaagtcttggannnnnnnnnnnnnnnnnnnnnnnnnnnnnnnnnnnnnnnnnnnnnnnnnnnnnnnnnnnnnnnnnnnnnnnnnnnnnnnnnnnnnnnnnnnnnnnnnnnnnnnnnnnnaccaccaccaccaccaccaccaccccatggcctctgcatcagctcctgcctgcagattcctgccccgattcctccagtgatgaactattttggtaatggtatttcagtatagcagtagaaaccctcactaaaatacagaaaaggggcagttagactttttatattagaactcaggaaagtgaccaggcaacgaaatagaagcaatgacctttatttattttaagtttttttgagacagggtctcacttaacccaggctggcctagattatatgtagttaaggacggtcttggatctctgacttcctgcctccatggagtgctggatgacagacacggtgtagtgctgaggattgaatccaggactgtgtgggctaagaaaggacactaccaactgagctacatccccagccctatggcttctgcagttgttagtacctgtgtgagcaactacccaaaatgagataaaatattttcttcaggcctagagagattgctccgatgttgaagcatgcgttctgctcttctgaggacctgagtttatattcctagcactcaagtcaggtggctgataaatgcttgtgactccagctccagggatctgataccttcctcccctctgagggtacccgcatgcttgtgcacacaccccatatagacacacacacacacacacacacctcattaaaaataataaatcttaaaaaagttatcaccctagaaaatacacattttctccttcactgcccgccctccccccacaatgccgccatttcctggctttgttgcccactcatgttttttgttttttgctttttcttttgcctgatcctggacttcgtgtaagtaaaatcaggcatatctagtttatttcactcgcacaatgagttaagattcaattgtagtgtgcttatgagtaattcgattgttctattgttaagccatttgcttatctcttctctcattaatggccaggtcagtcccttccagtttggggttaacatgcaaacattcttgctaaagccttttagaaagttggtgctcatccaggagtgaaattactcccatagcagaactggagttgttgagatatgccgtgtgtgtgtgtgtgtgtgtgtgtgtgtggtgtgtgtgtgtgtgtgtgtgtgtgtgnnnnnnnnnnnnnnnnnnnnnnnnnnnnnnnnnnnnnnnnnnnnnnnnnnnnnnnnnnnnnnnnnnnnnnnnnnnnnnnnnnnnnnnnnnnnnnnnnnnnnnnnnnnnnnnnnnnnnnnnnnnnnnnnnnnnnnnnnnnnnnnnnnnnnnnnnnnnnnnnnnnnnnnnnnnnnnnnnnnnnnnnnnnnnnnnnnnnnnnnnnnnnnnnnnnnnnnnnnnnnnnnnnnnnnnnnnnnnnnnnnnnnnnnnnnnnnnnnnnnnnnnnnnnnnnnnnnnnnnnnnnnnnnnnnnnnnnnnnnnnnnnnnnnnnnnnnnnnnnnnnnnnnnnnnnnnnnnnnnnnnnnnnnnnnnnnnnnnnnnnnnnnnnnnnnnnnnnnnnnnnnnnnnnnnnnnnnnnnnnnnnnnnnnnnnnnnnnnnnnnnnnnnnnnnnnnnnnnnnnnnnnnnnnnnnnnnnnnnnnnnnnnnnnnnnnnnnnnnnnnnnnnnnnnnnnnnnnnnnnnnnnnnnnnnnnnnnnnnnnnnnnnnnnnnnnnnnnnnnnnnnnnnnnnnnnnnnnnnnnnnnnnnnnnnnnnnnnnnnnnnnnnnnnnnnnnnnnnnnnnnnnnnnnnnnnnnnnnnnnnnnnnnnnnnnnnnnnnnnnnnnnnnnnnnnnnnnnnnnnnnnnnnnnnnnnnnnnnnnnnnnnnnnnnnnnnnnnnnnnnnnnnnnnnnnnnnnnnnnnnnnnnnnnnnnnnnnnnnnnnnnnnnnnnnnnnnnnnnnnnnnnnnnnnnnnnnnnnnnnnnnnnnnnnnnnnnnnnnnnnnnnnnnnnnnnnnnnnnnnnnnnnnnnnnnnnnnnnnnnnnnnnnnnnnnnnnnnnnnnnnnnnnnnnnnnnnnnnnnnnnnnnnnnnnnnnnnnnnnnnnnnnnnnnnnnnnnnnnnnnnnnnnnnnnnnnnnnnnnnnnnnnnnnnnnnnnnnnnnnnnnnnnnnnnnnnnnnnnnnnnnnnnnnnnnnnnnnnnnnnnnnnnnnnnnnnnnnnnnnnnnnnnnnnnnnnnnnnnnnnnnnnnnnnnnnnnnnnnnnnnnnnnnnnnnnnnnnnnnnnnnnnnnnnnnnnnnnnnnnnnnnnnnnnnnnnnnnnnnnnnnnnnnnnnnnnnnnnnnnnnnnnnnnnnnnnnnnnnnnnnnnnnnnnnnnnnnnnnnnnnnnnnnnnnnnnnnnnnnnnnnnnnnnnnnnnnnnnnnnnnnnnnnnnnnnnnnnnnnnnnnnnnnnnnnnnnnnnnnnnnnnnnnnnnnnnnnnnnnnnnnnnnnnnnnnnnnnnnnnnnnnnnnnnnnnnnnnnnnnnnnnnnnnnnnnnnnnnnnnnnnnnnnnnnnnnnnnnnnnnnnnnnnnnnnnnnnnnnnnnnnnnnnnnnnnnnnnnnnnnnnnnnnnnnnnnnnnnnnnnnnnnnnnnnnnnnnnnnnnnnnnnnnnnnnnnnnnnnnnnnnnnnnnnnnnnnnnnnnnnnnnnnnnnnnnnnnnnnnnnnnnnnnnnnnnnnnnnnnnnnnnnnnnnnnnnnnnnnnnnnnnnnnnnnnnnnnnnnnnnnnnnnnnnnnnnnnnnnnnnnnnnnnnnnnnnnnnnnnnnnnnnnnnnnnnnnnnnnnnnnnnnnnnnnnnnnnnnnnnnnnnnnnnnnnnnnnnnnnnnnnnnnnnnnnnnnnnnnnnnnnnnnnnnnnnnnnnnnnnnnnnnnnnnnnnnnnnnnnnnnnnnnnnnnnnnnnnnnnnnnnnnnnnnnnnnnnnnnnnnnnnnnnnnnnnnnnnnnnnnnnnnnnnnnnnnnnnnnnnnnnnnnnnnnnnnnnnnnnnnnnnnnnnnnnnnnnnnnnnnnnnnnnnnnnnnnnnnnnnnnnnnnnnnnnnnnnnnnnnnnnnnnnnnnnnnnnnnnnnnnnnnnnnnnnnnnnnnnnnnnnnnnnnnnnnnnnnnnnnnnnnnnnnnnnnnnnnnnnnnnnnnnnnnnnnnnnnnnnnnnnnnnnnnnnnnnnnnnnnnnnnnnnnnnnnnnnnnnnnnnnnnnnnnnnnnnnnnnnnnnnnnnnnnnnnnnnnnnnnnnnnnnnnnnnnnnnnnnnnnnnnnnnnnnnnnnnnnnnnnnnnnnnnnnnnnnnnnnnnnnnnnnnnnnnnnnnnnnnnnnnnnnnnnnnnnnnnnnnnnnnnnnnnnnnnnnnnnnnnnnnnnnnnnnnnnnnnnnnnnnnnnnnnnnnnnnnnnnnnnnnnnnnnnnnnnnnnnnnnnnnnnnnnnnnnnnnnnnnnnnnnnnnnnnnnnnnnnnnnnnnnnnnnnnnnnnnnnnnnnnnnnnnnnnnnnnnnnnnnnnnnnnnnnnnnnnnnnnnnnnnnnnnnnnnnnnnnnnnnnnnnnnnnnnnnnnnnnnnnnnnnnnnnnnnnnnnnnnnnnnnnnnnnnnnnnnnnnnnnnnnnnnnnnnnnnnnnnnnnnnnnnnnnnnnnnnnnnnnnnnnnnnnnnnnnnnnnnnnnnnnnnnnnnnnnnnnnnnnnnnnnnnnnnnnnnnnnnnnnnnnnnnnnnnnnnnnnnnnnnnnnnnnnnnnnnnnnnnnnnnnnnnnnnnnnnnnnnnnnnnnnnnnnnnnnnnnnnnnnnnnnnnnnnnnnnnnnnnnnnnnnnnnnnnnnnnnnnnnnnnnnnnnnnnnnnnnnnnnnnnnnnnnnnnnnnnnnnnnnnnnnnnnnnnnnnnnnnnnnnnnnnnnnnnnnnnnnnnnnnnnnnnnnnnnnnnnnnnnnnnnnnnnnnnnnnnnnnnnnnnnnnnnnnnnnnnnnnnnnnnnnnnnnnnnnnnnnnnnnnnnnnnnnnnnnnnnnnnnnnnnnnnnnnnnnnnnnnnnnnnnnnnnnnnnnnnnnnnnnnnnnnnnnnnnnnnnnnnnnnnnnnnnnnnnnnnnnnnnnnnnnnnnnnnnnnnnnnnnnnnnnnnnnnnnnnnnnnnnnnnnnnnnnnnnnnnnnnnnnnnnnnnnnnnnnnnnnnnnnnnnnnnnnnnnnnnnnnnnnnnnnnnnnnnnnnnnnnnnnnnnnnnnnnnnnnnnnnnnnnnnnnnnnnnnnnnnnnnnnnnnnnnnnnnnnnnnnnnnnnnnnnnnnnnnnnnnnnnnnnnnnnnnnnnnnnnnnnnnnnnnnnnnnnnnnnnnnnnnnnnnnnnnnnnnnnnnnnnnnnnnnnnnnnnnnnnnnnnnnnnnnnnnnnnnnnnnnnnnnnnnnnnnnnnnnnnnnnnnnnnnnnnnnnnnnnnnnnnnnnnnnnnnnnnnnnnnnnnnnnnnnnnnnnnnnnnnnnnnnnnnnnnnnnnnnnnnnnnnnnnnnnnnnnnnnnnnnnnnnnnnnnnnnnnnnnnnnnnnnnnnnnnnnnnnnnnnnnnnnnnnnnnnnnnnnnnnnnnnnnnnnnnnnnnnnnnnnnnnnnnnnnnnnnnnnnnnnnnnnnnnnnnnnnnnnnnnnnnnnnnnnnnnnnnnnnnnnnnnnnnnnnnnnnnnnnnnnnnnnnnnnnnnnnnnnnnnnnnnnnnnnnnnnnnnnnnnnnnnnnnnnnnnnnnnnnnnnnnnnnnnnnnnnnnnnnnnnnnnnnnnnnnnnnnnnnnnnnnnnnnnnnnnnnnnnnnnnnnnnnnnnnnnnnnnnnnnnnnnnnnnnnnnnnnnnnnnnnnnnnnnnnnnnnnnnnnnnnnnnnnnnnnnnnnnnnnnnnnnnnnnnnnnnnnnnnnnnnnnnnnnnnnnnnnnnnnnnnnnnnnnnnnnnnnnnnnnnnnnnnnnnnnnnnnnnnnnnnnnnnnnnnnnnnnnnnnnnnnnnnnnnnnnnnnnnnnnnnnnnnnnnnnnnnnnnnnnnnnnnnnnnnnnnnnnnnnnnnnnnnnnnnnnnnnnnnnnnnnnnnnnnnnnnnnnnnnnnnnnnnnnnnnnnnnnnnnnnnnnnnnnnnnnnnnnnnnnnnnnnnnnnnnnnnnnnnnnnnnnnnnnnnnnnnnnnnnnnnnnnnnnnnnnnnnnnnnnnnnnnnnnnnnnnnnnnnnnnnnnnnnnnnnnnnnnnnnnnnnnnnnnnnnnnnnnnnnnnnnnnnnnnnnnnnnnnnnnnnnnnnnnnnnnnnnnnnnnnnnnnnnnnnnnnnnnnnnnnnnnnnnnnnnnnnnnnnnnnnnnnnnnnnnnnnnnnnnnnnnnnnnnnnnnnnnnnnnnnnnnnnnnnnnnnnnnnnnnnnnnnnnnnnnnnnnnnnnnnnnnnnnnnnnnnnnnnnnnnnnnnnnnnnnnnnnnnnnnnnnnnnnnnnnnnnnnnnnnnnnnnnnnnnnnnnnnnnnnnnnnnnnnnnnnnnnnnnnnnnnnnnnnnnnnnnnnnnnnnnnnnnnnnnnnnnnnnnnnnnnnnnnnnnnnnnnnnnnnnnnnnnnnnnnnnnnnnnnnnnnnnnnnnnnnnnnnnnnnnnnnnnnnnnnnnnnnnnnnnnnnnnnnnnnnnnnnnnnnnnnnnnnnnnnnnnnnnnnnnnnnnnnnnnnnnnnnnnnnnnnnnnnnnnnnnnnnnnnnnnnnnnnnnnnnnnnnnnnnnnnnnnnnnnnnnnnnnnnnnnnnnnnnnnnnnnnnnnnnnnnnnnnnnnnnnnnnnnnnnnnnnnnnnnnnnnnnnnnnnnnnnnnnnnnnnnnnnnnnnnnnnnnnnnnnnnnnnnnnnnnnnnnnnnnnnnnnnnnnnnnnnnnnnnnnnnnnnnnnnnnnnnnnnnnnnnnnnnnnnnnnnnnnnnnnnnnnnnnnnnnnnnnnnnnnnnnnnnnnnnnnnnnnnnnnnnnnnnnnnnnnnnnnnnnnnnnnnnnnnnnnnnnnnnnnnnnnnnnnnnnnnnnnnnnnnnnnnnnnnnnnnnnnnnnnnnnnnnnnnnnnnnnnnnnnnnnnnnnnnnnnnnnnnnnnnnnnnnnnnnnnnnnnnnnnnnnnnnnnnnnnnnnnnnnnnnnnnnnnnnnnnnnnnnnnnnnnnnnnnnnnnnnnnnnnnnnnnnnnnnnnnnnnnnnnnnnnnnnnnnnnnnnnnnnnnnnnnnnnnnnnnnnnnnnnnnnnnnnnnnnnnnnnnnnnnnnnnnnnnnnnnnnnnnnnnnnnnnnnnntgtgcgccaccactgcctggcagaatctaatttttcttattgtatgtgttctttcctataatgtatctaattttaatcatatgtccacctagggagattctccctaaaaggctactgggtggcttagttttgccttattgcccacatattcaaaaggcagttcaagctggattggcggttctgttcttcctgcacttgaatgggaattgtcaaaagctgggtgcaggtgaagggctgaagactgcataggagagtagtagtgtgtgtatgtgtgtgtagtgtgtgcaggtgaaggaactaggttgtcaactgcactgtgggatgctaaactgtctcctgtgcttgtctgccccagaccagctttaggcatagagattcctgggctccagagtcttctgtgttatcaactagggagtttcagacttggttcttgtagtcaacaatctaggcagtttcgggaatgttcctggctttacatatgacaagggtcactggattaatgatggtgccggtagctgagagagaagacaggaaggagggcagagaaaggaatgaattgccttcattgttaagtgttgcagaacagtgctgggagggggtggctgttgggagaaggacaggatgggatggagaggttccattgggcaaatagattaccaaaatacacaaagagaggaggacagagcggaaggagcagtgagtgagttgaatcccagaagcggagccagcaggaacagtggcattttataaaaatgacaattacattcattgtatgtggatgtggatgggtgtgtgcgtgccatggtgcctgtgtggaggtcagtgggcagtctgtagaactttgacctttcttcccgccatgtggttcctgggactcgagctcagatgttcaggcttcataactagtgccttagcctgctgggctaactggccagcccaaggaacctggttttcagatagtttcctggctggcttagaagttgatacatggaccatactggccttaaactcatagatgtccacctgcctctgcctcctcagttctgggactaaggacatacagcaccatgcccacccagccgaagaagtaggtttttgagacaggccttttcagtatagtctatgtatcccagattagcttcagtctctctctgaatccccttgccccccatttcccaagcacataccccctcacctgcctaagcaagtatttttgttatatttattttttaatatgtatttttgattatatatatgtatctacctatatatatatctgtatgtgattatgtgcgcacaagtacagtgcctttagaaaccagaagagggcgctagatccctggaactggaattactgacagttgtgagctaatatgtggtgctgggaactgaacctgtatcctctggaagagcagccagtgctgctgaccaatctcttcagctgcttattttttaattagcatacaaaacaagttttttgagatatcttttttcttttctttcatgataagatattttctttatttacatttcaaatactatcccaaaagttccctgtaccctcccccccgccctgctcccctacccacccactcccacttcttggccctggcgttcccctgtactggggcatataaagtttgcaagaccaaggggcctctcttcccaacgatggctgactaggccatcttctgctacatatgcagctagagacacgagctctgggggtactggttagttcatattgttgttccacctatagggttgcagactccctcagttccttgggtactttctctagctcctccattggttgagatatctttatacaaagctttgctctcccctcctcctctcttccctccttcccttttcccctcctcccctcctcccaccctgcctcctccctttctgtcctcctccccgctccctccttcccatgctttcacttggacccttctgtccctggtagtccccctccgttcctttaaactctttctcctcttatgtcccctttctagtttcataccctacgcccacacttacatagctaacacctaaacgcataactacacacacatatatatcagctcatgagagagaatgtgaggtattcatctttctgagccaggcaggctacctcaatatactagtctccattttcatccattttcctgagaatttcatttttatttgaggcttaataagattcccgtgcatattagtataccctgaactttgatgtccactcaccagccgatggacacctaggctgaatttcatctctttgcttatgaacagatcggctgttgacatgggcagccaaggatctccgcctatgacagagagtccaggaatggtagacctggggctcgtggctgttattagttttatgagaaacccttgcacaggtttgcatagtggctacaccagttcctattcccaccagcagtgaataaggacctctcttgctcacatccttgcctacagacatctgttgtcatttgtgtttttagtgatagccaatggctagggtgggaaggactctggaagccattttaatttacatttctctgatggctaaagatgttgagcacattaaaaaccaaagcaaagcaaagcaaagcattggtcttttgtgtttccgcttctgagaactgttggcttagtggccatgtattacttggcagggctttttttggcttgtttacttttattcaattctttatatagtgtagatagtaacctttgtctgaagtacagggattgctgtactatgaccacagaaggtcttttcattatcaattgtcttcttcaacttacttttcaatgtcttaaagttttcactctagaggcttattcctaggcatattgtacatttatttatttatttatttattcattcattcattcattcatttgttcatttatttatttatcctgaagctattgagaatggaatatttctcctaatacctttctcagtgagttaattttttttggtatatgtaaaaaagctactggcttttatatgttgatatttctatcttgcaactttactaaaaatgtttatcagatctaaaagttttctggtggagtctgtaagatttgtttgtttgtttgtttgtttgtttgctttaagacaagttttctctgtgtagccctggctgtcctggaactcactctgtagaccaggctggcctcaaactccaagcgctaggcctaaagttgagccccaaccagcaggtggattttaagtgtaggatcatgttatttgagagcgggaaccatcgggcttctttgttgtctacttttattctgtttgtatcttcctcttgtctgagtgctctagctaagacttggggcactacactgaacatgagggggaaaatagccacctgtgggcacccttgtgtcaccccagagtttaaaggagatgctcagttctctcctgtgtaatcttggctacagatttgttacatattatctttattatgttgacatatattccgtttgttcctagtttcagacttttcatcatgaaggcatattgaactctgtcaagtgtctttctgtatccattaagccaatcatgcctattttgccctatgtctgtttatgtgatatgttctatttatggttttgtatttgttgaaccagacttgcatccctgtgatgaaaccaattggtcacgatgtatgatcccttcactataaaaaaaaaaaaaagaactaagactaaaataattatttgtgtgtttgcctgcctgcctgtatgtatgtatgtatgtatgtgcactgtgtgtgtgtctggtgcctctggagcacaggagaggatactggaccctctggaacttgaggcacagacagttggtagctatcatgtaggtgctggaaagcagatctggctcctctgcaggagaatgctcttaatggctgggcaatttctgcagctccattaatgtgttcttgaattttgttgagaattcttgcatctctgttcatcagggaaattggaccttccttccttccttccttccttccttacttctatattaatttaatttaatttagttgagacgggtatcattatgcagcccagactgccctggagctcacagaaatccagctgcgtctgcctcttgagtgctgatattaaaggtgtgtgacatcaaacccagcatgaacctagattttactaatnnnnnnnnnnnnnnnnnnnnnnnnnnnnnnnnnnnnnnnnnnnnnnnnnnnnnnnnnnnnnnnnnnnnnnnnnnnnnnnnnnnnnnnnnnnnnnnnnnnnnnnnnnnnnnnnnnnnnttttgtcagtgtctcttcctttcctactttgtgggacaatttgagaggtacagttcttatgtcctccttaaacatttggaacttggggctgagagacagtgttcttccagagggccagagtccagtgcccagcactcagtcacaacaccgctctgtaacaccagtctcaggggatcctagaggatctgacatcctctgctggactccacaggaaccgcctgcatgtggtacacaggcttacatgcaagcaaagccactcatacatatcaaataaattaaattattataacaaaaaacattgttgaaaaaaaaagtttgggatttagcagtgaatccataaggtcctgagtttttcattgtgaggagatttctaactattatttcaatctcagtgttttaggtatgtttaaaatttttcaatctttgtgtgtgtatatgtatgtatgtatgtatgtatgtatgtatgtgtatatgtatgtatgtatgtttttgagacaagatttctctgtgtagccctggatcttctggaactggctctgtagatcaggttgggcttgaactcagagatccgcctgtgtctgcctctttgagtgctgggattaaaggtgtgtaccaccatcacctggcttgtttcagttttcttaaactagagattttaaagacttttacctgggaaggccaagaaagagattaagcagtacggagctacagggagttaaggccaaggcagggttttttagagtggaaaagattagtaaaatctaggttcatgctgggtttgatgtcacacacctttaatatcagcactcaagaggcagacgcagctggatttctgtgagctccagggcagtctgggctgcataatgatacccgtctcaactaaattaaattaaattaatctaggggtagagataatggaaactgttgagactcccgtgctcacagttccttatgagagcatgtgtgcatctttataacctggacttgagatctctgtctatagtgtgtatcagccagctagcttttgttacagttgtggtgtgtaaccaactctagagctcttttttcaagtgatgattttttttttttcccacagaggacgtcagctgtctgtaagtgcagggccgtggtcttgtggtttttctctagttgtcagtcaaccagaaggtttgttccaaagtgaactcttattctgagacctagaggctgagggagctacttctgtttggtgtgtatcatttttatagtgagagatcaagaaaagatgatttaatgcttctccaaacaccctctgtggacgtgcatccaagcatcctctctgtagatgcctgcttcagcatcctctctgcactctcacccagtttccagtagtcacagccagtcacatgacaaagtaaagagtacagatttaccccttgcttattttcagggaatcagtacttggagatactcatctaattgacaatatgtttgttaatataatagtttcctcattagttatcaagggtacatttgaagaccccagtgactacctgaaacctacaggattttctgtgttctgtgttttcctctgtagcttctctggaacccagggcagtatcactgtgatgtcaccagataacaagctgtgactgttatgatccttcccagcatccagctctgtcaagggttgtagttacactctgacctcactcttgtctttatgacatcacccctcaggacctgccccagcctcaggagttattacaagtctcacaaactggggatacactggataaaggaataattcttgtcctgggctgttttcattgggatgacacaagaattcattgtgtgaagcatggtatacatttgaaaacccatgacttgcttgtatctggaattttccattgaatatttcagactgtgacttactgtagataaccaagctctcaacctgttcttcagctttttttttttttgagatagggtttctctgtgtagccctagctgtcctggaactcactctgtagaccaggctggcctcaaactcagaaatttgtctgcctctgcctcccaagtgctgggattaaaggcgtgcgccaccacacccggtgctcttcagctttctacagctttgcaaacaggactcctcttttgggggcccacccttgatttttcctcctgtattagtccactttccactgtgacaaaaccaagaagaaaggcttatttgggctcatgccttcagcagtttcagtccctaattgcttgacttggttgctttgatggtagcgtagcacaggatagagcaacccacgttggctgattcctcctctccagcctcggctccaaccttgtattttgcaagaagacaaggcaccaagctcattggatattttgatctttctaagcacatgtgactttcagggctctgcaaaggttatactttagcctaattcttgacctctgtcccgcatactctgacttctgctccagcctcagaaattacagcagttccttgggccctcttcccctgcttacaatgttcctttacttcctcccaagtctaccctctatagactcctactcatccttcaagactcagttgagccgttgccctttctctgacgtcagactctgcattgtgttgttggtggggagtctggcatcctgcagggtgggcctcagctacatgtctgccaggggtcactgtttcttccctcttgaactgtgagctgataagagtttgagaattcatggttggcatgcgttatagaccacagagttctctggttggcacacaccagtgttggtgtggcctgtggagacctgctttgggcctttgcttgcccttttttttttaaaaaattgtataagagtttttgttaacgtgtgctaagtgcgctgtgtgtgtgcctggtgtctgcagaggtcagaagtagctattggatcccttggaattggagttatagacggatgtgagctaccatgtgagttcaagaaacaaacctaggtctttagaagaacaacacatgcgcctaacctctgagccatctctctagcatcatgcctcagtccttgacggctatgagatctgagtcctgctccatcggttggctactaggaacgttgccttctctcctgagaggaggctggtgggaggggaggcattggggaagtgaaagagttgttgagatttaggccagactggtcaccatgtaggccagaaaggtcaccatttaatatgcttacttacccagaattatttctgagaatccttctggatctaaaagaggaagtaaggatagattgtccaagtctcagccagggctgggttgatctggtgcccaatctccacatggagactgcaaagcttggggtgcagacatgagagaggctgtgggactcttctgtggaagcatggctgtacccagagtgagctggggtagagggggagcatttaaaccaaagagaggcctggaagctgagggaagggagggcttggtgcttcttagaggctggagagtgacaggtcctggaataaggaactcacccgactcccaattgattacatgaatctcgggggaattggggaggagtctcagagttgctatatccagaattgtcacagtggacagttctagaagtgagattgtgtagtcctgggaggacagaaaaataggaattatttctccattttacctgtaggcaaactgaggcttagagtgctcatgtcttggccaagaatgatgagtgaagtgggagaagtgggtcatgcaagtcagatcttgaattccaacagtgcgtcttggagcccctggtagctccaaggagaaagcattctggagacaggtgctgggtcttagggaactggaggagactcttgcctggggcagggggagggggagggggcggggctgaaaatgctggagagagagaagttaggactaatcctgtcacacagcccctgtgttcttctcacacatgttcttgcctgataacaggccaccatacctagtttaagaggtactgaagatctatcaaacccaagtcctcttggatgttggacaaacactctgccaactgagctacaacctagacgctaggacttgttcttaataagcctttcattattataagcccgtgggtccctcttcaagagctttgctcatgattcagtgatccctttgggagtccagtgaccccttcacagggaccgcctatgaccctcagaaaacagatatttacattgcaaccgtagcagttgcagatgttcaggtatgaagtaacaatgaaatgattcccatggttagtggccaccacaacacggggaactgtattaaagggctgcaacattaggaaggttgagaatcactggtctagatgctttagtctgggctgtactgcagtctaggccactggaaagggggctgtgtgctgaaagtgaggtagccataccccacttggttctagtggtactggttggggtgttgtgggagcctcagtttccctgtcagctagacagcacagggcacagattgatccgataatctccctgaacagctaaacaaaagacggagggaaaggagtccgaacccacaggaagtgaattctcaaagcaaaacccacagagaggaagtgcttgttattcccagaggaatcccaagttgtcagcttgttcttgactgtagatatgaggaagccatcttctagatgtacctgcctggtggtttactgtggctctgccaggcaagcaacatttgtacaatttccctcaatccattcttgaatttgttaattccttctgggttgatggagcccttaccaagtactgggctctgcacctgcctgtggagaggtgagaatttacctaggggagaccatacctagatgtcttgagtgtgcactgagtctcctagggaatgtgagacaagtcttggcctcctctgaggtgactagctggcttcctgcagatgtggtcttcacactgagagtgacaagggatgttcctgaggcagaggagccctcggtgagagccgaccctccagcccttcctgtatctgctctaggaagctgagagctctgttggctggaaggcagaaaggaagccagaggaggcggcaagcctggtaccggtcagctgcccagagcggtattattagggttagcaacatccagagaacagctgcctgccttcccccttctaacagaagtcggtgagtgcttatgtggaagtccagatgtccctaggaggaacttgtctggcatcaggtccgggagaagcgaggacactcgcaaaatcagcacttggctccccaagcataagagcacagtctggggttgaagatggattttgatggatccttaggaaagtctggttttgtgtgtcagacaatatagtgcaaaggaaggctaaataatatttctaaatacaaacaggactgagtgtgcttgggacgccatcttttatatgttccaaattttcaaaaattaccacagaggtgctccgtggctgagtccaaacaccaagcacccccgaaaaggtgcaccattcagagactgtggcatagatagcagagggagactccagcaccagggcagagaaggaatgaatctagtctgcacaggacatggtgacttgctcagtgtgatggtccactgccctccagctgcttccttagagttcaaggccactctgactgacctgggctgtgtccctttacattcatgtgcagaagtaccggagatgcagaaggggacatttatctgttttgttcttaacaccagctgggcagcagccatgtctatcaaaggtactagaggcgagagcttcatggagctatagatgtctgtggtcagggaggtcccggggagtgttgggagggaggggctatgttaatgaacctcagaatttcagtgtccccagtgcgaaatgttgcagactttagacatagaacatcaatgatgtcatcgtggtggagatgtaatagtcaccaaagaccctgcttttatatcctggtttcaaggagccttccagacttcccaccctcccaccttggctctgagctgcatctttccttgaggctcggtttatctgtaaaggagaagggtttgaggattgacacttagtgtttccttcagctgtgaaatgtctctgtgtctgattatcgccaggctgagcctacaggagcaactctttgctttcttgacttcccccccccccctcagggtgtgacagctgagcagccacagcagtcaggggtgagaggatcaagtggcatggtagcatgttgtgtgttcagaacaggccagagtggagtcctgcgatgcagcttgggccagcacctctgattcactgcatgtttgattttaagttgagtttagctcattgtgtgttcagagcctttcattgttgcacataatctatggctcattcattcggaaaggcaccattacgtggggccacaaaccaccatgtggtgctggaccaccatggatcatgttccacatctggcttaccaggaaatggttacagtgttatcttgagtgaatcaaggcttgtgctctcaaaaggcgaggtacaggctgcttcagacagccctggctgaggctgtacttccaggagccgggactgcagtcgttgctgtggaattgtcccaaggattccattgagtgctcaaggcagctgttgccaccatgagggtaggctggttaataggatgacagtcactttgctcacagcagccctgggagcaagagtttgaaggctgttaattagggaatcagggtcttctctttaggagcaggaacatcagaggaaatgcctgcagtatagcagaaagcactcagtagcactgtgactttgatgaattctttgaacagtgcttaatatttgctcagcatcccagggaagattggggccccttgcactgcttccaaacaacatatcagagacccacaactgagtgacctccaggaacagggaggtactgattctcgggacaggtcattttcttcctcctgaccagcggctattgcatactaaattcaaaatggcttccctctggtgcccatggttagtctcggcctaacctcctgagctgtggtcagagggagcagaccttctcaacagtgctgggccttcctttcttggagccagctgaaaataaatgcaaggctgtttcctttgttgctaggcaagatgtgctagggtcaggggacaggtgatcaacctgggtgcctggcttgacagaaacgactctgacttgaacccacaactcactgggacccgagagtcagaacacagccctgctaatttgcatactgcttttttcttagcactcagggaactggtgttttggttgttacagtaaaatgactcaaatttcaggattctgtgggtcacatggcgagggcagctgcccggggaagacatgcaacctcccagcttgctttcattttctcttctatccctgcagcaggtagagctatggctgactcatgatgggggctgcgctagggcaaatccataatgactggaaaataaatataaatcgaaaatttgttgagtgtggctagctagaggaactccgggctcagggccctatgtggagtatgtgtagggtctcagttttttgattcaggattgggggtccagccactgcccagtgtcatgatagggtatcttactgcataccattcacctagaagagatgcagatctgaaatgcaaagtgtggtttcaacagcacaggatagcatctctaccatcagaaagttgaaagttttaagtcatccatcatacgtctggaaacctctggaatggaggctctgctgtctgccggtgaaaagcagaaaaagaggtgttgtccccctcactctccaggcctcagaggtaaaacatggctccctccagacagaggctggcgttcactctgttgggactcttggaccttgtaaggtttgaagcagagaggtttggaacggaaacaaacccggaagcagtgcctttggcagccggaagtcactctgccttcccgagcaagagtctacaaagtccaccgcagcctctccatacccagcagccagccccctcatcctggtgctctggggccgtgtctaggatttcctgccattcctcccatgcagtttccttttcctgctctgctgggcttaacttgatgttcagatttgctttctcagagggatgccacttgggacatggtcttcactgcccgagatctgctcactgcttttgcagatgggcaagcttccggcgaaggaggtggtccaggaaccagattactctctctatagctcatgcttacctttactcgttcttcatggcagttaccatgccggggccacgtttgacatctttgcctgctcctcatcctggcagctaagtgacagggatggatagtgctctggctttacaaagggggaacatgagatacacagattaaggaatgctctagaaccacatgggaagaaagggggttgggactaagacaaggcaatgagatggtgcacacagcagaaagaagacctccaagccagcagggagaaaggaagtccagcctacaaaggggcggggcctctgaggtcatggggccaggcagagctccttagtcctgagcccctccacccagtctcctttggtcattaaaatactggccccaaattgttcgttctatgctaccagcctcttatgaatgggtgaagtgcggtggccagggaaccctgaagaggagggtggtggcctggggcccggtgctggggtttagcaaagatggcagatgctctttggtcccttttaggcagcttatgccacagagccagctacatactgcttgccccactatgcaggtcacacttcctgtttgccactgggatccaagtggaactttgagtgaaagatgagagggtggatagagcctcctaaccaaaattgcaccagtcggaggtggaaagataccaaaacaggctaaactttcctttcgaagctagggaaactgaggtgaacagaagtttaaagcgagtgagaacctgtcctggctcccatagtttgccaaaagtcctgatgtgagattatgaaaccctcagatgagtcctcgtttccacattccacagctgaggggttggggctggcacaggtgtctgtctgggctgggaggagtcttttcgtgagatgagctctgtgaacaaattatttgcaagtcaataccagcaagcacacttgaagccacctctcctggcagtttatatctaccacgggagtgtgtgtggggtggacatcaggcagcgcgttgcacgtgtccagacagcggcctgagcacaagagggagtaacctggtgagtaacttcctggcagtgagtggcagaaccctggagggtaaggaggtggtgactgggtaagaggggaaggctgacttagtatctgctgcctttaaggcagctttggtgttagcctgctaccctgcactctgatttaagggaggacgcagggcgtagcctcataactgaagagcaaagtactgcttaaggcttagagtactaaaaagtgctgctcctccctggtgccacagtagggttagaaaaccctaaagcaaggtgagagaggaggatcagatgcagcgcacatgcaaggccacatacatgcacccccccccccccacgcacacacacagatacaccaagataaaaacacatgcatgcacaaacaccgcagaaatcactaaggttagctgtctcttagctgaccttgagcagtgtgttaatggcctggagcctctgtgtattggctccatggaggctgttgatgaatgacacacgagcaggatctaggaagagannnnnnnnnnnnnnnnnnnnnnnnnnnnnnnnnnnnnnnnnnnnnnnnnnnnnnnnnnnnnnnnnnnnnnnnnnnnnnnnnnnnnnnnnnnnnnnnnnnnnnnnnnnnnnnnnnnnnnnnnnnnnnnnnnnnnnntggctgtggctctccactccagtgctttgttttactttctgtatccctataacctgacaccagtggagtggctgactgtattttgggagctttccctccccctggtcacccatgaagactatgttttaaaggaatatcccggggcttacccccacacaccaacccggcagcgtggcacccttcttcccattagagctcttgaggacaccattgcacatcgggggatccatgtgcagcacctcagactcttcctggcaaacagacagtctgtctgccttcagtgtcgtcctcttttaaacatttgttcagtttatatggcctagagcaggctggaggggtggaggtctgctcttcatctgggttccatccccatacaggacctgtgcagatgcagaggggacagaaagtgaccgacagagtggctttccgagcagcagtgagttatgtcctgcagggagaggggaaaaacaatccccgttggcacccagtctctacacttccccttttcctcctgggtttgtggttaaactttccaaaccagacagcttcgggggaggctcattagaaggcttattttggttccatttttatttgaaatttacttaaaaacagccgagaaccggagggtttagacaggaagaccatgttgcttgctgctcgtttctgttggtgcagcagcttggactgcgctgcccttggcgttggtgatcttggcttcttttgcaaagggatgacagaaaatatggctcacgtttatgcaaagtcaacactgcttgctctgtgactttttatttatttctattttaatcttttgagtgttggggaaacatctaacttatttaaatacatttttgtctggttacaaaagtcgtatgttctcatcacagactgtgccaatgcagcgagcagagcggaagccctggccatccttccacagacagagaggctccctcctccctctgtggccccatttcttctgctcatacctcctgctggtcagtttcctttgcttccaggccgcgccttcgcattagtgttagcattttaggggataacatgagggagttgtccagtctctgcatcttccacagggcttggtacacagtaggtacttcataattatttatttcttggaacaggatctggtgcatttccagtatttagagaacagaaaagcccagatgggcaggtgtgggagatcacatgatccctcaggtacctgagggtctcaggactcagcactgatttttttctgacaagtccagcagtctggtgagattggggagatactgttctgagatgatatcacagcatctggttgcagccaggagtttcccaatatttgtagactgctgctgcctgagagtcttttgggcacctgcagtttatgtagtaagttcagtctaaagtgcaggggacactcagcatgtgagtgccagcacacggatgctaaaagcgtctgcagggatgcctaccctgagatgggttctgccagtgttgtgtagagaggtagctgctataagccatccctaccgcatctttgaatcagcaactggtacttcccagtgagcttactggatgctgaaagttgagttttttattgaggaagcagtaaacatggcaactgtgattagtgttacaaatggaatgtaattgcttaagttcaaggtcaacctaactgaggacgggctatagtaggagtccctgctttttataaattgcttttaagcccagcagggtagcacacgcctctgatcacagcactcaggaggcagaggtagactgtgagtgtgaggtctacctagtctattagtgggttctaggctagccagagctacatagtgagacctgtcttttttttttttttaatatattttaaaaagttgaatttatttacttgtaaaaatctacttctaattgttctatgacccaaaggtggggaaaacatttatttatttattttattctttgtgtgtgtgtatttgtgtgtgtgtgtgtgtgtgtgcacaaatgcaggcaccacggtatgtgtgcaagtggaggtcaaaagataacttgcaggagtccaggtacagaactcaggttgtcaggcttggctgcaagtgccttggcccaccaagctgtcttgcagcctcatctccactcttgtgtggagatggaccatttaccctggagcagctagggactctggaatctcagagttggaagaggacagaatcttcttctgtgtaccttgtgtgtgtgtgtgtgtgtgtgtgtgtatacatacatatatatatatatatatatatatgattgtgtgtgtatgtgtgtgtgtgtgtgtgtgtgtgtgtgtgtgtgtatagtaagcaggcagagagatgagctgaggcatactgaacagcagatgaaagaactgatgcttgagtgctcaggagcccacctggcgaacgaaacctgagttgtcagtgaagagcatttgcaatggctgcggttactataaccatccaaattaatgtgatcatataagctacagatccttggtcttcagacgtttacaacctgaaatgggggaggagacaggtgtggtggttgctgagggaagaggtaagggatgctaaattaatgcttagccaggggaataattcagagagggaagttctccatgctgaccaggcccagttggttccggctttgaccctgatggacacaagtgtgctctgagcttgttcccctctctgttggacggggctaatggagtgtgctcctcgggggtattgggtgccccatccttccctcagtcagcaggttaggtcatcaagtcatcctggatcagttggggggctggtgagtacaatcaccttcttggatctgctccgtgacacaaagaaggtgagccctggaagcgggccaggaattgagctcttgccatgaaggcagagagagctggagatataactagtcaaacaaccctgaaaagtccccaaggttgggtgttcctttttgcgtcaagcttgctgacggcagctaaggaagctgaagactgtgttgggtcctccacacagggcaacctttttgctcagaggctggggaactgcaaccagagaagaaaaccccaacattgcttctccgcagagaagaaaaggtattcaagggctgtctgctgacgcttctggtggaacagaggcctgaagctgggtgtaggagaggtgaccatgaaggggccagtggtacccactaagaggctgaggacccttgagggacctgtggggaaggcagaagcaaggagacagagctgggtttctagatgattccgtaaccccagctgtgcggtggttggtaatggagtacctatttcaggttctcacagggcagcacctcacctgccttatccatgtgtcactgagagtgaagctcacttttgcaatggcctgtgctttcattagagagcccagaacggggcttgggggaagcagagctatgtggacatttctggaatgtttccagacagttgaacatgtttaggaagccagtccccaaccccccttccttgttctctgtggtttcctagtttgtctcatggggcagtttggatggcagcatctttacctcacgccgagttgtactgcatgcatgctgccctcccttcctccacgcctcggtttactcacgtgtaaaatggggtagctcagaagattgggggcattggttgagagggaaggaatgcagagtacaggccttcaaggtagcctcaaaatcctcttgaaatccacggagctcaaagtgaacaggtgagcaaggtaccgatgagggagcctttgtttggacactcccctccgcagggcgatgggttacctcagggcccgttttccactgaacacggagatccttgggacccatgagctgtgtcattgtcgagcctgacacttgctaggtgttggtcctggtacaaaacaaatatttacctgacaaatgagtaagcagaccaacacttagcctcctctgatttgcaccagtggctggtcagctttattttaaaaaattatcatttgctagacaagtgctctaccactgatctctccccactaaccttcttccagattaaatatatttatgtgtggcgcgcgcgcacacgcgcgcgtgtgtgtgtgtgtgtgtgtgtgtgtgtgtgtgtgtgtgtgtgtgtatagttgaggggaacgctgtgggagttggctctctccttccaccatgtaggtcctgggaattaaactcaggtcaccaggtgtgaacaggttcactgagccattttgctgcttctgtttgcagacttcttcttctgggatatgagcaggtaattaagaggtcctggctttgcctgaacccagcatgcattcccaccaagtcattcaggacagccaccagagtccttggggtttcctgctgtgggagccatggccctgccgccatccaaggctgtggtcaaggcttgggtagggaaggtgattcagaagtgttctgggaatcgctcagtccatgccaaggccgggctagctgttttcaggctatgggtacatggtggactctggagacacacagagcaaaatgtgccagagtctgtgagggagagttctggaataatcatcaatgtgaatggagaaactgttgtttattgggaactggttaaagggacttctgccagcacttcatgggtgccatctctttccggtgtctgagagagtggctttgcaggcaagcaggagaaaccaagtgtttagagttgcctgaggtcattcagtcaacactgcaggctctcctgtagatgtaggctctacgcctggcagatggggaggtagggacagtttgttccttaggcacaagggacagtaacacaagctgctgttccctaagtactttatgggttccatgaactttacagatggatttgttgatcttggtaattcaaggactaaatgactttttaaaaatcggttatggggtcttgctgcgtcgctcaggttgacttgaattcctaggctcacaaaatcaccttttaaaagctgctgtgattatagatttgagccacagagcctggctaaagcatccctcagtctactccatctgctctcctcctgcagtgctagggctccaagacctcacttatgctaggcaattaagtgttttagggcactctattacccctgctttataggttagtaaacagtctcagggagtgcatgtccagatcacagggcaagaaatgttccagtccgtgaacaagagctgtctcatttcaagaacagacagaaaatagcattccccagtggcccgaatttgagttattttgtttgtttacttgcttgttagtttgcgagggcattatttttaaactttctgctaaaacttcttctattagatatgaattcctgaaagcatttttacgcttgagtcaattcattataagagtttgagaaaaatataataggagggaaaaaaaaatccaagacagaacaatctcaggattttctagtaaattcttagatttgaacacccctgggccatacacgactcactttgagtcagtttgtctgtctcccccctttcgagcatcaagtcaggcaagtcgcagaagttataagagagagaggcaaggacagcagaggtgcaggaggagtgaggtgggaatgtataatggttagcgcctctcacttttgagtcaagatctccttgtgtagaccaggatggccccaaactcagtggtctgctggtcattgcccctcaagtgctgagattccagttgtgtgccatcatacctggctggtgatggttaattgtgactaccagcttgatgggatttaaaatcaccatagaaacatgcctgtgattatgtctaggaggaggatgcttccaacaaggttgaactggacatggaagagctaccccaactgggcagcaccattctgtgtcctggaatcttagacggatgacaaaggagaaatcaggggccagaaggctcagtgtttaggactgcatgctgctctcacagaggacccaagtcagttcccagcacccaccttgggcaactcacaaacagtttgtaactccagctccatggaaaccggccacctctgccctccagggatatctgtcatgagtgtacacacacacacacacatacacacacctaaaaacaaaaataaattttccccttttaaaaaattcagctagctgagcatgggggttcatgtctgtggttgtaatcagtgacaacagactgcctttccttgctttttggtagaagacaagacaactacattactccaagaactgggcctctgtgccaccatgggaaggactctagatttcagctgccatctgaaaggaccaatgggtattaaaaacagacccagtcaggtgtgctggtacagacctgtaatcccagcacttgggaggctgaggcaggagagtcacaagttccaggccagactgagccacatagccctgtttcaagaactaaaatacagcctgagaggacccagtctggaagggtacccggagatgacaccattgagtcacactttactaaactattttcacggaggggggtggggtggggnnnnnnnnnnnnnnnnnnnnggtggggtgggggggggagggaggggcaatttttgggatatctcctccatctgtcagctgactctcaacaggaataaacctgggcaagtgtcttagtcagggcttgtgttgctctgatgagacaccatgacaaaatgcaagctggggaggaaagggcttatttagcttccacttccagatcatagtccatcgctgagggaagtcaggacagaaactccaacagggcaggaccctggagcaagagccgatgcagaggccatggaggggtgctgcttactgccttgcttcttatagcccccaggaccatcagttcaagtatggcaccatccacagtgggctgggccctccccacattagtcaataaataagcaaatgccctacacctggatcttaaggagacattttttcaattgatggtccctcctttgagataactccagcttgtgtcaagctgacccaaaatatccggcactcaaggcatccctgaggtatgagtggaagaaactgttatgttcagtgggaagggtggcgctcatgtggatatgaggagttcctggctctggggccttgcccatgttacccaacctctgagctgcaatttccctgcctggagaaataggcaggttgcccaatggctgtggtgagggtggaatgagaccattattgagattgtcttggggctggagagatggctcagaggttaagagcacctgctgttcatacagagaaccctgtttgattcccagacccccttggcagcttaaaactatctgtaacttcagttccagggcatttgaccactcttggattttggggaccacacacatgtgcaaaacactcatgcacacaattaaaaacatgtatgtacatacatatatatggtggggaggggaggaagagagacaggtttggagccagggtggccttgagctcacagagattggcctccctttgtttccagagtgctggcttgaagggcatgcaccaccatacctggcttttattttgaagcatcttgtgaagatgagcagttccccattcctgaaggcttcgatcaaggggcttgggaaagagggttagtggaagcctggggggactgaccagttaccacccgcataaaaaacaggagagacttaaagcaaggatggtgaatggactttttccttttaggtcatctagaaggccctgctgtttttcagctaggggcccagcattgagacagcaaggttgaggtgtaggaattagccctgggaaagctgacatctgctcggagggacactaagaaacaggcacaggccagactggaaatctctgactctcagcagctgtgcctctgactagacagagacctgctgctctccttgcatggccaaagcgtgttctctgctcctgctccctgggtggaatggctttcctctgcccagagactgatgtcctcccatcattgataagtagctctcctggccctagactacagcatgtcttccagctctgaaggagcaatgattggttccaaagcccagaaccttcacctggagcctagctgtatgttctaggggccagggatcccccagggctgcattaccgatatttggagagaaaagctggcctaccctcttcatctggtagggttgtgggggagctgagcaggcagactacacagaggttgctgaatggaagtggaagggagagctgggacagagctggtgtaggagacctgcctggggcccttcgctgtggaacacagcgtgcataccttataaagtgtcaacaggaccggtttcttccttacttaaagcgtgaagggattagattaactctaggccacagtggaaggtctgtcttaaagctggaccgggcaggcggtgtgcaagatgtgtggctatgtattacttgggaagatgcggtaggggcccatgagatggctcagtgggtaaaggtgcttgctgccaccctgatcagaatttgatgcctgggtcttaacagtagatggagagaacagaatctcaaaggttgtactttagtcacgtatgctgtgtatccccaaataacatgcaaaaaaaaaaaaagaagaagaagaacaaacaaacatagtttttctcctacttttttcttttcaaggcagggtttctctgtgtagccttgaatgttctggaattcactctgtagaccaaattggccttgaactcagagatctgcctgcctctgcttatgaatgctgggactaaaggcatgcgctatcattgctcaaatgtaaattttaaaaaactgaaagaagaaaaaaaaaaggtaataattccattttcccagagagagctgagtgtcctctctggcagattcataggagcctatgctcctgaccacagagcttcatgaggctgccaccatcatttcagaaatgttgctaggagaaaagccatggccagagcaatttggggattaaagggtttatttaatcttacagctcgtagtccagcatgaagggaagtcagggcaggaactcagaggcaggaaccaaagtagagaccatgcaggagtactgcttcctggcttgctgtccttggctcgctcagcttcttcatatagacaggccacagtgggcggggcttcccacatcgatcagcaattaagatataccttcagagcaatctagtggaggcaatttcatttatttacttacttacttagtatttatttatttaatgtatgagtgctttatctgcatgtacacctgcatgccagaagagggcatcagatcccattagagatggttgtgagccaccatataattgctgggaattgaactcaggacctctggaagagcagtcagccagtactctttaactgctgagccatctctccagcctatggaggcagttaattgaggttccttcttcctgagtgactctggtttgtgtccagttgacaaaaactaaccagttgtaatagccatgggaacatcaggctagaaatctcttcccaagaccgatgaggcaggctgacacacaggcactttcctcacacaaatgtgacagcattggtgggactgagcactgcgctaatcacgatggtgctttcggagacaaagctgtgtccttctcaaggacaagcccacttgtccttcatgaggacaagccatttagctcttgatgttctgcatatgtggctctcagtaggtgccagcttccacacagatgttatcattcccattttacagatgtagcagcgcaggcacagcggcatcaagtaagcctcccaggatagcacacctcacgtggcagagccatgactggcatccagaccctagatctctgatctcttatccagcctgctccagcccttccatcactctgagacatgatcatccccatcacacaggacaagaaacccaagtcactttgccccctggctcagcaagattgccttttgtgaccatcccaaatagatttgggactgaacaaatgacagctagcaagctttgtgttactagtgctctctgccaagaacacttaatccccacattcccatagaggtaagtggggtaggaatcacagccagaagtgacttgaaacaaaaccagggctccccacttcgaggctgcagctgccacttctggatggacagtgtgaacagaccaaggcctgagggtggcatggtgacattcctcacccctctcccgtttgtacccacctgcccaccgcactgagcgcaacagctgacctggggagcatcccttggaggcccccagggaggaagggcagttctgggatgcatcgggggagtatcctaactgggtgggctgactctcagagcatctccctttatgaaggccatgtggagggcagaagtgagggttctctgagttaaaggagggaagctgcttcctgtgttctggagtgtgggagagttgggatcggcaggaggccccatggggagctggtaatggctcagttgatgaggagtttgaggagcatgctcagagccctgtgttccatctccagcactgcaaacatttagaggccccactaccctgaggccagtcccttccccagtggcctccctcccatggaagaccttagttgcaccctcccaaggagttcagtcccaatgaggaatccaggagatggaagaggcagggtctacccatgatcctgggaccctagagagtgaggtgggcagggtgggggttggggagatggtgtcagagtatatcaagcttccacagggagctttctggaattttccatccttaacaatacacatggaaaaagcctgttaatgaggcccacttgtgtgttctaatcaagcagacaggtctgtgtaaccaccatccagaccagagcttgccacccctaaggagcctgccgtcccctcttgtaacaccataagttaattttacttgtgtaggactttaagttgaagcatatagctgataccccctcccccacctttaaaaagacaaggttgcatgtatcccaggttggctccaagctctctgtgtacttaggcctggccttggaaccctgtccacccctcccaagtgttagacagataggccctgtcatgacatgcctgacttaagaatgtgtcctctggatcagtctccttttgctgagtactgagtgctgaggtccccttgttgatgtgacctggctgcagcttgctggttctcatcgctacagaaaggttgccattgtggcaattggtggcaacttcccgcttctgttgggtcttggtccagtgtgggatgtagctgatgctcatcacttggaaatagacttgagagaatgactttgtctcaggaatgtgccctgtgggttgaatggatgccatcagagaggatttcagcaagctattaggaagaacttccagtccctgaaggttatggtcagctggctcctgctctcagaggaggaagccgtgaaacttccttctgagaacaggaggaagaggctcaattccaggctgcgtgacctggggccaggccttgactccttcctgtctggcattggccccttccctgtcgtctagggttcccagacttcccggcagtgtcccagtcacttggggagggaatgggacagggggccctgagtaccatctccctgcttgagccaatgtgtgccatagacagcattgcctctgagaacaataggcttttggaaaagcacagccgatcgcagggcgcttctgtgcacacagtgtgcaggcctagtgtgcacacagcctgagttccatccctcatatcacataactggttatggcgcatacccatcatcttaggactgttggggaggcaagatcagaagccctaggttgtcgttggctacacagtgagttcataggctgctagggatcctatctcaaaaaggaaaacaaacaaacaaacaaagggtgggcagggttaagccttgtccctcaggagcaggtatgggtttctgaggctgtcccaagtgcatatggtaaaggcttctctatggagatttacaccattttctaaagtgcagtgttccacataactgtgtggcttccagagccaggctgtggaggaagagcttatctcagaaccacattttggcgtcccatcaaagtgccttgtccgctcacctgcctctgccccaggctgtgtcatacgcatctccggggaggcatcacttgagaatgagtgcatctcacagggctcccagttttccctgggactgggtgatgtggagggtggtggcctcatcgcttgtgactcctggcctggtttggtcctgcagtttttcctctgggtgaggaagtcagaggaccaacccagagccctgattctgccttgctgcgtagacctgaatcaacagccctgataaacagcccatttcccggggctgagggaacaaagcctgtggctgctgccgagggatctgtctgcccaccccacccctcctcttcctgaaacagctgtttattcttttgacaggagttggaaccctgtaccttcctttcctctgctgagccctgcctccttaggcaggccagagctcgacagaactcggttgctttgctgtttgctttggagggaacacagctgacgatgaggtatgtttaaaggatttgtgtctcccagccttgggtcactgcgagctactgttaggtcaccaaatggttccacctgagggaggacccttgctctcttccgaagctttccttggtcccttctgtgatttgttgtcctttcccttttgtttctgaaacaggggctggtggaatgctggctggggactttggtattctgcttctcttggcagcccccggggctatgccagtcaaggctgcagcctggagttctctgtgtggggtttgggttggcggggctgagtcttgggcagggcgcggtgggagggtgctgagtcttctctgctctgggctgtctcgtacatgtccgttggctggctgttcctgggaggtatcacttgagattgattgcattccacatgacactgctcccagggacagcccggcactcccctagcagctctgctgtagaaaatgctttgatggtggttcctgggggcagccaggaaaaactgtagttggatcctaacgttagacttcctaaaggagactgaagtagaggtggtgaggcaggtgtacttcagaacaggttgtactgcccatggtggtgtgtgatggctgtgtctgtagatttagtcagagtcctggctctcactttcctgtatctgtgtttattctgaccctaatagtattaatattttctctgtgtgtgtgtacatatgtgtacttatgggcatagaggccagaagagggcattggatccctggggctggcactataggtagttaagagccacttggtgtgggttttaggaaccaagctgtagtctctctgtagaagcagaaagccttcttcccactgagccatctctccagccccaactccgattccaaccttcttaatgaaaacatgactgaaagctagtttttctttctttttccccatccattgtatcatgtttctccccatggggaattttataataaaatggtctccccttattccaacactgccccactgcccaaaacgagacctagaggtagacactgtgacctaagatcattgcttctgaacatgttcagcaacctcgtgccagccacctcttcactcaagtgtggtctcggccagaaaacagagccatgggcaccacgatggccattggtgagtgtgaggcggataggacatacaagtgaggacagtcaacaccaagcacaccaggagatccctgctaatggcagaaaagtgattgagtcaggccccccagttcatctgaggagaagctgaccctacctagtgtttgggctctttgggggtgggggtggtgtgtggggaggcaacagtcacaacaacaaggcaatcctgagtagcacaaagagatctgagtcttcccatgatggttggcagggccttcgggggccaactcctgggatgaaatcccagccccagagctgtctgctgtgcacacaggtaagctgattaacccgacgagcctgtttccatgtatgcacaaatgggattaatagagttacatcccaggaccattgtagcggaactgaaagacagctggagaatgcttcagcctgggcctggctcaggacggaagcaggtatggagctgacttgatgggggacggggcactttaagaaaaagaatttaaagtcatagatacaatattccctagggaagtgaacatgtagactgtgaaaaggggtatatcatgtaagcgagtacggccaagtccttcaaacaagacactcagaaatcaataaaatgatggaaaagttggaaaatggatgggatgtgtggagctgcgtgatacatgtactatattttggctgcaaattaaaaaaagtaattttttttctacttttggttatgcccaggtatgtgtgtcagtgtaacggtatgtgcgcatgtgcacatgagtccaggtgccctcagaagccagagaggttgaattccccaagttagttgattatgatctgcctgatagggatgctaggagagcggtgtgcactctgacctgcagagccagctctccagccccagggccgcagacctagtatctttactaggatattctagaccagaggttctcaaccttcctaatgctgcggccctttaataccgttcttcatgtcacggtgacccccaaccataaaattatctttgttgctacttcataactggctttgccactgttatagatcataatgtaaatacctgtgttttctgatggtcttagatgacccctgtgacaaggccattcattcaacctcaaaggggtcatgacccaagattaagaaccactgttccagtggcaatttctttttattttaaattaactttatttagtgtgtgtgtgtgtgtgtgtgtgtgtgtgtgtgtgtgcgcgcgcgcgcgtgcgtgtgcatgcatttgtgccttgtatgtggnnnnnnnnnnnnnnnnnnnnnnnnnnnnnnnnnnnnnnnnnnnnnnnnnnnnnnnnnnnnnnnnnnnnnnnnnnnnnnnnnnnnnnnnnnnnnnnnnnnnnnnnnnnnnnnnnnnnnnnnnnnnnnnnnnnnnnnnnnnnnnnnnnnnnnnnnnnnnnnnnnnnnnnnnnnnnnnnnnnnnnnnnnnnnnnnnnnnnnnnnnnnnnnnnnnnnnnnnnnnnnnnnnnnnnnnnnnnnnnnnnnnnnnnnnnnnnnnnnnnnnnnnnnnnnnnnnnnnnnnnnnnnnnnnnnnnnnnnnnnnnnnnnnnnnnnnnnnnnnnnnnnnnnnnnnnnnnnnnnnnnnnnnnnnnnnnnnnnnnnnnnnnnnnnnnnnnnnnnnnnnnnnnnnnnnnnnnnnnnnnnnnnnnnnnnnnnnnnnnnnnnnnnnnnnnnnnnnnnnnnnnnnnnnnnnnnnnnnnnnnnnnnnnnnnnnnnnnnnnnnnnnnnnnnnnnnnnnnnnnnnnnnnnnnnnnnnnnnnnnnnnnnngtctgggatggtctgggcagcttcctgttcaggtggcttcaggcagatccccagagtatagtccttgtaccttgataggtagtacagctgggctgggtaccagtttgagggagcgctggagacttggtacatcgtgacccctgaacaggaagaaagtaaggtctggatgctatacaaggttctgggaccctggtgggtaagtggggcagttccttgcttcctcctatagccccagacagctaccagagctagacagagctacctgtactctgatataaataaagctctgtcttgtgaggggacccagaggcccaagctgctggggcctggtgagctagcatctgtaccacagtacagatacattggtcaactgaggagtctatctttaaatcatccaggactgaggagtctatcattaaagcatacaggccatggcagcagggtgagcccttgtgcgtgcctaaggaatatagatgcctgggactgacttcccatccagacctgggtaagtggagaagcctggaagagaagcctgctgcaaatgacttctttatggactgtgaaactctgtttccagggcaggaagctgacccttggccttctaagagtgaccctcagccactttcctgcctgatgttggcaaatgccttctgtgggcactcatgggaggcttctctcagcctgcacctggggtctcgggctcatcccagctgctctgtgaggggtgtcatatgagcctaagattcttgtctctggtgaacactcagttctgcattcttgattggaacctctctccctaagaacattgtcaggttatagctgccggttgtggagaacacgctgactgcctggtacagcatgctttgcaggcacagtctatttctgtcctttgtaaagccctaagggagatctttgtgtctctatattacacatgggacaaaacctcaggttaaagcaacttccccaggggatacatctgggaccctgccatggtcagagtcaccacctagtctgatctttacctgtagtgctggattaaaacactcttggatataattgagggtttggggataccaaaggctggtgctataggcagaggattagtatagaggtggagtgctctcttagcatgactagtatagagagttctatcactagaaatgtgtgtgtgcgtgtgtgtgtgaatgtgcaagtgtgtgcatgtgtgaaagtatgtatgcaagtgcatgtgtgtgagtaagcatgcatgcgcatacacatatggatgtgtgagtgtgtgcaagtgtgcacacgtgtgtgtgtgagagtgtgcaagtatgttagtgtgcgagtttgtgcatgtgtgaaagtgtgcgtgcaagtgcatgtgtgtgcacacacatatgtgtgcatgtgtgtgtgcatgtgtgcctatatgtgagtgtgtattttgtgtttatatgtgtctggatgtgtctgtgtgcctgtatgtgtgtgtgtagctaacaggcaatgtccagtttgccattctattgctttgtttgcttttgtaacgtttgtcactccttgacactctttagctttttgcctcgacccccccccccagcccccagggaatggagggtccccagtggccttgtttactcgcatgcctctgtgttcaagagcccactggtgcccagtaacctagttcatggtggctgatgggtcagagtggtgcaggactgaagtccctcaggactctcattgatttatttatgccacaaacatatgggtgcatctaccaagccccctgcagggtctgtgccaatctggactcatcctgcctgctcattccttggggaggaaagagtggcttccaggcccagggggtggagagcacatcctaggaggtttggtttctttggcaagtgctttcttccctgcctgtctcctgctctccaaggcaacgataatggcttttccagggaaccttgtgtgtccagctgaggttcacctttcaccctgattgaaatggagaaaacagcagcgcccagtgtctgcctcagagagggattgtttggaaggaatgtttccatctggctagtgggtctctgaggttctcctgaggggtgttcattgagccatgaagtggatccaggaaggtggaggcttgccttatgagatgccactaacactggtgtgtcccaggaggagggacacaggtgctaatctgtcaaagctctgcagggttgactctgggagtggccagaggagcaagtgagaagtgacaagaacattgggtcacagggtctcagagtttacaggagggctccagccaccactgtctatctgtctgtctgtctgtctgtctctctgttttgatgtattttattttgttttttgtttttttaaaagactggatttctctggctgttctggaactagctctgtagactaggatggccttgaactcaaagatccacctgcctttctgagtgctgagattaaaggtgcaggccaccacaccttgccctctttcttttaaagtgtaactcctatttttattttattcccagattttttttttttttacaaattataggagagacaacacattcacttttaaaagagataaacatacttattagagagcttgatctcagattgacccatacgaaatgttcgtgttttataaacgcaaccatctaacatatgagatgcctttttatttttcctctttcaaaaattattgtagtaagctcactgggctctctaaaactataaggacgtactgtataagtcttctgtaaagccatgcagttaacaggtgagacatgagagcaggtgtttatatagtagcaagcagaacagcgtaggtgaaggtccatctgaagccacttcttcacaggggctttagtggaggtcgtggggcagcatcagtgtctaaatcatgctgggggtatttggtccttcaaggtggcctctacaatattctgaatggcaaacttaatggcctctagtgagcatatgccaggcacagtttgtgcaggccctcggcccgctttggtggaaccattatttggttctttgtttcttgctcctcctcctccttctcctccccctccccctcttccttctcctcttcttcctcctcctcctgatgatgattgtcatcttggagccaagatctgaaagaagccaaactcatttcttacctgataggcaagatggtcatccaccaatcttcagaactgcagtttgaaaattctgaggacacacagaacttttaggccatgctggctgcaaatgtctcatattggatcagcgagaaaatcaaaatggttttaaaagaccaattggccatgctgacagcccttgcttccctgggaacttggggtctagatcctaggaacatgttgtgcctgtttcttttttgttttgttttgttttaaagatttatttatttatttttatgtatacaagtacactgtagctgtcttcagacacaccagaagagggtgttggatcttattgtagatggttgtaagacaccatgtggttgctgggaattgaactcaggaccttcggaagagcagtcagtgctcttaaccactgagccatctctccatcccgctgtgtccatttctaacacttagctctgacagctttcagttagccacagccaaagggcatgtggttccaaaccattagtgaagcccaggaagaaatcaaccttgggagtcagttctgatatgaattcctgaaatctacaaaagtcacacacacacacacacacacacacacacacacacacacacacacacccctaccaggctgctgagggtggggatcaggagtaccagcctggactgcctctggtggcacgggtgactctgtttctctgtgtcctgctccttctactaggaagaggctttggatttgatcctaggtaagtggggttggcacggctgagcctggaggcctgggcttgcccttatctcccagcaagcccaggatgtctttagacttgatcagagaaatgaaagttcatctctcttggcagcagctctagctcaggctgggctagagtaggtggcgaggccttgaatgtcccccgttctcatccatttgcagcactccagaactttctccaagtgttctgagcactttctaaggaccagtcctcgttttcagcagatcctcccagcagcgtcttttatgaacatcagtaacgaaggctaacattttggaaaagcatgtatcctgttatggcatggctctgaaatcactgctctccccctcccccctccctctctgtctctccctctcttctgccctcccttcttctatctctcctctccctttctttctccctcctaaggcagtctcactatgtaagcctggctgatctggcagcatagttttgtttcttgagatttgggattaaagatgtgcacgaatgtgtgtgcgtgtgcgtgtacatgtgcttgtgtgggggtggtgattggtgctggcagctcatgtaccagaatgtgcatttgatggtcagaagacaccacttaggagccagttctccccttccatggtacattttgggtatcaggctcaggcagcagacttctcagaaaaggttacacgcggagccatcactctggcccttgtttgttatttgagatagtcttgctgtgtatagcccaggctgtcctcaaatttgcacccctccatcactagtcttatccccattgtcaaaacaagaaaactagtttaatttgatctagcagagcctcccactcccgacccggggtgcctaatctgaagctctgggttgaattcagactttggcgcgcatgaatagcttgacatctgtggtgtgcattctctgaaccaagagacagagcacattaatgcttatgcatagaggtcatgggggcgtgctgctctggcttgctctccgtggcttgctcagcctgctttcttctgagtgccctacctagccttgaggtctctggagtgccactctagtgatactatgagttggaaattggggcgtgcagaacagcaggcagggcagagggagcagttaagatctactcagagctctgggtgacaaggccaggacccattgcctgtgaggtatgtgggccagacaggaggcctggctcatctgtgggccaaaggattgtcctctctgagcttttagaatctcaaagggccagctggtcttgaggaacggtttctcctcagacaggagagtgctgaaaaggatcaaaatgtcgtgacaaaacttcctaatataggaacagcaacatgaggtgtacactacaattgtcctctctctttggccattagaattgtctgtgactcccccagtaatgccagggttctggtactccacccccacccctcaacaggtgaataaggttctttgaactcagatccagttcttctttaccccaaaggctctgacatctgccaatctcccctcaggccactgagagctctgtgcatcctgtattaaagctttagctcacagtgacacacctaatccaacaaggccacacctcctccagcaaggccatacctcctaatagtgccactccctgggctaagcatatacaaaccattgcattccattccctggtccccataggcttgttcaaacacatgagtctaagggagtcatacctagtcatagcataatgcaaaatacatttagtccaacttctaagtccccataatctgtagcagtctcaacaatgttaaaagtccaaagttcaaagtctcttttgagaatcacccaatcacttaactataatccccaaagcaaaacaggaaaccagctaggcaaactccaaactctgtgcctccatgtttgatatcaaagcagtcttcagatctccaacttctttttcatctttgttgactgcaccaaacttctttctcctgggctggttccactccctgtaagcagctttcttcagcaggtatcccacagttccggcatctttaagatcttgatgtacccaagtcaacttcagcttcacagcttcttgtttcaatgtctgggatccacacctgatcttctgggatcctccaaagggcttgggtcacttctccatctctgccctctgtagtactctaggctctagttgactccactccactgctgctgctgttcttggtgatcatcctatggtactggcaagtaggtgaaagaagaagagtgaatattccttctcccaatgtccttatgtaggcctccagcagaaggtgtggctcagattaaaggtgtctaccaccatgcctggatctaaaacttgctttgttccaggctgactttgaactcaagagatctgcttaccccagtctcctggaattaaaggcctgtactacatttgcctggacctaagattttcatgatcactatgcttcaagatctccatgtcaacaagatctccatgtcaagatccaagtcagaaacaagtcttccatcctcaagatctggatcacaggtgtgcccttctgtttctggattatagttcatcccagatgtagtcaagttgaccactaggaatagccatcacaagcccgttgtggaggctgccccctgccccccgccccgcgcgcccctgaggctctcacccctttcttgtggcagctcttgtcttcatctccagtgtacaactgtcattcccactctgcatcttgccttcctgaacaatcaccgtcccaaagttcttctcagtcttttgttatcctcttccctttctttcacaatcttatgcagaatttaaaaaatacctgactccttcagtagttccagttgtttgctggcttgtggggggtgtagtggggtgaaccaggtggggctgaaaagtgggtgcaggcttagattatagccattagagcaagtcttcagtgttccagcaacaacagtttttgaatgggagcctcagaggtaactagaattctacggaacatcttagagctacttcctctctttccaatgcccacatggatgggcttcagcatcctttcagatcatgaagcctcattaactgtgctggcctaattggccatgactagtttgtgtgcttgagggatagggggaggggagacacttgtcgctgagtgagttacaaatgtatcctgttaggaaggatgtgggcagatgcctttcattatctttactgcatcaaacattttatgggtatgagtgttttgcctgcaagtatgtatatgtaccacttgtatatgtggaccccatggaggccagaagagcatcaggtcctgtgaaaccagagttatggacacctgtgagctgcaaatgtggatgctgggaactgaatcgagcaggtgtttcattgaggtgtttcaaccacacagctgtttctccagccccagaagccatctctcattccagatttagtttatttaatctatttccccctctttttttctccctgcctctacaggagaaaataatgaatgtcaagggaaaagtaatcctgttgatgctgattgtctcaaccgtggttgtcgtgttttgggaatatgtcaacaggtaattatgaagccagctagaaaggctgctttcattccctgtgactggtgccagctgagtgaccaatcagtctgaacataagggacggagccgtgagcaggagtccagtcttcctgtgttcctgagccccagatggccattaaaactgtagaccatccaagtcacttctgccttagtaattatcctctttcatgccgtgctcctcaaacctcgaatttctgtaagctagatggagagagaaagtacattaagccaaaaccaccatctcaagtaatttgtataagcagatcccagaagattcaggccaggcagggtagtgcatgtatggagtccttgtgcttgcaaggcagaggcaggagcatcatacaaatggaagaccaagcttgtcttcatagtgacttccaggccagctgtagccttacaaggagaccctgactctaaaaataaaggggctggaaaggtggctcagcagctaagagcactggctgctctgtcagagggcctgggattgactcccagcacccacatgccttggtggctcacaaactcctgtgtccagtgtcaggactccttcattgttttctggcctccctgggcaccagaaacacaaatggagcatatccatccacacaggcaaaatacacatactcataaactcgaaaaataaagaaaggaaaaaaagataaacaaatgatccaggtaggacttccacaagaaaccagctctgagtcccgcagtcctaaaatatttgcaggatgaaagggaccatccaagttgctgggatttgctgcaaaaaaataccaagttttaccagtgattcgttcgtgagtggctgaaagcctcttccgccctcccttggaaagaagggtgaatgaaatgtttctaggttgtcaaatgcatctgtgaattaaaatctatcagctgcctttgctcctggaagctctgctgtttgaggcctcagggggagatatgtctccatcaaaaagtccctgcaggctcctaagaaggagcactgcctgagctcagttccacttcagctggtccagagttttctcagaagaatacattttttttttaaaggtgaagtgtttagtggcccgagagttctttaatctagattgtcagccatctgatttatctctttcagactcttgagttttaaaatcagatgagccagcagaactcttggggctacaaaaagaaaactgtatctttaggtccaggagtaggaggggcaaccttccagtcggaatgagcaagataagagtttcaaagtgtagcaaacatgtaaccacttctgggatgttctgttgtttcattctgaatagccacttttgagaaaaggcctgacaagatagggtgtgaccaacttaaaaggtctggagagtaggccatttgaattgaggaagctagttcaagttaagagatgattcactaattggatatggctacccttaggctcttgggctgaagaacatcttggctagaccttaaagccagactgcctggttggtcctggacgcccatttactgcctgtgtggccttgggcaagttactcagctactctgttctttagttccctacttttaaaaaatgaggataatatcccagcatggtggatcagacctgcaatccccatacttgagtggctgagtctggaggatcactgtgagttaaagccaacctgggttacatagtaagcttatggtcagcctgaactacagaatgagactccgttttaaaaagaaaaagaaaaaccctaaaaacaaaactgtagagatcacaggtcagtggtagagcacttgcctagctttgcaaggaatccctgtaccactgatgagcaaacaagaaaattcccactgccttcatcatcctcatcttggtcatctctgtcataatagccgggtaccacagcttgtgtggtggcttcaaccagagtgtcttaggcaaaggtgccgtccttgtcagttcccatgtgaacctttctccttggtttgtagacagccaccttctccccagacccacatatgatggagaataagcaacttgtaattgtttccttttcttatgaaaacactaaatccatcatgaggccccagccttaggctcccatctaaacctagatacttcccagatgcctacctccaagtgccacatcttggggacagggctttaacagacacattcactacaccgtagcagtctttgctctgatgggcaaaacatgcatcaagattgtggtgtctagaaggtatgtctccaaccactcactgggcttgtcctctggggctggaacactcatttagataaccagcaagctctgaacggagtttgattagacacctttggtgttgtcttattagagccatgcctctgttttttgagtggctcactaatgaagacatggtgagtagagagctggctcagtggttaagagcacttgctgctcttcaagaggacctgggttcaattctcagcaccctcattgggcagctcacagctgcctgtaactccagctccaggggatgcagtgacttcctctggcctccataggcactgcacacatcagcatccccccctcacccccgcaacacacacacaccgagggggggtacggagggagggagggagggagggagaggggggagggggagagagggagagagagagagggagagaagaagagaggagaggagagttgaaagctcaagagtacatacatacgggtgtggcatctctgaaagagcattattatctttgttgccaggcatatgttctgagcatcatggctgtaggtggtctggctactttttaggcagttgtttgatactaagactctagatacattgtttttctgattcatgaaatcacttgtttttctgccagagtacagaaaggggaacaggtctctggcactatccaaactggctatgcactgacctgaggtggaccaagggcattcaccctagagaggcaggtggcactgtgctcaaagggatttaaatataactgactatatccaagaactagtatataagtcatttaaaactaatactgccttctgggccaaataggactgcagtgagatcctgtttcaaaaaataataataagggctggagagatggctcagtggttaagagtactccctggtccttcagaggacccaggtttgattcccagcacccacaccgtgcctcacaaccatctgtaactctagttcaggggctctgatgccatcttctggcctctgtggaaagtgatgctggcaaaatacctattcccataaatttttttaaagaaaataataaatgaataaggagaatatggtccaggaaggcatttgatttcaaggtttttgaaaatccagtgccatgttttagagccagaaggaatcttacaggttagtataaccattgagataaagaaggtggtgaaggtggccggagttactgagcatgtgtggatacccaggctgtgtcactcctgttcttagaatggttccgcaaagtgggaatgactctgtgtgtgtgtgtgttgatggcaacaccaagtctcaagaatgctcaattaaagtttatggtcatgtttggggaggacttgagcccctgttgcctgcctgcctgtgagccattcttttacttacagcacgcctgtccttgagctgggccattttatgcagatgacagagtggaggccagccttgctgggggccagccttgcaggggaacagggtggggtggtcagtagtggtttatatctttgttctaagtagtattagatcttgagatcctccgcctcaggctccatggaagagtgctcccgtcttctgagtgctcaagggccacatgaaagccgaatagagcccttcaccatagggcattacagtatggattgggtgagctccgtgcataaggagcctgtgatttaaggtgaatgaagggagttgaggtagagaggagaccgtgagagactgtgagacaaggaggcagagactgcctgccctggaaagagattcatagacatttgtaaaacacattctgtgggccaagtgccatgccaggatcagatcagggagggcacagaagaggtgactttttgagctgtgcctggaggattagtgctgctaaagtgacagttgagcctgaatatcattggcagattctaggagaagatggtaaaatttagaaggaaggctgttaaagacatgatggcaaccattaactacaaaatagtgccccaatgtcaagtagtgttcttaatgttggcttgtcttctcctctcttctcatagttgccctcttttcctcatggtccccccttttctaattgtctccccctttttcctcattgccttcctctccttctcattgtctcctcctcctcctcctatggtaagatgtggagttactccacaggctcagatgtggggttctgcacctcattagtagaatgactttgagaagactcatggattgcccctgccctccagagtaaggctggggacagagtggtgtgaggattcccaaagccactgtgtgtcaactgcgtggaacagtgcatggctaggctcaccaaagcactacattaatacattgatttaggagctaggtacattagggctttgtcctggagtatggatcttggggcaaagctggaggaggtaacagggcaggaaggcagatgtttgctccctgggaggaggcttgatctctggtgtggggaggaagtggggagaggagataagagccaaagagaccctggtagaatctgaaacaactattaacgatgggatgagcaaagtcagccatagggtttaggcacagtgcctctgcccagcaccaaattactcagtatggcactaagtcctgtctttttgagacacttctcattggtcattgctatgcagagcagggaggcctcaaacttgtagcttctgctgctcaaggctggaattagaggcaccaagccaccacacacattttccagtagcctctctggtcagcactgtcaccagccatggctgccttgaccactgcccacttcctaactgttctccacaccaactctttatgctcattgctgctctctggccacactagctttctaccagttcttcccaggcaaattccctagccaggatgtatgttgctgtatgttgccttctctgttacattgtatatttttcatgagccccagcactcggtgtgtaggacttgcctagcacgtgtaagactgatgagagctagtgccctaaagtagttgtagctggcctagccttctggttaaagcaacacccatgggggctgctcagaagaagggatctgagctgaatgtggcggctatttcctgtggggaagaatcctcagcctgaggtggctggccgtggcgcttccaccttccccgccttcctcattgcccagcttctgggactgtggtggaagaggaccttcctgtcatgtaacaaacagctgggtgactttaaaagagagaaagagggaaaaaaatcccccaaataaaaacaagaattgagagtgtttgggtgcccacttctgttcctcagtgatgcttgtgggaatcccctgagaacccaaacgcttaaggaaaaccactgcagtgaagcctttctgagaattaaaagtatatgacgtttctatttcttatttgtccttagcccagaaggctctttcttgtggatatatcacacaaagtaagtgttctgaattctgtgtatctattggatgtctggatcacttgattttttttttttagcccctaaagttgatttcctctcttcaagccagccaatgtagtgctcgggccacagtaaagggaggagagaggccaggacagggaggaggattgctagggccctggggtcagggctgcaactctgctagtccccaaactggtctttgtagaatagtgatgagttttgctctcggttctgctcaggggactctcctcaaatattgtcatggggaccatttttggttgacgtagggaaagagcccagggaactgcatgctgtagtgtgtaccctcagtgctgctgtgaggcactgagggaggacttacgttcagttccagtttcttatcttctgcatggtggccaggaagttcagaagaaataatttgtaacagctttcaccacacgtagccttcatttgggtgtaattcattccctggtgttacacctgccttgtatccttacctgctgaggggtcttggccacacactcaaacccactgagccctcacttcagccgtaaagaggagaatagacgtgaaacttgaatttgagattgccaaggtcatgcgaaaatatacactgggtaaccaaatgaaccagtggcattttcttggtgtatgtgtgtggtatgtgcacgtgtgtgagtgggtgtctatggttatgcctgcctatgcatgtaccagtgtgggccagagggcaaggtttattattctattcttctgtacctcaagtttggagacaaagcttcctactgaatttgggtattaattttggctataccagctggccagccaacccaggactcctggtttccccccctaccccccactaagtgccagggttctacacttgtaccgcttgctttggattttgtcagagtgctggagatctgacctggggtcctcatgcttttgaagcaagcactttattcactgagcaatcttcctagccactaatatttcttttattaaaattgtgtgtgtgtctttgtgtgtgtgtgtgtgtgtgtgtgtgtgcgtgcgtgtgcgtgcgcagattggaggacaacttggttctttccttctactcttatgggtcgaggaattgaacttgggtcatcagacttggtagcaagtacctttgtacccactgagatatcttatccgcctttctctattgcctatgacttttgtgtgtgtgtgtgtgtgtgtgtgtgtgtgtgttttctttcccaattattataagcacgtcttgaattcactaactatctcagacatttccagaggcaattgaggcctagagtgaatttcttagccaggtgtggtggagtgagcctcttgtctctgccataggccacatgggagggcggctgtggtagcctgagctacaagccaggaccccacctccaaacagggtccctaatgttgtatgcctgttcagagtcaccttgtcactgcatccaactttctctcactagagacacctgaaagtagagattattaaccatgattatcaaaagtcagggccaagattgatatataactattttctaacttttctgttgtcaatcttcagatttcctgaagctttcattgattgggcaatgggatttttttctcagattaatctctataatacatgcatgtatacagacacacacagacacacacgcatgcagtcattctcgggaaggtgctttttcttattttaatattacccctcgttacagccgctttatgttcaccaggctcttgcatatctgctgtctcattggtcattacagatcccttcgtggaaggattattattgattacccttttcagagaagaacgtggcagtttagacagtgtgagtgtatgccaaagtcactccactagcaggaggagatcgtgaccacaggctctcaggtctgcagggtctccaccattctgatttccctgccccttatccttcaggggtcccagggatgagcagagtgctcagggctgcccagaagggcgcagctgaggcccctcaagtccactctctgcctttagctcagctgccttttgcgtgtccatgtttcatgagctgcatcttgacgttcactttttctagtgctacccgacccttaaagttcaggaccgcctcgatttctagatgtgtttatattctttttcatttcctagaattccagaggttggtgagaacagatggcagaaggactggtggttcccaagctggtttaaaaatgggtaagggatcaggatgggttcctaagtccctgaaacccacagaggacccatggcctcctccctcccttcttctggctcactggactcactcatggagtctcctcattgctgttgttgtttttgttgttgttagcttctattgttattgtgaggggtggggagtgtgtttgtgtgtatgacgtgtgtatgattgcagctgtgtgtacaccatagtactcatcggaggtcagaaggcagctttcaggaggcaattctgcctttccagtacgggttccagtgtgtgatcaccagactcagatgctcaggctttcaggacaagcagttttacaggatgagccatctcaccagttcagaggaggctaacttacaagtggaattctgaggtgtctccccgcttccctccccctcctcccannnnnnnnnnnnnnnnnnnnctcctcccccccttcctgtctgccttcctccttcctctgccctttcttctccagttaagggtgaagttcaggctgaagtggaaatttcagaatagacacagaacagaaatgtcccttggagtactgttctgaaacatctcaccgacttctgaaataactgagggttacagggtcactggaacctcagcccctgacccacatggtggccagagaggcaaatgctgtaccttttatcagaagtgtgtagggatcaaggggtcagtgccctgagtcctccagtccacccagtggtgtgagtgatgccttctttcccttgagacacgagtcatggaagccacctgtccttaccaactttgtcctacctttgtccacaggacccacagttatcaagaagacaacgtagaaggacggagagaaaagggtagaaatggagatcgcattgaagagcctcagctatgggactggttcaatccaaagtaaggacagacaggagattggggtggggggtgctgagtggggttctgaggagatgctgaggggagtgctgagggggtgctggcaggagggggtgctggcaggagagggtgctggcaggagggggtgctggcaggaggggatgctggcaggagggggtgctggcaggaggggatgctggcaggagggggtgctggcaggaggggatgctggcaggagtgggtagaccttcctcaatgggctttggctaagaaactaagatctgggtgctttgaaccagactgaacactgtggtaattgcagcaggaaatggccagtggtaggttaaacataaacactgggtgttaaggactttacaggccacataggatgctgctgagaaaatgacaaggtctagggtgagccaagaaaactctctctagattcagctaaaacatatccatgaggtagaaattatgagctaggagatcccagagccaggaatccactccgtacacaagcagagaacgcgtgtctatcagaaactaggaaatggtagctggtgttttccaaactgctgctcgctacccactcacgttctcagaaagcagccgaagtatcaagcctaaacagactttaaaaacaagcaaggaatggtagcgttggtgcagcgggcaaagcacttgccgtgctagtgtgcaaactggaggtcagacccctggaagctgtgtgaagccagatgcagtggcctgcgtgtgtgagcccaagcataaaggtggaaatacagacaagagaatccctggaaggtcttaggtcagtcaggctgctttaggaagtgggaacccccaagaaaccctgcctcaaacatggtgggaagtgagaactgtcacctgtggttgtcctctgacctccacatgtgggctgtggaatctgcatgcccacacactacatacacgtcacacacacacctacacatagcattgaagtataagagatgatcaaagtgcataccctaaggatgagtgtttgtaagtagagttttgtttctgtgcatatgtgtattatttgcatataatataaactatttcttcacttgatcacaaccaaacttgtagttctttcaaattaaagctttaaaagatactgtgttaggcactgtgttggggacactatgatacgtttaagaagttcctcatctcagaactggggtttcttagctcagtagcggagtatgtagttagcatgcatgcgaccctgggttgatcccaaggactaatatcgaaagaagacaggaaagaagggaggagacgggatgggcaggaagtggggagtgggtagaggggtggggtgtgtgtacgtcatagtcctagagggcagtagatgttaaggtcatgtgatcagctgacgggaaaggtgtgatcagagctgcccagggcgactgtcagccctgggagacttgtgattgatggttcttctaggaaatggacattaggaactgccacaggcttaggacctgagaggtggcactgtgtcgtgtatgtgttaaggagtttctgggtggaaagcctcagctgctcatgagcttggctgaagatgagctgaagacagaaggtgaggtgtcatcaggctacaggtagcagggagatctgtagtcacagatgaggtcattggggcagaggagtaggaccgggtgtgttctgtctcagccctggaggagcaggcagagaaagagacctctcaaggggtgaggcacagctgtagaggaaggagagaacagtgcctcgttctttttgacggagctcaggctctggagaaactggagatgttctggcaagtccactgagttctcaggagattcatgccagtgtgcaagactgagaattccatcctgcccgtatcttaccataggctgggcatggagtagctgcctgggacactatgagtgtaaaatgttgggagcactgcagctttgctaagcctcttagatggggatgaggtccggggcctagacagctagagatggcagctatggggatgatgtctaagagctaaacagctagagatggtgcctatggaggtaagacacccccgcccccccacaaacccagggctagacagctagagatggctgctgtagatatctcagctccgccccaacctcttctttctcatttcccatcttcttaaatacctcagtcctagcctgggagaagttttccgttgtccaccaacagtaaaattctattatcaattctccctctcagattctttccacagcctctctcccttccatagccacctccgctgtttgtgctgacattacctctctattgggattgtacagcttgtgtgatgtgtgttccacatctttcctcagtctactgtgtgcttcataagaattttaaacatcgattcatttatttgtgtgtggcaaggcccgcatgtataagtcagaggacaacctgtgggagttggttctctccttccactgtgtgtgttcctgggatcaaactctggctgtcagctcccacgaaagtgcctttgcctgccgagccacctgtccagcctaatacacagaattgtaatacttcctctagctaacccgtggataccactaatgtacctgtgcatgaagacatacagttgggcatgaactcctagtaacctagagacccggatgctctattgcaggaggtggtcattttcctgaagtttttgccccctatggtggacctggccatacagaggtcacacagtttgagtgcccagtgcagaaggaagggcatttgagtgtcacatagcaccgtttcctcccgctctttagaaccttatcatggcggtcttggctcaggcagttgatagtatcacagtggcttctttgaggggatgtgcttgtgggttttgatgactgagcttgcttcaggcacagtttccccctagaaactggagtcccctcatcctgcctcccacctgctcccacctgcacttccaggctgttgtctggcttctccgtcacgcgccactgacatgctgaaattgccagtggaactgaacaattaatgaccgggaaatagaatgtttcaatttttaattttgctttaatttttaatagcgctgttttgtcttcctgctcaaaggaggttctcactttcaaatagccaaggtggacactgggtttccactcagtttcaagccagtagggcccgagaggccacagagctgaggagtggcatggcagggttgagcacccactatactgaaggttctcaggggaagaactgggtgccattttgtaactttaactttttcaaatcctatttttaatgatagttcttaaacgctttaaccttccttgtaacccaccacccaccagaggtaatggaaaagaaaggatatgggggaagtagacctatattacaaaggttctttggaacaactcctgtctgtgttgtttggaaatcagcagttcagttcacaggttagcaggcagcgagtgccagctccatccactcgcaaacacctcacatatacaccagcagtccagtttggtggtcgggttagcaacagtggttacatgacctagcagagagagccaggctcagcctcagctcgggtcagcaggagggactaataagaacaccaagagaaagtctctgctctgcctctctcagggaagtgaagatcaggaaagataagagtcacaagtgttgcacaggtaactgtaccagcaagccaagttctgtctccgtcactccatggagtcctatttataccctccaaacatcacgtgtcctccatatactttgcctcagcacttgcatctaatcagctaagtccttgaaagcagcagcaaactacagcacaccaccagaatttcttttggtgcatttctctctatggcatcccgacaaatgcacctcaactatgcagtgtatagcggaccaatacaaagaatttttcatcatgagtcctttcacattcttactttagtagaacatcctctctcctctgtctgcttcagtgaaacgttccttcaaaagtctgccttagtctttcacctgtgtgcaccttgacgaagtgttcctttacatgtttgccccagcaaaacaccatctaactgactttccaaagaacccttaggtttccactccaccatttctcagtgcttaaacttcagtttggctctttgtgaaaattaagaggccagtggctcagcccccttccccttccggagcctctcttgccttgacagtgagtgctggcaatggctggtgtggggctaagtgcaggagggaaaggcctgttcttagctcctggtatacacgacacattaaatacaggcctagtcttttcattaaccacagtataacatcatctgctcatatagaacaatgagcaacactgtagttcacgcacagcaacaacaagacagactgaggaggttggctgggttagagctactgagacttccttccttccttgacagcaaagtcaacagcccagcagatgaggctctgacataggagggagataacattcacaaacgctgcttttgagaaagagaatctgcatatgattatttattttctcctttttgttttgaaataccatcactcaataaagccagcctgggaagggagtaaatgttctaccagggtaaagctctgcaggtgaacacccctcagagctgcctcctgtgagctcctaataccagtgccacactggcctatcacagttcagtgctgacgaaatgctgcagtagctactgagtggacaaaggcaaatctggggtttagccagactttatcagctgagcacgtgtccatctaaggagcaatgaaaactggggctcaaagcactagactccacagaaagactctgggttcaagtcacagctttcctccttagtagctgtgtgactttaggcagataagggccagactgtccatactgcagacaacagcactgggaaccagtgaggtttagctttaaataacaggaaaatgccacaaggccaagcaagcttgcacaacttgtatttcacccatccaggacctactatctttgtacttcactctattccaagagttggaggtaccctatgcatttgtgcctggcccttgccaagactccaccccttctgtaattcctgtctttcatgcaggcaagattcagtgacagtcactggcctcccttccttggccagtctctcaccacacctcagtgtaatgcttctgactcggtgttgcatgcttcttctcaccaggaaccgcccggatgttttgacagtgaccccgtggaaggcgccgattgtgtgggaaggcacttatgacacagctctgctggaaaagtactacgccacacagaaactcactgtggggctgacagtgtttgctgtgggaaagtaagcaccactgacaaactcacccttgatgatttgttcttgttctagcatcaaaggatttgtgtggggctccagggccccacaaaggctggaatttgacagtagacttcccccttctttcttataatggctgagaaaaaacaatgatagtaggtgatgaggtatttctctgccagtgaatgagccaatccaagccagagtagattgtattaaatacaggtttattgggaagctgctctcaggtgaggtcactgaccccaaggactgaggccagagatgtcaccgtggggagtatggtggggaagggcagagaggtgggaggggagggagggagaggcaaagaaagagagagagaaagggcagaaggaagggagggaggactgggggaaagagagcgcaaatgtgtgcatgttaagattctgtctggactccacgcccacagttacctggcaacggccaggtatgctcctactcatagttacctgggaacagccaggtaggcctggcccacaataaaacgggctgcttgccccttctctctctctcttactcttgcctcttgctccccctctctccccattcccttccctcctctatcaccatggtcatggccggcctctacttctttactctctccttctctctgcctttctctgcctctagtactctttaactcccctcctcaggccctgaataaatgctattttatactataccgccatgtggctggtccctcagggggaaaggacaccttggcatgggtccattaaggcacccccctccccccatacctcaccacaccccatagaacatattcttatatttctttatctttttataatcacaagcaaagtgtctggattacaaaggcaagaacctctggggggaaggctggaaagttcaggcatgggggtaaggtatgtcaggtagggactgagggatgctgggaaaacctggaggccaggtctgctttgctatgtaaaataggcaccttggtcccttgttcctgggttccaaaccaaacaggaggtaagtccaccaattcccaccacacaagggagggagactctcttcaatgccactggtacccagaaccaagaccattcctgccttcagaacctttctagaaaggccccaaaagccagctgttgactggctgggatgtaagtgctcctcctttcttataaagcccagggccacggacagggtgtggatgtttgggtgtgtcagaagacaatttaggggtgttggctctctccttccactatatgggttctggggatccacctcaatgctcaggtctggcacccatacctactgaaaagtctttctggcttgtttctttttctgtccccaggcccttggtgttggtacttcttctgatttaaacacacacacacacacacacacacacacacacacacacacacacacatcaacaggaagttggctcgcctgccatagacaagaggagtagaaggagcaggttgaccttccattgagctttcacaggacaggacctaacagaagatgctggggtgatatccccggatcccctcccaggggccagcagtcctccttggctttgggaagtcctgacattgctcagtgtgctcattccctgagcctaatgccatcaagtgaaaagcagtgtctattgacatttcactagaggcatttgtattgtttagggattggagtcagggctcaactcagcaaagcctctgggcactgaagccacaagacagccacattgcacattgatttgatcctagtgtttccctaaaagaacagaaagttacccactgtcccacaatgctatcaatcatccaatcacaactctgcagaaaaacagaagccagaacaccacaagagccctgtgatccctcccacctcctgggggaaagctgtgctcccagatagacaagtctgccacagtgaatgccagagaaagtgcatctggaccttagggattggtagttgcctgtcttcaggctccatgcctggagccacctgtagcactttagcctcttaagctgactgttagacactgcggtgacactgccctccctgccctgctcctacggattctttcccaagcttcagggcacactgggtttccttagaggtccaagtacagaggtgtgtcctgacctctatccttgtggtcctgtcagaggctctcctggaccattcagacctatttgcccatctaaagagtcacacctacaagcctttgagctccctgatgccaaaaataaaaagtgcaatttgtttcaactccactggaaaaacccaagcattgagaaaaacaaaacagcaacaaaagaaacaaaaccaaagccaccttcattacattcagaacattgtgattggctacttgtgtgctcagcaaactgactgtggtccatgtctgtgtagggtttgcacaaggaccctctgacgtcaccctcatcctgcagtctccttggtatttctttttttttttttaaagatttattatttattatatgtaagtacactgtagctgtcttcagacactccagaagagggcgtcagatctcgttacggatggttgtgagccaccatgtggttgctgggatttgaactctggaccttcagaagagcagtcgggtgctcttacctgctgagccatctcaccagcccctccttggtatttcttgggaagacagtctatagcttgagcttgtaaaatgatcaatatggtgtcattagattgagcaaatattcaaattgacaagagatatttataaaaatgagaaaaataatactgatactataaaatgttggaaaatatgtgaagtaataggaaccatttttattgctagttgggaatacaaaatggtgcagccactgcagaagaaattgtggaagttgcttacacaacaaaacatgctctgatcataatataatcttctggtcagattccttggtgttcccccacatgagttgagacgtgtcttcacaacaacctatgtagatatttttagaaatgttctttgtaactgctaaaacttgggagcaaacaagtcaaatggaaagatgaacggatcaattcagacaataggataatatttcctgctgaaaagtgagctgtcgagccacagagaagaaggaggaggaagtttttgtcaattgttacttagtgcagaacacaagctggaaaggttccagtgctgaccagttttgtgtcagcttgacacaggctagagtcatctgaaaggaaggagcctccatggagaaactgcctccatcaaatgcagcctcaggcaagcctgtaggacacattcttagtgactgatgggggagggaccatcccactgtctgtggtcccattccagggctggtgggcctgggttctattagaaagcaggctgagtaagccatgatgagcaagccagtaagcagagcccatctatggcctctgcatcagctcctgcctccagccctgcttgagttcctgtcctgactttcttctaggatgaaaagtgatgtggaagtggaaaccaagtacctctttccttcccaacttgcttctggtcttgtgttctgtcagagcaatctgtccccaaataggacagatctctactgtccactttctgattctgattctggaagagccaagctatggtgtcagggaaaagaatggtgcctgaaagcagctggggtgagagaaaggcagaaaaagaggagcctgggagagtgagttctaatgcagtcagactcttgtgatatagcactggtgggttttgctgatgccatgcttttgcacacttcccaacatgaaccatagtataacatagaataaccttatgttaatgtgagtgccaactgtcacacacatgccaccaggagcactggtggccctagtagggaagtctattcacataccaggtaggtacatgggtacattcaacactttcagctcagttttgttcagaattcaaaattattctaaagcatgctaattttttttttacattatatctgttttttattttatgtgcaatggtgtcctgcctgcctgaggacgttggttctctggaactggagctacagacagttgtgagctgtcatgtgggtgcatgaaataggattctgggaattgaacccaggtcctctggaagagcaactattactcttaatgctgagccatctctccaaccccaaagaatgctatttttaaaaagataaaattgttaaaatataagcaaactatagtgtggtctgtagctcaggtggttggctgcatagtgggtatgacactctaggtttgatcccaggcaccttaaaaatagcagatgtcctgctggtaatcctagcaagactatgagaagttcaaggtcatccgagaccgcatagtaagtttgaggatagcctggtatacatgacccactgtctccccccccccccaataaataaataaataaataaataaataaataaataaataaataaataagatgcaatctgagattgttctagtatatgaatggaatcataacatggtttttgtctagatggtccactggtgtttggggtagcccgtgagaggtttgtagaatggacatgagtaaggaattagatgtccatcctatgaacatgcatcctctgtgtcacagaggaggctgacagtgctagtgtttggggttaacctaaccgagaaggtaaggttgagttttgaatgctcagaggattctgggaagaattttctttgtgtttggcttagcagatacactggcctcttctggatattcaagagctagctccttctctgacagccagcttctcaatcagagaacagagccttagcatgaaccttactgcaacgcagagtagttgagaacaccgagctctcagtgtggcaggcatcgaagagcatgcggtcggggctgtgcatccccagtttgcttaacaaagctggcagtgagataagtcatgccactttccccaaggacacaatgaccagctagtgtcgagtggtatgtggagaagccatcccctcctaacatacaatacagatcatctactgtaatgttaagtatggtattacatgtatatatgtacccatatataagtgtgatagcccgtggtggttcaatgtagccctctctatttcaggtacattgagcattacttagaagactttctggagtctgctgacatgtacttcatggttggccatcgggtcatattttacgtcatgatagacgacacctcccggatgcctgtcgtgcacctgaaccctctacattccttacaagtctttgagatcaggtctgagaagaggtggcaggatatcagcatgatgcgcatgaagaccattggggagcacatcctggcccacatccagcacgaggtcgacttcctcttctgcatggacgtggatcaagtctttcaagacaacttcggggtggaaactctgggccagctggtagcacagctccaggcctggtggtacaaggccagtcccgagaagttcacctatgagaggcgggaactgtcggccgcgtacattccattcggagagggggatttttactaccacgcggccatttttggaggaacgcctactcacattctcaacctcaccagggagtgctttaaggggatcctccaggacaagaaacatgacatagaagcccagtggcatgatgagagccacctcaacaaatacttccttttcaacaaacccactaaaatcctatctccagagtattgctgggactatcagataggcctgccttcagatattaaaagtgtcaaggtagcttggcagacaaaagagtataatttggttagaaataatgtctgacttcaaattgtgatggaaacttgacactattactctggctaattcctcaaacaagtagcaacacttgatttcaacttttaaaagaaacaatcaaaaccaaaacccactaccatggcaaacagatgatttctcctgacaccttgagcctgtaatatgtgagaaagagtctatggcaagtaatcaggtataaattctcaatgatttcttatatattctgggtcttgggaaaacttgattctagaaatcaaaattaatttgacaaaggaaaagcagatgccggaaacttcttcccagtctgtcatacaattcaccactggccaggtgctgagagaagcattagggaacagtgtgggttgtgtcagagttggacggctccatccctttggcttcattatcttcctcctcatggagattctaaagcaacccagagaggctttgcagccagagacctttaataaggatgccaatgtgaccatcagtctgtaaaagctgatggctccaggagccgctggcagtccaggccccactaggctattgtttctgtcctgggcataaaggaggcagagagtgccaataggtactttggtggcacatgttcagagtccaggaaaaatggcagggtgaccacttagagggacataggacttggggttggtgattgaactgagttacaaacacagacagctttcttcaggatgactaacagcaggaattgaatggaaagtgtgttcattttgttttgcccaaattgtattcatgctgttagctttgtgtgttgagccctgtggagagggtgtgactgtatcagggaaggagagtacctcagcggactgaggaccagcaccctattatatcagaagacaatctctcatcatcgggtcctacctacaacctgctctgaacctccgagttcctcagcccatcgtgttccagtgtgggggcctgtatggagcaggtgactgaagacaaagccccctgtcacatgacctcatttcccctgctctagtactatgcaagtgtgacagccagccagccagatgtactggacaacataggaactgactttatggcaatgggagccgcagtcactacaacggagctgctgaaggttctgttccccgctctgagagcctgcaggagcccctgtataggtggttctcaacctgtgggtcgcgacccctttgggggaagtgttaaatgaccttttcacaggtgtcccctaagacggttaaaaaacatagatatttccactctgactggtaacagtagcagaattacagttatgaaatagcaagggaaataattctggggttcgtgtcatccataccatgaggagctacattaggtcacatcattagggaagttgagaagcatagctctacttgggtatttaagcaaattattgcaaagggggttgtcgctctgtgtttctgtgtatgcatatatttatattttgcttgtcttccagtttaggtcatctgtttcttcctttaagcagtttatttaaaaggccattgcaccatcttggtgaacagcatgaggggtttcaataaaaaataggatcttacctttgtccacagggctctacctcttacttttcaattgtgaacaaaaaaggtcgcacacccagaggcaacaaaacccacagaattcctgaaccaatgggagatgccaatggaagcagagcttgcacatctgctaaaaattctgcctctctgtcactgtgctggatccgtctaaagtgggacagttcaatggtctgaaagtttcaaaaaggctggggaatttgaggggatttttttttaaaataaaattgatccaagtttaaatctctaatgagtaagcttaggattttattaaaggtaatttttagacattcttcaaaataagaattcttgtttataattgaataaattattttctcagtatattctggtctggtatggattatgcgttgtatcctgaagatgttcagaagtgtcagttgtgattgtccataatcataaaggattttacgataccttgaatgagcttcacaaagacaagattacaaagaacaggctttattctcaaattataaagtgtgctctctctcaatctctctctctctctctctctctctctctctctctctctctctctctctctctctgtgtgtgtgtgtgtgtgtgtgtgtgtacacatgtgtacatgtgtgagatcgcctggcagagccttcatgaaaagacagtctatgagagcactgtccagctgccctgtgttcacctaggacatgtggctctcttctcgccagcagtctggtttctggacaatctgatttctatgaaaatgagtgctgtatttgcagaggattatcttgtctggagtcattggtactgtccatctcgtaagagggaatgactgtctgagggatgacctgggcctaggtacttctgtcttaggatttgattgctgtgaagagacaccatggccaaggcacatcttataaaagaaaacatttaactggggctggcttacagtttcataggttcggtccattatcatcattgagttgcatgcaggcagacatgatgccagagaaggagctgagagttctacatcttggtctgaaggcagccaggacagactcccttctgcaggcagaccggagtagggtctggatcacaaaatactttagtatgaaacacctcttccacagtgacacacttcctccattaagaccacacccctaatagaggcacttcccttgtgcaaagcatattcaaactacacagtcccccaaacgtgaatttcaggtgctttactaaaacttaggttcttgtagttttgggaacggctagctgagggtgggcaacttcacgataaaacagtagggacagagggagggcaaggtcactgaggggaacaaatcctggggacaatcttgcctggctccagccttacctaaggtctttgctgcttctgggctttacaagcttatgaaaccagcaagtggagtgaggcttccttttgtaaggcagtcattctattggactgctctaggattgtgagttcctcaagatgctgtgtgcctttgcaccaaccgactcctctctgtcattcatctcacaggctctgtctcacagggatctactgaaagagtgggggaatgcagcaacatctattccatcatgcctcagaggacgtgtgtgtgtgtgtgtgtgtgtgtgtgtgtgtgtgtgtacatgaatgcacatgcagatgtgtgttttgcacgtttgtctttgtgcattgtggagtccaggagttgacatcagatgtctaactcaattgttctctaccctatcttttgagccagggtctcactacccctgaacggagctcactgactgtctagagtggttggcactgaacttgagtggagtttgctgattggatagactggctagcactgaacctgaatggagcttgccgattggctaggctaacaggcactgaacttgagtggagtttgctgattggatagactggctggactccaagctgcaggtcatggtctgcagtcttcacaacagcagccctggagttccagtggcatgccctcacacctagacagtttatgggcgttctctgggatcagattagtgttcacgtggcagacacattatcagctgagccatctttccagcctaggcatgctccccactccctcccagtgtaacagacatcgggcttgtctacaagggagttgctaggttgggtggacagaggtaacaaggctcattctaactggatggcaccagtcaatgtggggtcccagactgaatacaaaggagaaggcaggcagagcatcagcatctctctgcttctcgactggagatgggaccagctctctcacatccctgctactagcatttccatctgtggtccagcagacagaaccttttccctgtggttcacaagctgcgacctcggggtttcagcttgggttcaggttgaggctctatgccagtgccatggccaacagggttccgtgctgctcgcagggcagtaagtcctggcctccttgtctccccacagcagcacatcagcggctctcagctcacatctcccttccagccctcgcagccacttggcaatgacagtggctgcatttgcatttttttttttttttttttttttgcttgtcctaactggatcgtgagtgtgggtgctactggcatgtagtgggtggatacaagggcactgctaagtgattcacacttgcacagggtggcaaacttcaccccatctcaagaaatgtcattcgtggcaatcttggagcggctggaattacactctttcagagttcactaacagatttatctgtttgcctgtgtgggaaactctaaagctccacttcctccctagaaaccagagctaagacaaagcagttccctctcgtggacaccagggggcaggagttccaaagagaaccagtttctggagtgatgaaaacattctttttggtgctattaaaggcagcgtcatttgtataaatgctattgatccttcatataaatggaactagctctatagcttagtggtgctgtaggtgtactgtgcagtttatcaaataaacaggtagaaatcaaccctacatataccacagttaataaagaaggcataagggaagtaggagggaatcttaacgctgacttagaggagagacacattgcttatgtgcgccaagggtgctactgtttgtaggtgtggtatggttgagatgtggttctccccgtggagttcacactgaggtttggttccagtggatagtgctgtgttaggcattgactagggattaatgcttttctatgagtgagctgtcgctctggagatgggcttctgtgacatggttgttagcaagcctggcagctcccctccaccactcaaacccatgctccgctccacacagtgcctctggctgactgccacatggttttcaacagaaactgaatggattctgggatatctggagctggaggaacatttttttttctttttgtaaagcacccagcttcggtattttggtggtagcaacacaacacacaccaagaagtgatctggaattcagtggcccttgcttcaactgctctatcaaggggagctatagccttcaacaacctgtcccacccctctctgggctactcaactttataggtgacactggtcatcagcatccattgggtaagaaagcatcccagtagcggcgaccacttgacgacctcctccagggtttcttgggcagcttactgctttgtatatttatcaggtggacaggagacagtcggacactccctgtggtggaacaccgtctccagaatccacaggcagcccaacggagtttttgtctttcttagtggcaagggacacaacatttattcacaatttacaattggctgcatcttggaatttcctggattgagaatattcacatctggatcccatccaaagattgctgctgttcagttgtcttggtgtaggcttgacatcgggggttttaaaactttcctgtgggactgttagtcttgggaccttggaaatgactgccattagaacaatttgctttttgtgcatggcttttattttgatgttgtcttttttggtttgggttttgggttttttgttgttgttgttgttgttgtttctgtttctgttttgttttgttttggttttggtttggcatttgttaaagttcttaaatttctctattaatcattttcttctaaattgaatttggaaattttgggttaaatttgatttctgctccattttctgctttattaaatttgttatatcttatttgtgtggaggtcccctttagaggtcataggacaacttgagggaatcagttctgttgttttactatgtaggtctcagtgactgaactcaggtcctcagacttagcagcaagcaccctcactcactgagccatcttgctggcccattccactttatctatgaaaccagatatatacacatgataaacattttttaaaaagatttattcatttatgtatataagtgatgcatttgcatgtgtgtgtacatgacagagagaacatcagatcttattacaaatgtttgtgagacatcttgttgctgctggaattgaattcaggacctctggaagaacagctagtgtttcttaactgccgagccatctctccaatcccagctagacttctttttttttttaattcaactaattttttatgatattcaacacaatatatatttctataccaatcataagaatgatggacatgttattaaatgaacataaagtagataagtagatttttgtttgtttgtttgtttgtttgttttatttttagtagagctttaaaatcttggcttactgtggtacaaaccctaaataagaacaagttttaaacattggagttcattgtaataaggctgtacttcaatgtccctcacatcatcaaaggattttacctccatagtagctaagctaagagttgacagttctgctgcgccaaggaatgaattgtaggcacgattatttggatacagatttcctgctatgttcaaagctatttgatttgagtgattgtcatcattctcagcccacagggaacaggtcacattcatttaagaaatggtgtgtgtattaagatggtctatccacgaagccattcatcaactgtttcagtgagccatggttctgcttggagggtggcacagacatgaggtgagggtaaaatactgattcattggctgtgatgattttgaaaagtattcatctcagaaaaaagagtaacttataaggtcctcttcttcaaaattgatacaataattgtaaatatcaaggaaaacattcaatctcaccctttgttgttctcctacaagccacctcccaaattaattgcctctgtttcttttggctgtataaattattttcaaatatgtatgctgttctgaaaacaatagcatagtgtaaaaatatcaagtaaacaatcctcctaatagagaggctgagataggggaagctcgatttcaagaccattattcagtacacagcaagacactgtcacttacaaacaagcagaaaatgtatatgaattgtacaatattggacctatttctccaattaccaaattagagagaccactgcataacagcccacaaatttctaattcctcatatttttgaattttaatcaattaggatatgctggtaatattaattttcatattgagatattaaggaaaagtgatcgttacttccggttatttttgttgttagaggtgaaattatgtttgtgtgggtttgttgaaagattattcttgctttttgtagggtgtagtttcccttcttgtattgatgttttccatctattatcctttgtagggctggatttttggaaagatactgtgtaaatttggttttgttatggaatatcttggtttctccatctatggtaattgagagttttgctggatattgtagcctgggctggcatttgtgttctcttagggtctgtatgacatctgcccaggatcttctagctttcatagtctctgttgagaagtctggtgtaattctaataggtctgcctttatatgttacttgacttttttcccttactgcttttaatattctttctttttttttttaagtgcatttggtgttttcattattatatgataggaagaatttcttttctggtccagtctatttggagttctgtaggcttcttgtatgttcatgggcatctctttctttaggttagggaagttttcttctataattttgttgaggatatttactggccctttgagttggaaatctttgcccttttttatatctattatccttaagtttcatcttctcattgtgtcctggacttcttgggtgttttggggttaggagatttttgctttttacattttcgttgactgttgtgtcaatgttttctatggtatcttctgcatctgagattctcctatctcttatattctgttggtgattcttgcatctatgactcctgatctctttcctaggttttctaactccagggttgtctccctttgtcatttctttattgtttcaagttccatttttagatcctggatggttttgttcatttccttcacctgtttgattatgttttcctgtaactctttaaggaacttttgtgttttctctttaagggcttctagctgtttacctgtgttctcctgtagttctttaaggcagttatttatgtccttcttaaagtcctctatcattaccatgagaagtgattttagatccaaatgtaaaaagcaaaaatctcctaaccccaaaacacccaagaagtccaggacacaatgagaagatgaaacttaagtgctttctttgataagaattgccttgatcatagtgtctcttcaggcaatagaacagtgactaaggcagggtttgcgagaagagaaccaatggattacatacacacaatcctatcagttctgttccattagagtaccagaatatagcttccaatagtggaatagtgacacttttaccttaggggtaatttacagttgtctaattggacttaagacctgttcaataggagggagttctgctggctactcatgctgactccagaggcagggaaaggctttctctttgtaaactttgataactttgtaaaccctcaaggcaggaaagtggccaggcactggcctgaggagttccagcagctagacctctctgtcataacatatctagcctctgtgactgtcacaaaggtggttttcagcccctccagaggaccctccccagatttgttaattttagatgaaaagtctaaaccaaagagccaccaatccctgaacaggaaaacccatcaattcctgagctttccgattggtcccgatgagttcacttggtgggacttgaaatcccactggggatttccttccttagggttttactgttgtgaacagacaccagacaccatgaccaagacaagtcttataaaggacaacattcaattggggcagcttacaggttcagaggttcagttgattatcatcaaggcaggaatatggcagcatccaggcagacatggtgcaggaggagctgagagttctacattttcatctgaagttctgctagcagaatactggcttccaggcagctaggatgaggtattatagcccacacccacaagttcacacctactccaacaatgccacacctcccagcatgccactctctgggccaagcatatacaaaccatcacacccaccagtccataccctggaaatctctgcccttgaaatctccactccctaagaaatcctatatttgctcagttcatgctgtcatctcccaggtacagagtcagtaacctggattcatcattctccccctggacttgtccctctaacaaatctcttttatgagatttgctgcctggtgtgacactaacagagtcagtggaatttatgtacatatgtaaatatgtttatttattggtagaggaggttactataaacttgagagggagtgtggagggagacatagaaggagtaaatgggtggaaataatgtaaacaaaggagtcattgataaaattcttaaacaaatacatttaaataaaaacagttcaaaatggagtcttctggagagctgtccctgactctgctgcctgcagatcctgttcccttgcctctgctgccttgtctgccttaggtggagaggatgtgcctgtcctgcagggacttgatgtgtcaggatgggttctcaggggagaaggggaggaggagtgggggaggggctgtgtgaggaggggtttgggaggaggggggctgtaaatggcggcataaagtgaataagtaagtaaatgaatggaagacactaatcttctggttatgaaaaataaactccagcatgtgacttgttaagatcacagccacctggttcatcctcaagggacacagatgacatcatcatccacaaaagactggaatgatgaatcacaaaagtgtggattgacaacaaatctcacattgaactcattttcaaacatttatgctgccttctccaactgctcccccaggcgtggtgagggtctgtgatgacgcctgtgcggagttactttgtggtctgtgaaaacagtaggtgagaggttgttcttaatttcaaccaaactgactgatacccacctctcttcttgatgcacagacaatttcatttttgtggattaacataattttttttcctttttaaaaagactttgcactgggcataatgacacatgcctttaatcttagagctccatgaggcagagacaggaggatctctgtgagttcaaggctatcctggtgtacagagtgagctgctgccatccagtgcaacatagtgaagtgtgtgtgtgtgtgtgtgtgtgtgtgtgtgtgtgtgtgtgtgtgtgtacatatatatgtggaactactgggggttgaaatcaggaccaggggtctttgtttttgagctcagatctcactgtgggttccagtcagacctcgggcttgcactgataccctaacctctgcctctgtgaacccgggggtaaaagggaaaccttgcctgcttggctgggttttgtaaactgcatggctgaaaatccaaggttcttgtatggataacttacacgatagcgttgggcctccaggcagcacactgcactaatttcatagtcagttactctggagaaggagcataagcctcctgctgcccttctggctgtgatcatcacaataccacagcactggtaaattaaccatttcctttattactgtacaagtctttggagtcaaagttggaaagtctcagtacttggtttcaatgaggactgtgaggtaagagattaggaaacacaactcagtgaggactctgaagagagttcagacccactcagcaatgtaggggtgctcttctgtaggtttcaggggtcctacagcatgtagttgatgatgtgtagctcataatatgtaggtgtggtcagggtgatttctgggtataatgaagagtgaaaatttggtaatttggacctgtcattctgtatacagcaccgtagcccctgaaagctaatgacactcggtgaacttctctttataaagattctaaacaaacagtgatgggatttctgttatctcattcacagaagctgagagagtagaaagagaaagaagctgctgaaggtggacttggcccgagtagctcttagcccaaacctcagatagatatgagctctttgactcatatctcacaatgtgacttaagctgagaagtagaattttaatatccaaggagccacagtgccttacctgctagtcggagtcactaggatgaagtcacagagaagctcggccaagcttactctgtatgcacaagactttcccacagcatactctgtatacaaggcttcccacaggtcactctctgtacaccgggtttctcacagctcactctgaatgcacggggtttcctactgcttactctggagatattcaacttttatctttttcttttccctctaggaaaagaatgagatacaaaatattaatcctatcgctattggttctaatgtctctctatgcccagtatagagaataccctttcaggtaattgtgaaaacttaatgttatattcttgataagaatctggtgagttaacaggatttgtcccttaaggaaatcggccaaatgtgcagatccaaatatatgtgaattatactcgtgcctgtctctgtaaatagagccccctgtcccaatgctttgtttctaatgatatcagagatttaaaaaattctatagatgaccaggtgtagtggcacatgcctttaatcccagcacttgcaaggtagaggcaggcagatctc

SEQ ID NO: 702 - DNA, 3455 bp, Mus musculus
tgtcttaggaggctggagattctgggtggagccctagccctgccttttcttagctggctgacaccttcccttgtagactcttcttggaatgagaagtaccgattctgctgaagacctcgcgctctcaggctctgggagttggaaccctgtaccttcctttcctctgctgagccctgcctccttaggcaggccagagctcgacagaactcggttgctttgctgtttgctttggagggaacacagctgacgatgaggctgactttgaactcaagagatctgcttaccccagtctcctggaattaaaggcctgtactacatttgcctggacctaagattttcatgatcactatgcttcaagatctccatgtcaacaagatctccatgtcaagatccaagtcagaaacaagtcttccatcctcaagatctggatcacaggagaaaataatgaatgtcaagggaaaagtaatcctgttgatgctgattgtctcaaccgtggttgtcgtgttttgggaatatgtcaacagcccagaaggctctttcttgtggatatatcacacaaaaattccagaggttggtgagaacagatggcagaaggactggtggttcccaagctggtttaaaaatgggacccacagttatcaagaagacaacgtagaaggacggagagaaaagggtagaaatggagatcgcattgaagagcctcagctatgggactggttcaatccaaagaaccgcccggatgttttgacagtgaccccgtggaaggcgccgattgtgtgggaaggcacttatgacacagctctgctggaaaagtactacgccacacagaaactcactgtggggctgacagtgtttgctgtgggaaagtacattgagcattacttagaagactttctggagtctgctgacatgtacttcatggttggccatcgggtcatattttacgtcatgatagacgacacctcccggatgcctgtcgtgcacctgaaccctctacattccttacaagtctttgagatcaggtctgagaagaggtggcaggatatcagcatgatgcgcatgaagaccattggggagcacatcctggcccacatccagcacgaggtcgacttcctcttctgcatggacgtggatcaagtctttcaagacaacttcggggtggaaactctgggccagctggtagcacagctccaggcctggtggtacaaggccagtcccgagaagttcacctatgagaggcgggaactgtcggccgcgtacattccattcggagagggggatttttactaccacgcggccatttttggaggaacgcctactcacattctcaacctcaccagggagtgctttaaggggatcctccaggacaagaaacatgacatagaagcccagtggcatgatgagagccacctcaacaaatacttccttttcaacaaacccactaaaatcctatctccagagtattgctgggactatcagataggcctgccttcagatattaaaagtgtcaaggtagcttggcagacaaaagagtataatttggttagaaataatgtctgacttcaaattgtgatggaaacttgacactattactctggctaattcctcaaacaagtagcaacacttgatttcaacttttaaaagaaacaatcaaaaccaaaacccactaccatggcaaacagatgatttctcctgacaccttgagcctgtaatatgtgagaaagagtctatggcaagtaatcaggtataaattctcaatgatttcttatatattctgggtcttgggaaaacttgattctagaaatcaaaattaatttgacaaaggaaaagcagatgccggaaacttcttcccagtctgtcatacaattcaccactggccaggtgctgagagaagcattagggaacagtgtgggttgtgtcagagttggacggctccatccctttggcttcattatcttcctcctcatggagattctaaagcaacccagagaggctttgcagccagagacctttaataaggatgccaatgtgaccatcagtctgtaaaagctgatggctccaggagccgctggcagtccaggccccactaggctattgtttctgtcctgggcataaaggaggcagagagtgccaataggtactttggtggcacatgttcagagtccaggaaaaatggcagggtgaccacttagagggacataggacttggggttggtgattgaactgagttacaaacacagacagctttcttcaggatgactaacagcaggaattgaatggaaagtgtgttcattttgttttgcccaaattgtattcatgctgttagctttgtgtgttgagccctgtggagagggtgtgactgtatcagggaaggagagtacctcagcggactgaggaccagcaccctattatatcagaagacaatctctcatcatcgggtcctacctacaacctgctctgaacctccgagttcctcagcccatcgtgttccagtgtgggggcctgtatggagcaggtgactgaagacaaagccccctgtcacatgacctcatttcccctgctctagtactatgcaagtgtgacagccagccagccagatgtactggacaacataggaactgactttatggcaatgggagccgcagtcactacaacggagctgctgaaggttctgttccccgctctgagagcctgcaggagcccctgtataggtggttctcaacctgtgggtcgcgacccctttgggggaagtgttaaatgaccttttcacaggtgtcccctaagacggttaaaaaacatagatatttccactctgactggtaacagtagcagaattacagttatgaaatagcaagggaaataattctggggttcgtgtcatccataccatgaggagctacattaggtcacatcattagggaagttgagaagcatagctctacttgggtatttaagcaaattattgcaaagggggttgtcgctctgtgtttctgtgtatgcatatatttatattttgcttgtcttccagtttaggtcatctgtttcttcctttaagcagtttatttaaaaggccattgcaccatcttggtgaacagcatgaggggtttcaataaaaaataggatcttacctttgtccacagggctctacctcttacttttcaattgtgaacaaaaaaggtcgcacacccagaggcaacaaaacccacagaattcctgaaccaatgggagatgccaatggaagcagagcttgcacatctgctaaaaattctgcctctctgtcactgtgctggatccgtctaaagtgggacagttcaatggtctgaaagtttcaaaaaggctggggaatttgaggggatttttttttaaaataaaattgatccaagtttaaatctctaatgagtaagcttaggattttattaaaggtaatttttagacattcttcaaaataagaattc

SEQ ID NO: 703 - protein, 416 aa, Mus musculus
RPVLHLPGPKIFMITMLQDLHVNKISMSRSKSETSLPSSRSGSQEKIMNVKGKVILLMLIVSTVVVVFWEYVNSPEGSFLWIYHTKIPEVGENRWQKDWWFPSWFKNGTHSYQEDNVEGRREKGRNGDRIEEPQLWDWFNPKNRPDVLTVTPWKAPIVWEGTYDTALLEKYYATQKLTVGLTVFAVGKYIEHYLEDFLESADMYFMVGHRVIFYVMIDDTSRMPVVHLNPLHSLQVFEIRSEKRWQDISMMRMKTIGEHILAHIQHEVDFLFCMDVDQVFQDNFGVETLGQLVAQLQAWWYKDEKFTYERRELSAAYIPFGEGDFYYHAAIFGGTPTHILNLTRECFKGILQDKKHDIEAQWHDESHLNKYFLFNKPTKILSPEYCWDYQIGLPSDIKSVKVAWQTKEYNLVRNNV

SEQ ID NO: 704 - DNA, 73063 bp, Homo sapiens
  misc_feature (1)...(73063): n = A,T,C or G
caggagaatcgcttgaacccgggaggcggaggttgcagtgagctgagattgtaccatggcactccagcctaggcaatagagcgagactctgtttcaaaaaaaaaaaaaaaacacttgaccctgaacttcaatttctaattcctaaagtaagaataatcacacatatttcagcaagtcattgggaaactgaatgaggaaatgcatggaatgctctttggaagctatgaagcacgatatagttatagtaaccatggtaacaacaatgcgttagtgagatgtaaagttgcgcacaaagcaccagtaacaaattcccaatctctgaggaattctgtgtacttggcggcagttcctatggattgataaccactcatcctacagatatatttcacagtcaaatctatgccaggctccaagcttaggttggggatatctactaagaactgtggagagcataagattttaccctacatggtagctaacttgagtgctaacagaacacacaagattcctgggtcagagacaaaagattttattcctcacagcatgagaagcagcataagtatcaacatatttgcattagttcctcttacccccaagtcccacgggagtagggctgccagatttagaaaacaaaaatatagagcacccagttggatttgaattttagattaacaatgaatacatttttagcatgtcccaaatattgcatgggatgtgcatatactaaaaaagtattcctaaaaaaagtattctttatttatctgaaattcaaattgaaggggaagtcttgtattttaactggcaactcgacatgggtgacacagatgagttcagctgtatgagttcacccacagtgtgttgcattacaagagactgacactgatttgaagaacctaaatcttttataatcttttataagggcagtaagcatgcttgccctttaattcagagagccacaggctctgccttccaaggctatttgcatggaaaggtagtccagaacaaaaggcagtcagtggctctgcttgtaagacttgaaaaaccactggagaattggctcccaatgcaccctagtgaacaggtgctgggaaagggatttggctgtggcttcagtatcttgagataaatgcttgtcagtggggctggtttccatcatatccctcccctaattcccacccccactccactttcagtctgatttctttgcagggagagacaaggttgtagggtcacagaggagtaagtctgtcaaaaataagaaatggacgagaatacataccctcccatttccattcattcagcaaatgtctagtgcctaccatggtccagacactgtgctaagcactggggctgcaacagcagaggatacccagccagtccttgcccacatggcacttcagtctgatggatttgtgaagggacctggaagaaaaatgacagctccacggccgggcacagtggctcactcctgtaaccccagcattttgggaggccaaggcaggaggataacgaggtcaggagttcaagaccagcctggtcaacatagtgaaacccatctctactaaaaatacaaaaattagccggtcatggtggcatgtgcctgtagtcccagctacttgggaggctgaggcgggagaatcgcctgaacccaggaggtggagcttgcagtgagctgagaccacgccattgcactcctgcctgggtgacagagtaagcctccgtccccccagccaaaaaaaaaaaaaaaaaaaaaagaaagaaaagaaaaatgacagctcctttttgtaaagaaatagctccaattgggaagcccctgctcacttctctgccatggaggcttcagcggtaggctgaatcttcctgcgactcttcagtatgcctcctgtgtctccactgccccgactttgttccaactgtagctgctgcctagcaaggcctcccctctgtcccactttcctcctcctaatatcctgcttttccttggaaaattttagctcaaatcttgcccccatccaagaacccttcttagaatgactcttcctgtctttgtattcccactatagatttcaaccttacactgagcatggataacaacctgctttggatcagaagccccgggagagccgggtgcggtggtcgtgtctgtaatcccagcacttaggcgggaggatcacttgagagcaggagaccctgtctctaaaataataataacaattattattattatttaaagaagaagtagtggaagagacccagagcctgaaagctggggtcacactccctgggtttcaggtcaggctctgccactgtaaagctgaacaaccctgggaaaatcactctacctctctgggttccagctctgccatctgtctagtaggaccatagtgaggactgaatgaggtcatgcagataaaaaaggcccgcacagagcaacatgcttactccttaagtcataatgaggacaatgatgctaaactgcttgtatattccatttattttaattccccgcaacaaccctatctggcaaatgttataatcctcattttatggatgggaaaactgaggctcagagacaagaagtctctagcttctctgtacagagcatttttttttccctagatgaagtctcactctgtcgcccagggtggagtgcaatggttcaatcttggctcgctgtaacctccgcctcctgggttcaagtgattctcatgcatcaccttcccgagtagctaggattacaggtgtgcaccacaatgccccgctaatttttgtatttttagtacagactaaaaatttagtatttcactaaattaactaaatttaactaaatttggtacagactaaaaattttatatttcaccatgttggccaggatggtctcaaactcctgacctcaggtgatccacctgcctcagcctcccaaagtgctggaattacaggcgttagtcaatcggggcccagccttctctgtacagaactccagttggctcccctaacatcatggcttgctgttcctcatctccaatgtgggaaaaaatgggttttttgcacgataaacataatttgtggacatttgaacctcttgttgtcttggcaatgctaaagtcattttgagcctttgcagacgtgtgcagctcatttccttctgctcttgctcggcctctccctccctcctcccccatcagccttgctctagggccagacatgtgttttggggtccgagtcctgccctgaggcctcctgcttgcctaggtctggtttgttcctggatagtcgggtctctgaatttcccgagaggcctgagatgctgagagccagcagaagtggacagggcaaagagtgcctggttccagttggggaatgtaacctgctcctgatcccccaggtgttcaccagggactcatagccctctcttctaagttctgctgacaaatacaaaccctaaccctaacccttccactcactgggcagcaaatcatactccatctccattcttcaagttaaattaaaaccagctgctccaggaagtgctgtgtcgtcagggatgctggggatggatacaggcatcacagagagaagccgctgtttatgttttccctaccgccaatgccatgctgctagctgctgtgtggcactgcttgggtgacagtcttctgtatctatccactgtggctgcctcatatcacccagtttctggttcaggccaccgtgatccttctaagcatgggggctcagccagcaatttcatctctcagtgctgagctcagccactggtgccctgggggtttgcggtgcccactcactgccccttccccccaggggaaactctccttttcatcccccagaaacattaagcatgcattctgcccctttctctgacccaaggcttcagggcttatccggaaggttaggaacttagaaatgcaaagggcttgtatactctctttggtagggagggtgcttaagctccccgccgagggtgggatgtcttccattccttcctgagccaaataatctcccctttttgcaatactcagcagctcagattggctcagccaaggggtcttctttctacaacagcgggaaaacaaaacccaagctctctgtgggccagcacagcacccgcagccccttaatccagtccccgtggatccgcctgagagacagggtctatgaatccattttagagatagacgagctctttcatagtgagcaacaccgtcatcagaatggctgttgctggccgggcacggcggctcacgcctgtaatcccagcactttgggaggccgaggcgtggatcactagaggtcaggagttcaagaccagcctggccaacatggtgaaaccctgtctctactaaaagtacaaaaagattagccgggcgtggtggcacatgcctgtaattccagctacccgggaggctgaggcaggagaatcgctggaacccagaaggcagagactgcagtgagccgagatcgcaccatcacactccagcctgggcggcagagtgagactccatttcaaaacaaaataaaaagaccaacctgggcaacacaacgagaccnnnnnnnnnnnnnnnnnnnnnnnnnnnnnnnnnnnnnnnnnnnnnnnnnnnnnnnnnnnnnnnnnnnnnnnnnnnnnnnnnnnnnnnnnnnnnnnnnnnnnnnnnnnnnnnnnnnnnnnnnnnnnnnnnnnnnnnnnnnnnnnnnnnnnnnnnnnnnnnnnnnnnnnnnnnnnnnnnnnnnnnnnnnnnnnnnnnnnnnnnnnnnnnnnnnnnnnnnnnnnnnnnnnnnnnnnnnnnnnnnnnnnnnnnnnnnnnnnnnnnnnnnnnnnnnnnnnnnnnnnnnnnnnnnnnnnnnnnnnnnnnnnnnnnnnnnnnnnnnnnnnnnnnnnnnnnnnnnnnnaaggagctgggacaacatgcatgagccaccacatctagctaattttttgtatttttagtacagatgcagtttcaccatgttggcttggatggtctcgatctcttgacctcatgatccacctgcctcagcctcccaaagtgctaggattgcaggcgtgagccactgtgcctgacctgaccctgtctcttaaaaacgtaaaaaaagccaggtgtggtggcatgcacctgtcatcccaatactcaagaggctgaggtgggaggatcgcttgagtctgggaggttgaggctacagtgagccaaaatggcgccattgcactccagcctgggcaacagagatcctgtctcaaggaaaaaaaaaaaaaaagaatctgaagctaggtggattatctcaggcttgttctactacatacaaattttatttctaatgcccagaagataacatgcaaactctcgagaagacctggtacgttagcttttttaaatgtgtgttttaaaattgtttttatgtacttaattttaaaaatacataagacattctcatggaacaacaatctgaaagtgtaaaaaggtttacaggtcaggtgtggtggctcatgcctgtaatcccagcactttgggaggccgaggcaggcggatcacaaggtcaggagttcgagaccagcctggccaacatggtgaaaccctgtctctactaaaaatacaaaaattagccaggcatggtagtacctgttgtcccatctactcaggaggataaggcaggagaatcacttgaacccgggaggcagaggttgcagtgagctgagattgctccactgcactccagcctggaaggcagagtaagactccgtctcaagaaaaaaaaaaaaaaggaaaaaatataaaatgcaaacccctggtcttccccttccaagcctccctgctgtgactcctcagctggcctctctggcccaatgtcctcctgcagggatctcacggtccttctcccgtgccagggcacacatacttttccctgccccgcaccccttccaaatgctgtctgttcattccacttcctccaagactctactctcacgttcccttctgcttctccggaccaaccttaccactcctgggaatttctttaaaacacctccccccaggcccccaagacctaggagtttccccacctgcgtggggctgagaagcaagtgagagagctatgggaacaaatcctagctctgcaaatgccaagcttgtgattgtgaggaagtcactgccatctggatctcgtttcctcatctataaattgagggctgggactggccatctctcagggttcctgggctgtgtgtttttctagttctgtggaagttttgcacttcctttatctggtatttctgtgaaaaaggctcatcagactttggggaaatcgatcctccccctgcctcccagctcactgttactgacatttctcttccccaccaagatctcaaggagggcattttccctgccaagaacattctggaagtgcattccaaaccctgcctgccagaggccacctcaccttggtgtttctgacatggagaatctgaggaagaaaggggaggacagagggaggacagggtgagagaggatgggaagaggaaatgcaagaaatgcaagaggtggttatccaagtcactggggagggcctaccagtagtaggctccaggtgggcttaacagaagtgttaggccaggcgtggtggctcaagcctgtaatcacagcactgtgggaggtcaaggtggacagatcacctgaggtcaggagtttgagaccagcctggccaacatggcgaaaccccgtctctactaaaaatgcaaaaattagccaggcatggtggcatacaactataatcccagctactcaggaggctggggcaggagaatcacttgaacccgggaagtggaggttacagtgagctgagatcgagccagtgctctccagcctgggcaacaagagcgaaactccatatcaaaaaaaaaggaagtgttaccggtggagggtgtgtaggttcttggcattctgagcaaagaattggacaaaaatgcagaaacaaagcaaggaaaaaatgaagcaacaaaagcagagatgtaatgaaaatgaaaggcggaggttgcagtgagccaagatcatgccactgcactccagcctgggccatagagcgagactctgtcccaaaggaaaaaaaaaaaaaaagacaacctcagaactgaaatgtgatcctgggaaggctaccaaacatgtaaaaggtttacaaaaatttgcattgtcatgaattattataatcttttataagtcattcaaccagtttgcagagagagagaggggccagaagtccaactggtaggaaattcttaccctaggccagcgcggtggctcacacttgtaatcccagcactttgggaggccgaggtgggtggatcacgaggtcaggagttcaagaccagcctggccaagatggtgaaacccacctctactaaaaactacaaaaagtagccgggtgtggtggcaggtacctgtaatctcagctactccggaggctgaggcaggagaatcacttgaacctaggcggcagaggttgcagtgagccgagatcacaccattgcactccagcctgggtgacagggcgagactccatctcaaaaaaaaaaaaaaaagaaagaaattcttaccctattgttggcatgttaggtttctgggttctttctccttgagcggcccaaatgatgctgctcgactgtatgcaaacaaacacattgccatgaattaagaatattccagtggctcatgcctgtaatcccagcactttgggaggctgaggcaggcnnnnnnnnnnnnnnnnnnnnagtcatccgtgtcttatggttgcggaatagtcaccctatcgtggaatgcgggtgcatcaccctgctctactccgaaaataatatatatctagggcaaggggggaagggactgtatactccctcgatcctggagaggggtggccaggaatttccctagaacccgaatgggagaggtcagactggtcttgaaatcctgtcttcaagtgatctgcccacctcggcttcccaaagtgctgggattacaggcgtgagccactgtgcccggcctaaccatgtttttaatagccagtgagcatcaggtgctcacctaaacataaggaaggatatcaaagttaaatacatagctatttttgccaacaactcagaagatttagctaatagtattaaattaactctcatttgtcaaaaaaaaaaaaaaagcacgcaaaccaagatcattttgttttggctgggtttatagttttataaccttctatgccaaactctgacacctcaaagtatttagcagagacaaatataaagtccagacaaaaatgtatgctgacaattctgaaagcatttctattttaccaataattttaaaaccagcctgtttattaaagttatacttaagtcatatgaacttgaaaattgcttagacttatttagttaatttatgagcactcttttatttatatgccaatttggtaggcacaagatataacagtaagtgtacctacaaataaacacatctagacatgtatataccgacacaaacaaagatccaatagcttggaactgtagccatgagatagcaatacaagctcgctggttttactttgtttgccccaatagataatccaatgaaggctgtgaactaaaattttgggtaaagtagttttcatggcagtttgatttttttgtttgtttgtttgtctattcatttaagactgagtttcgctctgtcacccaggctgcagtgcagtggcgcaatctcggctcacttcaacctccacctcctgggttcaagtgattctcctgcctcaggctcccaagtagctgggattataggcgtgtgccaccatgcccagctaattttttgtatttttagtagagacagggttttaccatgttggccaggctactctcgaactcccgacctcaggtaatccacccatcttggcctcccaaactgctgggattacaagctagaaccacctcgcctggcctggcagtttgatttttatttgtatttattttttcttttttcttttctttctcagtctccagcctcccgagtagctgggattacaggtgcacgccaccaggcctggggaatttttctatattctgtagagacggggtttcgccacgttgcccaagctggtctggaaatcctgagctcaagcaatccgcccacctcggcctcccaaagtgctgggattacaggcgtgagccaccgcgcccggccgaattatttaagaagcgaatttcttagtctatgaaaatgacgttcaacggcaaatggcaaaatgaagttctgacttttccacctgtaaagtagattgatatgagcgggagtgagaagaccttgtcgctatcagtataagacaagagaactgagggcagccagttgtggccacagcaactctctgagtgaattgctgccacactgggcacagaagcgcacactctgaaatcgaatgtttggattcctttctacataattctactaaagagttattccacagcctaggggctgccttagagccccgtttgagacactctgggctcacagatcatgaagtcagtgcgcaaacgcgggcagaccctgaaccaggtgcccaacgcccagccctcacttccagagctcaggactctcgcaagagcgactccagccccggcctgccgctgtctacattcgcgctcttccttcctcgggaaacaaacggtggatcagatctccaaggctctgagtttcccagagtttggccgtgcgccagcgcagcgcagcccctcccagcagcacagcacagaccccaccccatcctccaacgcccggggttcctgctctatcacctacaccaccaccaccacgtgcaggcccgagaaggcaaaagaggcccagccactctcaccggggattttatccgcctccccggcacacacacactctcactcacgcactcgctcgccggccttccagctgtctgtgtccggggcggggaccggcttggcgcagcccgctgtcagcgctcgccggctcctcgcgcccctacccgctgcgctctgcccagagcagaagcccggccggccggcccacgggcgggaggacgcgcctccgctcgggcggaggcggcgcggtggctgatcagagcgcgtagggcttcgccggggccgggagctgggcgcggtcctgctcagcccagctcaccgcgcgccggccctcggcgccctggttctgcggatcaggtgggtcccgcggggagccgcccaggtccccggaggccacgagcaggacacggacggggggctccgcgcttgggagagggtggtgagggagtggaggcgggccgctgctccggcgctgcccggtgtctgccctgcctgtgtccctgcttttgttcttgtcgctacctcggtgccaaatcggacccagtttctgtccctctgtccccatcctgtggccgtccctccctctgtccagccttccaagactggagcctgaagagctgcaagctgaggttcccccacgggtccgcggggttggggtgggggaagagaggggagacgcaggggacacaggatgcgaccaagtaagtcgcagtgagtgaggggtctgtccttgcctgtggggcaggacagaggaatggctcttgcccaggacaagataggaagggcgcgcctctgggaaggggaatctgggagtggggggataaagtgagggtcgcaggaaccccaaggaggaagggaatagagagggagatgtcagagagcttcggagagccgaggactcagtcagacgcccagcatggggaaagtttccgacactaactttggcatccggggtgcctgcagcactggggcgatgggaggcgggagtttcctccaactcttcaaaccttgctcctactcgaaaaggacaccaccccgcgtttggaaatggcaggaaaacggctaaacacaatgattgcacaaactcttgaagaaagtaaaaaaaaaaaaaacagtaaaaagaagaagaaaaaaatgtcagcgcgcaaagagccagagaagcagagggatttgagattcctcgatcttcccgctgtggcggccgggagggactgggaggcgcggagggtgtgagagccgctcctccggcaggaaggaaccgagacccgaggcaggtgttttgaggctttgctcttcctttgcactccttcgggctcctgagcaggccgggctgcctccttcctttacctggaaacaggcgtgtctgaggaagcaggagatgtagggtgcagccctggcctgccgcttgctgccagtaaggaaccaccttcccagacagagcctcagtttccccgattgtgaaataaggatactactggagaccttccttccagtctctgagtaaggaaatgcaagtgcatggcgaaggagggctctgggagtggggggtgtggaggacagggttattctgctgcatttctgtgcttctttgactacatcaggcactttctacctctttcggagttacatctgggtgaattttgcctcctctaccagatgggggcagcatgtggatctaagttatctcatttacatgtaacaggtgctcaatgactgaataaggcagagctgaacgagtccctagggattgcccagtccagaagtttcaactctgtcctgtaaggcccggcatcctgcctcaagggccaccatggtaggggaggggaacctagaggacagggctctggccccttccctatcttatttcagacagaaccagttctgttcttcctttatctcctctatgtattgggaaactcctgagaacgtttttgatgtcagattgctcagatccaacctgatccagtttttggtggagtagctgaggtccagaagtgtgcaacgtgatttgggcaaacttctctagtggccacaccttaccaggagacctgtcccctaaatcataggctaggagctgcctttgtctggccatggtggctctgagcagccatttccccagctcttaccaccagctctcctacactccaactccagggccacagggctgccttctggcccttctgggagaagaagcctgtgaatctcatcctctgagcacttccagacctttagtgggaccatttatgtgagttggtctcacaggttgaggtaaaaaataatgaggttccctggcccaactgagtagactaggtacctgcctgtgtccctgcttttgttcttgttgctacttctatgtcagaacggactcagtctctgtccccattctgcgcccgtccctgccttcgtccagccttctaagactggagcctgaggggctgtgggctgagcagcccctcaggctaacccattttctagttgaggaaaggaaggctgagagagaccaagaaacatatgggcactcagcaactaaatggaagctaggatttgaatgcagttctggctctaaggttggtgctttttccattacatcacctctcatgatggctaaaaaatggctaatggacaaatgtcatggagacggggcagaggtgaggggagaacaaccgaaggagggggcagctttcagtaggggactggacattaatagaggtataaactcataaatataattttatctgaaatgaatgtactctttgccctgtactttccttttattttaggttggatatgtaaaacttattttctttcttttttttgagacagtctccctctgttgcccaggctggagtgcagtgatgctatcttgactcactgcaacctccacctcccagattaaagcaatcctcccacctcagcctcccaagtagctaggattacaggcgtgcaccaccatacccagctaattttttaatttttagtagagacagggtttcaccctgttggccaggctggtctcgaactcctgacctcaggtgatccacccacctccgcctcccaaagtggtaggattacaggtgtgagccaccatgcccagttgtaaaacctacaaatcttacgtgtttgatttgacaactcttttttttgtttgtttgagacagagtctcattctgtctcccaagctggaatggtgggatcttgaatcactgcaatctctgccccctaggttcattcaagcgattctctctctctttttttttttttttttttttttttttgagatggagccttgctctgtcactcaggctggagtgcagtggcatgatcttggctcactgcaacctttgcctcccgggttcaagcgattctcctgcctcagcctcctgagtagctgggattacaggcacctgccaccacactggctaattttcttttgtatttttagtagagttggggtttcaccatgttggccaggctggtctcaaactcctgaccttgtgatctgaccacctcagcctcccaaaatgatgggattgcaggtgtgagccaccacgcccggcctaccttctattttttacgattgaattttaagagtttttggagaaaataacatgagtcagggcagaatagggatatggtgatatggagatggtgatatggagaccattatgggccagggcttgggaaggaaagaaccaaatggtggttggaataatgacctcaggaatagggatttctgggcactaatatgttatgtgaaaaataaatagacttttgtggccaaaagctaagatttgggggttgtttgttatgcagcatggctgcagcaaaagctaactgatacacattatatagatgcaataagtgcagattgtgatgaaactttcatgccatgataaggagttgtgagcaatggggaatcaacagagaagtaaggaaaatcacataacaggttagtctctatgggtcaactgggatttaaagacctggtacttgtactctgtgggccaggcaaattcatccatgttcatggctttaaatgctacttctgtagcattcatcttatctcaaactttgggcatctaattcacatgtttaactgcccaatgggcatctttgttttgaatgtctcaaaggcactgcaaactcaacaagtccaagctagaattatcttatggtggctttccatcacgggtcactgtatgaatgatggtgccactagctgagagagtaagggagaatgaatgtttgggaaggggagagataatgagtttagttccatgctaaatggttcagagcagtccaggaagataaggattagaagttgcattgggtaattaggagattactggaacatactgagagcagttttgatggagtggagggtaggcaagctagattgctgataggtaaggaggacataatgaaaacaatgaggatagtcagctctttctctttttttgagatggagttttgctcttgttgcccaggctggagtgcagtggcatgatctcagctcactgcaacctccgcctcccgggttcaagtgattctcctgcctcaggttcccaagtagctgggattacaggcatccaccaccacgcccagctagttttttgtatttttagtagagatgggatttcaccgtgttgtccaggctggtctcgaactcctgacctcaagtgatccacctgcctnnnnnnnnnnnnnnnnnnnnttttatttttctctcctctttttttcttttttcttatctcacctcccagaactaagcacctcactctgacatgagaggatccccgtttacaggcatgagccaccatgcctggcccaggatagtcaactctttccagaagtttatttgaggtcaggagaggccaggtgtggtggctcacacctgtaatcccagaacttggggaggccaaggtgggcagatcacctgaggtcgggagttcgagaccagcttggccaacaaagtgaaaccccatctctactaaaaatacaaaaattagttgggtgtggtaatcctgtaatcccagctacttgggaggctgaggcatgagaattgcttgaacccgggaggtggagattgcagtgagctgagatggcaccactgcactccagcctgagtgacagagcaaggctctgtctcaaaaaaaaaaaaaaaaaaaaagaatgatgtagatttggtccatgcgctgaaggcaaaggggtcatcacgtagtatgctcaacccaggtttctttcttttctttctttcttcctttatttgtaaaagatgaagtcttgctttgttgcccaggctggggtacagtggctattcacagatgtgatctcattaccaatcagcacgggagttttatcctgctccatttccaacctaagtcagtttacccctccttaggcaacctggtggttccccactcccaggagatcaccatattgatgccaaacttagtgcagacacctgatctatctgcatagtacactgcagcccagaactcctgggctcaagtgatcctcccacctcagccccctgagtagctgggatggtaggtgtgagccaccatgcctggcaacccagaattacttctaaaagtcctttcagttctaaaaagaagaagtgaatatctgctgtctaaatctccagccaaagagctgattggctcagcttgtccaaatgtggcgaggagaccacagacctctgtcacgtgcaatcagacccggccatgagagtttccaaggcttgggctttagcagccattatgccagttttcattgccaaacagagtctcaggaggcagaggcagtgatggcagtggggtggagacccattgccttctgttcaaattttgtgccacagggcaaccccacacagacatccacaagagactttgggggtgtgcacgtgcttcctggggttcctctctgaaaccctgtgtggctgacagatatgaatggcagggaaaagcatgggtctaactcagagagtgagtggtctgagatggaggaggagattccagagagagtgagcctagcggctgggtgcggtggttcacgactgtaatcccaggatgctgggaggccaaggcgggcagatcacctgaggtcaggagttcgagaccagcctagtcaacatggcgaaaccccgtctctactgaaaatacaaaaattagctgggcgtggttgtgcgtgcctgtaatctcagctacttgggaggctgaggcagaagaatcacttgaactcgggaggtggaggttgcagtgagctaagattgtgccactgcactccagcctaggcaacaaaacaaggctctgtctcaaaaaaaaaaaaaaaaaaaaaaaaaagagagtgagtctaggaagctgaaggaggatggggtatccaggaggatgtggtcaagagggttgaatagtggagaggttgggtagaaaaaaatggatcctggaagacagcggctgacagagatcagaatgggttgacagtaagacccccgagggaaacaaaaataattataaaattattatgataagatttctctacactgatgcatagtttcagaagtaagaccatgtactcatctcacgtgagcctcacaaaagccctgaagttggcagaacagaaatgattttccccattttgcatgtggggaaactgaggcttagagttttaatgtcttgggcgaaaaacctcaaaaattaagtagcagaactgaggcatgaaagccgggtcctgaagccaaacatagggtggcttggagccctcggtgggcacaggtagggaatggaggtagttcacgaggtagcagctgcagtgaccttccctggggcatagcagggctccttcctggctttactcagactgaaatcagccagagagagtgaaaagcaggaaatggaagaggctgggcagagagaggccagatcctgtcctgcaatcagttccttttttttttttctttggagacagagtctcgttccgtcacccaggctggagtgaagtggcgtgattttggctcactgcaacctccacctcccaggttcaagcgattctcctatctcagcctcccaagtacaggcacacgccaccacacccagctaatttttgtatttttagtagagacggggtttccccatgttggccaggctggtctcaaactcgtgacctcaagtgatctgcctgcttcggcctcctaaagtgctgggattacaggtacaagccaccacccggcctcaagattagttcttaataagaatttttcaagccacctctgtctcagtgctctcatcttcaggggggcctgctttaaaagccctgaactcgaccgggcgcggtggctcatgcctgtaatcccagcactttgggaggccgaggcgggcggatcacctgaggtagggagttcaagaccagcctgaccaacatggagaaatccccgtctctactaaaaatataaaattagccaggcgtagtggcccatgcctgtaatcccagctatgagggaggctgaggcaggagaatcacttgaacccgggacgtggaggttgtagtaagccaagatcgtgccattgcactccagcctgggtaacaagagcgaaactccgtctcaaaaataaaataaataaaataaaataaaataaaatacctgaactcggctccccttaggggtgaggcactgaaaagagctctgggctgaatgtgaggtggtcacgtcctaccccgtgctggtgctgctagctatgggtactgtgggaccgtttccccatcagccaaatggtacaaggcccaagtctagccagcttctctctgagcaacgcctgcgatgaaacaaaagcaggaaaaaaaaactctaaacacacaggaaatggatgctccaaccaaaaacctgcaagggaaatgcagctgtttttcccaaagaaatcccaacttgggggcctctcttgccaatttggacaccaggaactgaggcgctagaagaggtacctgttccagagactcatattgtgaatcagatactcattcagcattcactgagctaccacaaatccattcattcatttataaattcacccagaatttactgagcacctactaggtcctgggctagatacctgagatgtcaccatgaacaagatagacacaattcctgcccacatggaggccatagcttagcttgggagacagttgcacatggctgagcatggtggctcacacttgtaatcccactttggaaggcagaggcacgcagatcacttgaggtcaggggttcgagaccaccctggccaacatggtgaaaccccatctctactaaaaatacaaaaattagctagacttggtggtgggagcctgtaatcccagctactcaggaggctgaggcatgagaatcacttgaacccaagaggcagaggttgcagtgagctgagatggcaccactacactctagcctgggtgacagagctagacgccatctcaaaaaaagaaaacaagaaaaaaaaaaaaactaattgcacagtgacagccacaaagaagtgcagagcgtgtataacaggggcctgatcctggccagggaggtggccaggggaaatgacctttccactgagcccttcaggagttatagggggaaccgggtagagagtttcaggcagagggaagaagcaaggagaatcaatcgtcctgctcttcctccagctgttctggaatctagacagccctggtggctggaggggcacagagaaaggagcaagcctagggcgaagggtgatgttggggctggcaacatctgtgagcagagaagcagctgcctgaccttctcctgccccagggaaaccatgagtcctcaagtggcaggccagctgtcctctggaggaattctcctggcatctgtgggaaaagccaagacactttcaaaattaggagtggggtagcttttaaggaggcctggctccccgagagcaaggactgggccggggtttgcttgtggttgcctaaatctctggctgcttatagattggtgtttgatgtagcaaactctgtctgatattggtgtttgatgtagcaaactctgtctgcctatattcaccagagccatgcagagaaagggataattaatatttctatgtgcacatttaatcaagtgcttaggaattcattccagggcatgaaaattcaacataggaagtgctcagaaaatgtttggggcagctacattgagtagcaaatgagaaggcatataggccagaggtcacggttgtatgcaacagagggagatttcagctcactgaggcagaagacacctgtcttggaagggatgttttgttgctgacaacatctttcagaaggctagaaaacaaagctggccagaaccagtaaaggccaggcaataaacacaaggtcttgtataggagctaattctagctcttgctgctgtgagtaacgttgctctagcacctgcctccatgcggcttccttaggttgcagagccactaactggccaggcctaggtcagtcctgcattccaggtgtaagtgaatggacttggggaggatccggcccgttgtgctctggtggtgagtgaggggttgctgatgctaaactgggcagccacaagaccactgatgccaccagagatggggaaccttgtagtgccacagaattctgctggcctaaggagggtcacagggccacagctgagggagggcaaaagccttctggggaggtttcagatgagatcgggtgcattcagagtggtatggccatagactttctggggagctttcagaacagcagcctgacattgagcactttagtgaaactcaaaatccacctgtgtaaaataggttggtttttagagctaagtgtctattgcctggcatgcggtactattgaatggctgtgctgttatcattattattagtagaagtactagtaattccacccagctgttaccacagcagttatgtcctcgagggaaagagaaccaacgcaagaaaatctagagaaattcagcagtaaccacacacattgatacatagaaattcttcgcaagttcctttaaatgtttgcctcctcagtatactgaaacggggatttgatttaccaaaaataatcaaatacgtgaatgagtcaccatcttacagacccttgatacctactgttaaagaaagtagttcttttgcaggagcagacagagcttcttagagatcccagacttccttcactaaggaaggcttagcagaggaagaagaaagttcacactcctgtgactgggggcaaccccaccccacccccaacaaacacacacacatccccaggagagttgggcttcaccaccatactcttccctgccacccgaagaatgcagcttcccacaaacacagaacgcctgctggcagtgttgtgctaggaagtgtttcatgaccagttctttgaaaaatggaagctctggtatgtggtctttgccaatttctatagtgtcaatatttccaccaaggccaatttcaagttaccaccacttgaggagctgggagtaggtgcacagtagcacattgatgtatagtattttccactctgactagatacaatagatgtaagtaacttcaagagtatcaaatgaggctggccacagtggctcacacctgtaatcccagcactttgggaggggatggtttgtgtacgggagtttgagaccagactgggcaacatagtaagacctcacctctaaagaaaataaaggattagctgggcatggtaatgtgcacctgtagtcccagctactggggaggctaaggtgggaggatcgcttgagctcaggagacagaggctgcagtgagcagtgatcatgccactgccctcagcctaggcaacagagtgagaccctgtctcaaaaaaatatatataaaatataataaagtaattaggaagtgatgagtttttatgattacctttgttcctaatacagttcatttaattgtaagtttacataattaaattttttaataaggcctatgtttaacaactgggttaccaaattcttgaaaatttaacatgcaagccagcatgaaccaactccatcacactgctggcttgggggatcccagaaagaggtcagcacaaagaggtcatccctaaatagtgacccctacccctccttatcactttcaagatgtcaacatccttgttttgttttgttttgagacagactctggctctgttgcccaggctgcagtgcagtggtatgatctcagctcactgcaacctctgcctcctgggttcaagcgattctcctgcctcagcctccccagtagctgagattacaggcatgcaccaccatgcctggctaatttttttgctttttgagacagaggctaatttttttgctttttgagacggagtttcactcttgttgcccaggctggaatgcaatggagagaccttggctcactgcaacttccgcctcccgggttcaagcgattctcctgcctcagcctcccaagtagctgggattacaggtgtccaccaccacctggctaattttttgtatttatatgagccaagacagggtttcaccatgttgggcaggctggtctcgaactcctgacctcaggtgatccacctaccttggcctcccaaagtgctgggattacaggtgtgagccaccatgcccaggcccaatatcctttatttgtcttataacccttgcgtttggttcagagctgaatccccagggtttagaacggtgctagcctgcatgtagtaggccctcaatgaacatgaattgattaaatgaagagaggcagaacatggagacttcaagagttcacatcctaacaggctaaggcgggaggattgcttgaggccaggagcttgagactacagtgtgctatgatcatgtctgaatagccactgcactccagcctgagcaatgcagtgagaccctgcctctaaaagaaaactttaaacacacacacacacacatgcacgcacacacgcacacacacacacatccacaacctgcctctggttgagcctgtttctgcatctgtaaaattaggttcccttcagctataaaaagtctatacctggtaggcctggcgcggtggctcacgcctgtaatcccagcactttgggaggctgaggcaggcggatcatctgaggtcaggagttcaagaccagcctcgccaacatggtgaaacaccatctctgctaaaaatacaaaaattagctgggcgtggtggcacgcacctgtaatcccagctacgtgggaggctgaggcaggagaatcgctttaacccaggatgtggaggttgtagtgagctgggatcatgccactgcactccagcctgggtgacagaacgagattccacctcaaaaaaagaaaaaagtctataccttgtaaagacatcctttctgcacagcacggccaaacagagatcctcagtggagcattttcaagggtgggcgctagtgcgctggttcttaggactgtaggtttgattctttagctttttttttttttttttttttttgagacagagtctcactctgtcgccaggctggagtgcagtggcgcgatctcgggtcactgcaacctctgcctcccgggttcaaacgattctcctgactcagcctcctgagtagctgggattacaggtgcgcaccaccaagcccggctaatttttgtatttttagtaaagacaaggtttcatcatgttggtcaggctggtctcgaactcctgacctcatgatctgcccacctcggcctcccaaagtgctgggattaaggtgtgagtcaccgcgcgcagcctgagcctcatctttaactcgtgaggctcaggggcagaggtgggaacagagatcaacccaggacaaacatcttctcctgcatctcactgctgtcctctctgaaaagtcgtcccctctggggcaaactgggaatgggctgaggactcttcctttgctagtgaatctgggtgcagctggtggccttctctgtgtgcccgacaacctggggcaagagccaacccccaaatccatctgctttggggcagcatcgaggatttcctgtctcttcccccagagttttctttcctggctgtgggtggctcaggctggtcttcagattcgttttctgagacgtgtggtgtggacctggtccgaagagcaaataggggtacctgagttctgctcacctcttctgcagatgggcaaaccgggaaaggaaagtcatccagacaccagattaaacaaataatgagacaattatagctcatgtgtactggccatttgtttttactcatgctggacatattctagccactttataaaagccctgccttttatgcagctagaaaagccaggtggtagggattgttatctttctagttttacaagggaggaaactgaggcacaaaaagattaagacatttgtagggccacatggtatgggagagacttgggactgagacacaggcaatgagatggtgcccttcatcacagcagcgtgccacccgcacaaaacaacctcacagagagcagggagccagccccctgtgcagccccctcacccaacagatgggaaaccctggcccagagggttgtggggccttccctaggctcactgggtccagactggagcccaggagtcctgactgctgtcttagtgctctctgcacaccacctggggtccaccatccccaatcaccaggggacctcctgagactgggaacctgttcattgtgcactgcggacctcctacgaatagacccacgtgggcgtggtgtaggtggtccagccagatagcaacagtgtcctcctcccacactgagaaaggtcttggggcatggagttctggcttcagctgtaaagttcaaaaacactgttctcctgtcagatagcccttgcagcagagaaatgggccactcatcagcctctgtcacatttcctgtttgtgagcctggactcaagtggagttttaggtgaagggcaaagggcatggaagcagagccttccttactggaatacaattatcagaggggaaaagagcctagaagtttccacctaaacctttgttttgtggatgtggaaaccgaggcctagagaatgcaagaatctatcctagttcatggtgtgcgcaggaatcacaaatgggtttttggtggtggtggtgttgttgttttgagattatataatcttagaatgggtgagctagcagaaacccaagctgttcctcagtccacttccccatgttccacagatgtgatctgaggaagtgggtgtatgtgggtgcagaggggaggggaccttccccacttccctccttctttgagcctctgtatcttcatgtgtaaaataaagcccaaggccctgctctgctgatcccatacagacatccaccaaaggtctttgtgtgtgctaatcagcgtggatgctagcactgagcgggagtgggctgctggttgtctcccatttttctccagagcccggcctgagtcccaggtttggggaaccttgtcttcaccccactgctttcctatacaccgccatccactcagcactgactacattttggcaactccctctatcccatcaactcaggaagacacgtatttcaaaggaatataatgctagacactttacacgtgacaacacttaaccttcacaacaaccttgcaaaatcctgttcgttcactagttaggacgggatactgaagttctgaaggaggctgcctggggactctgtcacatagccagtggggtgggggactctcgggggattgtcccagctcctcacggttttcctggaggctccattctgtctgcctgccttgtagccagcactgagcagagggcaagggagccagagaaggtaggcccatgtggcctgggaccaaggacaccctggcaggcagacccgttggctgcccttcgaactcgtattcttttaagatttgttcagcatttatctggggtgggaaaatggatttgcaatgaatacaaatcatgagcctcttccagattccaaattccattctacaccggactattttccagaagcagaaggaacagaaattcacagacagagtcactttcccaggggcagtgagttaatgtcctggagaaacactggctgttccttgcttttctgtagctctctgtttctctttagtttgtgtttgagcttttccaagccagacggcttctggggaggctcattagagggtttattttggttctggttttgttttaagttgccttaaatatagacaagaacagctagtcttagagaggaggatcactctgcgtgtcatttattttgactgagcagcttggtgtgtacttcagttggcatccttgaacttagttccttgtattaaataaggaaagtatcgctcacatttacataatagcaacaatgaattatttcagactgtcagtgtcagagaaccaccagatttatttacttaaataactttctgtctggttacaaaagtaatatgttctcattgtagaacatttgaaaaatgtagacagcggcgggacctataatcccagtactttgggaggctgaggcaggtggatcacctgaggtcaggagttcgagaccagcctgaccaacatggtgaaaccccgtctctactaaaaatacaaaaattagctgggcatggtagtgggcacctgtaatcccagctacttcagcctgggcgacagagcgagactccatctcaaaaaaaaaagaaaaatgcagaggtagaagagaaaaacagatgactctcccacaatctccttgcctggtgttcaccactgttgccatgtgaatctagttctggccagaatgttttctttttttaattgtcataaaatatacataacatgaaatttactattttaaccctttttacaattttttaatagattcagtgggtacaaatgcagttttgttacatggatatactgcatagtggtgaggtctgggcttttagtgtatccgtcacccaaatagtgaacattgcacccaataggcacaatgagcccaagtctatgctcataaccaccacgttctgcagcccctcaaccaccctgagaggtggggattatgattatcccctttacacagatcaggaagccaaccaaattgctctcttatttgcaagcatcgtcaagtaggactttttctacctctctaaacatgtttaggattaaatgaatagcaacaacttgcaacctttgtgtctgtagcattctttgccaagaacacttaatcctcacacctccacagaggtaagcaggttggagatcgtgaccttcaagtttcccagcaggaagtgacctgggacatgaagccagggctctttacatttggtctgcagctgcctctacaacagtgaggccctataattctccaactcaggatgtggaagatggacagatactgaatgctggctgttatctgatagatccatgggctgttcgggctgtaatgatgagattaatcaactcggggctggacacggtaccaagctcttacctgggcagcctctggacagctttgatcagcaggactccagcccgaggctcatttgctacggttctctggctttcaattaaggaatgaccctaaatgtgtgctcctttgttttgagagtttgaggatgaaagtgtgtcagggaaggaggagggccgtgtttgaattttctagaaattgaattgtctgccttccaggtttgcacactctctgccaagctgtggctgaccagccaggagccttattcatctgatcagtagtgttccctggaggcgcctgggtaggaagaacagcattggctccaacgaaaagaggtcccagctggtgacctcgaatgagtcactgagactctcagagcctctgtatgttgacctttgaaaatagtgaagggccctgtcctaccacttcacaggtgattgtgatgatccattgagataaaagagagaggctgctctgtaaactgtaaagtgggaggcacatgagaccggggatcactgcttgctcatggagaggaccactttatctcatcctagctctttaggtttcgaaatcaattttccttcccttccccactgaccatacataggtccatgaatggcttttaaaattatttttcttttcttttttttgagatagaatctcgctctgtcacccatgctggagtgcagtggagcgatcttggctcactgcaacctcctccccgcctcccggattccaatgattctcctgcctcagcctccagaataactgggactacaacacgtgccaccacacccagctaattttgtaatttttttaaatttatttttttgagatggagttttgctctattgcccgggctggagtgcagtggcacaatcttggctcaccgcaaactccacctcccaggttcaagcaattctcctgcctcagcctcctgagtagctgggattgcaggcgcccactaccatgccctgctaatttttatatttttagtagagacaaagtttcaccatgttggccaggctggtcttgaactcccaacctcaggagatccacccgcctcagcctctcaaagtgctgggattacagacatgagccactgtgcccagccgattttttaattatttttttgagacagggtctcattctgtctcccaggccggagtgcaatggtgcaatattgattccctgcaacctccgcctcctggtctcaagtgatcctctcacctcagtcttctgagtagctggactacaggcacatgccactatgcccagctcatttttacattttttgtggagatgggctgtcactgtattgcctagactggtctccatctcctgggctcaagggatccttctgcctcagcctcccaaagtgctgggattacaggtgtgagccactgtgcctggcctcctagattgttttagcacaacagattgtccctgagcccctcctgaggtgtttgtggtgcctgggattggggaggcagggcccatccaggtcctgtggccctagcggggaaagacagtgcccaggagagctcagctcccagcaggaagatttctgatttctgttactttttattcttttttttttttttgagacagagttccgcttttgttgcccaggctggagtgcaatggcatgatctcggctcactgcaacctctgcctcccaggttcaaggaactctcctgcctcagcctcctgagtagctgggattacaggcatgcaccaccacgcccagctaattttgtatttttagtagagacggggtttctccatgttggtcaggctggtctcgaactcctgacctcaggtgatccacccgcctcagcctcccaaagtgctgggattacaagtgtgagccaccgtgcctggccactttttattcttttttttttttttttttttttgagacagagtctcactctatctccaggctggagagcagtggcgcaatcttggctcactgcaacctccacctctaggttaaagcaattctcctgtctcagcctcctgagtagctgggattacaagcacatgccaccacacccagctaatttttgtatttttagtagagacggcgtttcaccatgttaggctggtctcaaactgctgacttcaggtgatccacctgcctcagcctcccaaagtgctgggattacaggcatgagccaccgccccctgccagtttggcctatttttgaactttaaataaatggaatcatccagtgtgtaccttttatgctgggtttctttcactcagtgctgtgtgtgtgagattttccttgacgtgagtagctgtagctcgctcattctcattgctctaggtagaatcccattgtgggactaggtgataatttacctgttctgatgatacgccttgggagagcatctagtttggggtgtgctatgaattttttttttttttttttttttttgagatggtgtcttgctctgtcgcccaggctggagtgcagtggcgcgatctcggctcactgcaagctccgcctcctgggttcaagtgattctcctgcctcagcctcccgagttgctgggactacaggtgcctgccaccacacctggctaattttctgtatttttagtagagatgggatttcaccgtgttagccaggatgatctcgatctcctgacctcatggtccacccgcctcggcctcccaaagtgctgggattacaggcctgagccactgcacccggccaactatgaatattctaatgcctgtgtcttggtgaacatccacacactttcgtttgggtgtggaactgggagcagaacaataggataggcaggtgggcatctgtttggcttaaatagttagccacaggaaggatttaagcaaggtattaggaagacttctggaccctaaaggttgtggccaaataactcatccccttaagaggcggaagctgtgaaatttccttctggggaacgggaggaagaggctggattaggcactactgagcgaccggggggccagtccttgattccttcctgtctggctttggtcccctgtctttagtctggggtttccagactgtactccctggagatgtctcagccacgtgggaggatgaggaaggggctttgagcatcatttccctgctttagccaaaggactccgtgtgctctgtttcaggtcgtggggattctgagaatgattttgtttgctttttgaaaaagttttagctgtttcgacattggaaaatctactgcccaccgggcatggtggctcacacctgtaatcccagcactttgggaggctgaggcgggcggatcacgaggtcaagagatcgagaccatcctggccaacgtggtgaaaccctatctctactaaaaatacaaaaaaatcagctgggcgtggtggcatgtgcctgtagtcccagctactcgggaggctgaggcaggagaatcacttgaacccgggaggcggagcttgcagtgagccgagatcacgccactgtactccgccctgggcgacagagtgagactccatctcaaaaaaaaaaaagaaaagaaaagaaaaaaagaaagaaagaaaatccactgcccctaggtcccttccagctgcaagattctattttgggagcaggaggtgggtatgggaagggttaagcattattcagccaaagagcggagttgagccttggtgaccttttaaagttcttgtagtgtgctttgtgctgtgggagatcccgtaacattctataaaaatgtagtgttcaaaccaaacagcgacttctgaagcctaaaagatgtagaggaaggacttaactttgaggaacatttaggtagaatttccaccagtcttgaggactctcaagatagccctttgtccactcctctgtggtgtgtgtgtgtttgtgtgtgtgttttaacgtctccattggctggtggctggtcctaggagcagtcacttgaagttgtttgggtccagaatggtttccatttttatccagtagtgtgtgatgtgggcccccttggtgtccctctcaagggtgggtggtggcctttcctcctcccatactaggcccagtttggaccatggttttgcttggcaaggaggctgggccgctcatggatccagagaggaacatttctgccttggcacacagctctgagtcaacaggcctgataaacagctcgtttcccaaaggcctgcaaggaacaaagcccctggctgctgagggctctgtctactccccatctcctgaaacagctgtttattctttcgacaggagttgaaaccagcaccttccctttctctgagtcctgcctccttctgcagaagggagctcaaaagaactttgttgttttgccttttactctggggtgaaagcggcaggaggtatgtgagatggtgaaatgatttgcttctgccatgctggggtcacgggtggatcgccctaaactctcggtggccccctcagtagttttggaagaggaccaagtccttgtctctccagcagtggacctggaagaaggatgccggctcagggacttcactgtaagttcagctttattttgctcccctggtaggacctcacagggctgcagccaagctgcagcctggagtttttcctgaaggatttaagttgttaatgcaggagcagggggcaagtcttggggctcagggtgaagttatggatggaggcagagccctctcagaattgtgtagcatctttcatttatcttactttggttctctgggaaaaacccttgcagtgatttccagaccaggcagcatggaaaagctggctggattcagcctttagatttcccaaaggggattcgagagaaagcactgtaagatatacttcagagaacaggtcgttccatttgagatggctggagcgacagtgggccatgtattcagtctgagacctgtctcttattttcttgtgtctgtttactctgacccttataatgaaaaacaaaactggagacaaccttccatgcacttcccctgcttccccgtgaattgtatcgtggaagcatttccttgtaagacccaccagctcactgaggttttaggataataaggcactcttcctccttacacccagcaccatccctatgccaagggctgggcctgggaggcaggcattttaaatctggcaccaagacttctgggcatgcccagtgatctctggcaagctatgcccctttgctaaagctcagtttcctcagctaaaaaagccacactaaggccaccgcactgaccattgtgaggaataaacaagatgctgtgagtgaggacaccccacaacacgcacacagaaggtgcctggaaatgctaggagagttgagctgatgctcaccagctggtccaaggaagagctggccccacagcaattaacccatgcagaagacttcatgttttctagagcaacagagtggttaaaagagagggcactagagcctggctccctggatttgaaccccaactccaccaccttatgctatgtgacactaggcaagttacttcacctttctgagcctctgttttcatatctgtgaaatggggataataatagagtaacttcactgggttgtcatggggcttaactaagagactcctgaaaaggggtttagcccagggtctggcctggcctggcttgactggggaaaatacaggtgttgcagggtttgaagctgattccatttggggagccctctttaagaagaagaatgggctggccgtggtggttcatgcctgtaaatcccagcactttgggaggctgaggcgagcagatcacgaggtcaggaaatcgagaccatcatggccaacatggtgaaaccccgtctctactaaaaattaaaaaaaaaattagctgggcgtggtggcgggtgcctgtagtcccagctactcgggtggctgaggcaggagaatggcatgaacctgggaggcggagcttgcagtgagctgggattgtgccactgcactccagcctgggtgacagagcaagactccgtctcaaaaaaaaaaaaaaaaaaaaagcaaggttgcaaatgcaatgttaggtatgaaagtaagtatctggaatatgagaagtgatatcacaacaaataacaaagactgacaaacattccaaatataacaaaatccagaaaacaacgacataagaaaatgatgtaaaactaatacaaaaatgattagtattacttaactgtctgatacacctgtcatgtttgggctacatactctttgactgccacattatctgacaacagttttctagaatcatttccaataaaagagaaaagacagataaatcagttttgcctgtggcatggttaatcaatgggtgctttttattactgagagtttagagcaatttattttagcttcccaatttgttattggcgatgccacttctctaagtcatttgacagtttctcaggtggctccagccagatcatgagaaaactcagccctggatccttgctaggcacagtgaggcagacgaacctgggtggagcacgaggtggctgtgagacctggatcatagtgacccctgagcagggagcagagagagtagtgtgtagttcatctccttcttcttgaggccaaaggaggaggggcccaggtgctcaacaaggtccacctgggaccggttgtttctgggacctaggtgggtgtgcaggtaatgggtcagcaccccagctcagcctgcagcccctggacaggcactgaggctagagagtgactctcccaggcaaggcaacactctacctctgggaagcatttggggctttctcatgctcaccctaatgggaaatcaggcccagtcttgcaaaggggcttgtgcacatgaggaccctgacacctaagcgtcattagctcctggtaagtcagcctctgcattcagcgcatattggttggtggttcctatgcatgatctgagccaaaaggctgagaagtgatagttgatgaatcctatcatttgatcatcacaccaaggggcccgtgtaggtcactgcagcagggtgagctctatgtggctaaaagaactgccctcaaaaaatgaggtttacatccctgaggctgatttctcatgcacatcctgggttcatcagagaagaactggggattactggggaatcttagctccaaaggacttgtttctgggccaaggagtctgaggccagagaaactcgtgacgccagtttagaaagctggcactgtgttggtgctggggctgacctgcaggactatgacaaggctggggacagggtgaggcaggggtggagcaaggaggtggggtggggtgcaaatggaggtgcagctggtctggtcagagccgtgttcctgggatagagcagggcatggagctgactttatcacaacatgcagttggcgtgtggactcgctcctgactgttctgagagatgctgcccatcaagattcccctctcagatgaactcacagccctgctttcacaccaagctctgagccatgcatttctgaatttctcccattaaaaagcatcatcattattataggtactgtgtggggggcattaacagaccatgggcacagtatgctttcaagaaccctttgaggagggtgttagaatctccattttgtatatgtaaatagaggctcagagtgttaaagtaactggcctaaggtgtacatctaggactctgctgatttaagagtctttgctcttagcctaatttttacctggaatgctggagctgaacactctcctttataatcaaggatctggaggactaaagactagagtcttgtccaaggtcagtaatacccagttaattactgcacccttccccattcccttacctgttttccttctctttgttcactgtcactacctgacattatatatcctgttgagtctcttgactcccattggaacagaagctctatgataatcttgttcagtaaagcatctccagttccaaaaaccatctggagcacagtagcctagtccatgtttgttaatgaatccatggcagagcagaactggagtgcctcagaactctccttactcatttgttcaccccaaacacttgtgttacaggaagggggtctggatccagaccccaagagagggttcttggatttcactcaagaaagaattgagggtgaatctgtaaagtgaaagcaagtttattaggagagtagaggaataaaagaatggctgctccataggcagagcagccctgaggactgctggttgcccatttttatggttatttcttgatgacatgctaaacaaggggtggattattcatggctcccctttttagaccatatagggtaacttcctgacattgccatggtatttgtaaactgtcatggtgctggtgggagtgtagcagtgaggaggaccagaggtcactctcatcgccatcttggtttggtgggtttcagccggcttctttaccgcaaactgttttaccagcaaggtctttatgacatgtatcttgtgctggtttccggtttcatcctgtgacttagaatgccttaaccatctgggaatgcagcccagtgggtctcagccttattttacccagctcccattcaagatggagttgctgtggttcaaacggctctgacacttgggatgctcctactgggagccagggcctgtgccagtctggacccatcacaatagcctgaaagtgattaaggctcaagcggaggacgggtgggctctaggggcctgatgtaggaatctcaggctgggaggagaattctttagcctgcagagaggtggagcctgcggagaaggcttggtttctcctgccaccactttcaccctgccggattcctgctctctgagataatggcttttccatggcatctgagtgcatggcattcagctgagaggttcaccttttcccctggcacgagatggagaagataggatctgctagaattcctttcagagtggaattctgtttggaacgaattaccttgacttcgccctgttggggtggaactgtgagattctcagagggtgtgtgtgttgttctgtgtgagaaggattggaggtgggtggtagggaagaattcacttataggccatatggaaaagtctgtctgacactacaaggaaacagaagcggaaaaggaggagggtgagggtagagtgaggaaggtggagaaatgacaggctgtacaatgtgaccctgccttgcaaaatgcctctatatttttagcataatctgcacacgttccaggaatgggggtgagagtgcttgcatttgggaagcagtgcaggcgctgagttctggttaactgagttctacaaatggtctggggccataggatggattcagagagaaagtataagagtattaaggcagagggtctgagagatggcaggagggctctggaccattgcaggctgtgcaactggggctggccaagttcacccagtcctctgaggggtgggacccaggggacatcagggttccactctcccacttaagacagggtgttaatacttggaaggtcctaattctgtgctccaccccttgaaaggagaattttagaactttcttttcttttctttctttctttcctttcttttctttctttccttgtttctttctttctttcttttctctctctctctctctccctccctccctccctctctctctctctctctccttctctctttctctctttctttcttgcaggatctcactctgtcgcccaggctgcagtgcagtggcttgatcacggctcactgcagcctggaccttcccaagctctagtgatcctcctacctcagcttccccaatagctgggactacaggtatgcaccatcacacccagctactttttgtagagagggggtttccccatgttgcccaggctggtctcgaactcctgggctcaagcaatctgcccatcttggcctcccaaagtgctgggattacaagcatgagctactgtgcctggcccaaacccatgtttcttactggtgggtaggacagtgaaccaccagtcttcagaattacacagttgaaaattcagagagacaaacacacaagggaagaacttttagaccacaatggctgccaaatgcctcatttttttgtccagagagaaaaataaaaatgttttaaaagacccattggccaccctgccaacctttcctccctggaggcttggattccagattccaggaagcatgtcaccgcctatttgtagtgctttgctgaaggatgcaaaattggctcgttcggacggcttccaattctaagtcttttttttttttttttttgagatggagtcttgctctgtcacctaggccggagtgcagtggcatgatctttgctcactgcagcctctgcctcccgggttcaagtgattctcctgcctcagcctcccaagtagccggtattacaggcatgtgccgcaacacccagctaatttttgtatttttagtagagaaggggttttgccatgttggccaggctggtctcgaactcctgacctcaagtgatccgcccacctcagcctcccaaagtgctgagattacaggtttgcacccggtcatccaattgtaagtcttaaacaagagtaacgattgaccacagcaaaaaagcaggcagattcaagccatagataagctccagaaagaagtgggcttcaagagttgcttctgatgctaatttttggaataaaaaaaaatcataaacatctctgtatttggagcggggatttggaggtatgtctgattcgggctatccctgatgtaagcgctaatgtttccaaccgtgagagttttcacctttctctgcctaacgttccttacaatttgcatttgatcctcagcaggtggggttggcaaggcttgggacacacagccagcctctctgttgcctcctcggcacacatagggggttgtagcagcgcctgaggcttgatcaaagagaatcaaagtcacatcccacttctgaggcatccttaatcaggctatgacacagaacagatgggtaaacctttagagtccttcatttgcatttatttgcacttcattgtataacatgttcttattccaaatccctcctttctttccttcaaatctgttttgagcacttgctaaataccaggcactgtgctatctcattgcatcctcccaacagcctgttttatggctatcagtaataagaactagtggacttttttttttcttctgcatttatacgatgccaggcacagtgctaagtattttatgggcaacattatctcttgtaatcatcactattaatttaatgtgatccagtagaggtccacaatcccttatctgaaaccctggggccagatgtgttggaattcagaattttttggacatggattatgtatcatatataacattcctggtgcagcagcaccacataataaaatacatcaatatttatgcatagaaatgtttaaacagcctcactcagtgggataaagattataaatggcctcatgtcagttagggccttgatgccaattgaattacaaaaaggtgttgggttttcagagctttctggagttgttgatgagggccactgctcagggttacccagcttcatttgtcaaagttgagactcacatccccacatcactccaaagcctgtggctaccaccatccccacttctctggaagtgaggacatcggcacagagaggtggccacagccttaggtttttgcacccgaaactaagacttttccagcactcaatgctggtgcttcggatgcagactctagtgacttttctcagcagtgggggatgagttgcctgcagccatctgccttttctgactttgccacgggtctggggctgtatgtgctggctcatatggtatttagagggaagaggcctgagactatctttacccagcaaactcgtcatctcagggtctgtggaatactgcccatcacagttgtgtggaaagctggaagttgggttataacattgaattcagcccagcttttttgtttccaaacagagctcactttctgaagatcccactctttctcttctttaactggatttcataataaagggtttgtaagatatgagatctgagtctggaatcatctaagaaatctctttgaaaagaattggaaaatgacctgtgtccagagaacaaatttaagtatcattcttatttgatttcattcactcagcaaacattaatggagtgcctcgtgtactctatgtgaggcactggggattcagggttgaataaaacacacctcctgcactcaggaagctcacagactaactgataccggaggcagagccacctccaaaaacaacatgtacagcaacgtgaatagacagggggagcccaagaagagaagggggactcagctgctgggtgggcaggggtgggatgtggtttcacaaagcaatgacatttggtgtgtggctggccactgtctcctcttagcttccagaggtccacagtcttggttttcttcctccctcccgggtttcttctcaatcctacttcaaaatgttgacattttcaggcttcagcccagggccggcttctttccttttcctctctctacattctctcacaaggtaaccttgtaaccgcccaaggggttcaccttgcccgctgcctagacagagctgatttatcaagacaggggaattgcaaaggagaaaagagtaattcacacagagcccgctatgcgggagactgaagttttattattactcaaatcagtctccctgaaaatcttatgacctccagaataatggctggtaatatttagaattccagcccctctcattctaacttggtggctggtggccttcattcattttacaagaacagtttagcttttgggaagggctattatttaaactataaactaaattccttcccaaggctaattaagcctacacccaggaatggatgacaggttagaggttaggagcaagatggaattggttaggtctgatgtctttcactgtcataatttatttagttataattttgcaaagacagttacagcctcattcatttccttcacattaactaccttccatatgtgaacaactcttccaactgcatgtctagcccatatctctgttgaacttcagacttgaatgtctgtttgcctcttgtcatctccatttaggagtgtgtagacacctcaaaattaacatattcaagtgggaactcatgattcttacccctcaaaccaattcctcttccatccaacacatctcagaaaattttacaattgtccacctgactgcttagacagaaaccttgtttctttcttctcccttgtccctgacacctacatgaccagccaaatcctatcaattctcttgccaaggtatattttgattaatctaccactttccatctctctacctactttttaacacaggccactgttatgtattcttttatgtgatggtcagtccagtgtgatcacaagaggagacacaggaaaagctcaggaaaaaacaatgtttattatgctcacgggtcccaaagacaggaggcatagcacaccatatgggaccacatgggaccacatgggaaagacacaagggtggtcaggagacagaagacaggcagcaaggggaagactgaggccagagcccttattgaggtttccatgggaaagacagtgcagggtgaacagtttaggatggactagtttgagtaatttcagagggctttaggctgtagggatggcccctagttgtcccgtacctggccctgatgggatgcttaaggccaagtcatattgcctcctggggtgtgcagggcaggtgaagatctacagctcaggattggttcatttgtatatcaaaggcatgcttctagctgagccctggctatctctaagaactggctagtcatagaagaggacattatctcctcagccagagaggtttttgaagatgtgaaaacatcataacatatagccaagaaaaaaacatgtatgcaatacagccaccccttcgttttggccatcagagtagtctgccacctcattctccacgctgctgtcagctctgatctaccctccacaccccagcacacaggcaggcatctctgcatgaagttaaatctggttattctctggcttccaaggtgcttgtggctccctttcctccctcccatgcctttcatcgtctatttgccctgtccgccatcctgttgccaactagcacccctccttggatccagccatgctgaggtgacagtatttttcttctttaatgctgtctgtttaaatacaagaagttttttcacctgtcagcctgttacatatgctgctcccaaaatagtctcattccttcttatggtgcttttcatccttttccatccctctttatcccttgggactcgactttacttttacctacacagtgagccttccctgatcacccacattaaagtacttcctggcctgttattcttcacacagcacccctgcttttttaagcagtttcacgcagcgatcagggaatatctatgcacctgctgtgtaccattttttttgcttgcctgtgagtgtgatgaggctacgctgggggtagctgggaagtggatggggcctagcttgtaaacccagggtcattttctcctctgagcaagggaatgtgttatcactataccaagggcatggaggttggggatggggtggctcctcacagtcacgagataaaaggtggggcgatcagacttgggaggcaactggagtccctgggaaccatgtacagctacttccattgtctcctacatccatggcagatagggatacctcccctctgagccccagtgtggccttagcacccttgccaatggaggcagcctcctctattaaccaaattggcatgatctgccactgcaggtctatgcaatttaaggtagaacagactcctcagctctagttagatcatcctaaatgtatccttttagaaagaattaggtgggcatgtaaattagttcaaccattgtggaagacagtgtggcgattcctcagggatctagaaccagaaataccagttgacttagcaatcctattactgggtatatacctaaaggattataaatcattctattataaagatacatgcacacatgtgtttattgcagcactattcactatagcaaagacttgaaatcaacccaaatgcccatcaatgatagactggataaagaaaatgtggcacatatacaccatagaatactatgcagccataaaaaaggatgagttcatgtcctttgctgggacatggatgaagctggaaaccatcattctcagcaaactaacacaggaacagaaaaccaaacaccgcatgttctcactcgtaagtgggaggtgaactatgagaacacctggacacagggaggggaacatcgcacaccggggcctgtcaggggatggggggctaggggagggatatcattaggagaaatacctaatgtagatgatgggttgctgggtgcaccaccatggcacgtgtatacctatgtaacaaacctgcacgttctgcacatgtatcccagaacttaaagtatagtagtaattttaaaaaagaacggggtaaaagcattttttaaaaactgcctcttgaagttcattgatttaatctgttctctttttttctcccctcttcttttttcctaggagaaaataatgaatgtcaaaggaaaagtaattctgtcaatgctggttgtctcaactgtgatcattgtgttttgggaatttatcaacaggtaattatgaaacatgatgaagtgatgtggatgaaaatactgctttgattctatcctactagtatcatccaagttgccaggctgaattgaaattaggattaactaaaaccataaataagggattccacccttcctgaattcctaagccctggactgtctttaaaatcattagctctcccaagtgacttctggctaactacttatcttccttcctgccttgttcctaatatcataatttttgtaacagtaggctagatccagagaaaatgagatcaaactaggcccaatgtaattttaaataacttggataatcaaatatggaaattaccttaagaaatttcagacaggaattccatgagaaatccaccctgaattttgaaatcctgaaatatttgcagagtttaaaggagcaacttaagttgttgaattttgctgcaaaatacatactgaattgctagtgattcatttgtgcctggctaaaatctttgagagagagagagagtgtgtgtgggtgtgtgtgtgtgtttaactttgaaaagcaaaatgaattaagcatttctaagttttcaaattcatctatggattcaccccaaatatatgagctacctctgtgccttttgaaactacaatgcctggccattccagctggagaggcttctgactgaagtcttcacaagcagccacagaaatgcctgatgcctttgactcaaaagactggaaaagctcagccttaaggttcaaaaaatctactgtacaattgagttgtacagagctattttggtaccattaatattttcatagcggagtgtttcagtggcccccaagttcaagatggtagcctggattaacattcgaatatctcttttgattcttttttttttttttttttgagacagagtctctctcttgtcacctaggctggaacacagtggcatgatctcgactcactgcaacatctgccttccaggttcaagcaattctcctgcctcagcctcctgagtagctgtgattacaggcgtgtattaccacgcccagctaatttttgtatttttagtggagacagggtttcaccatgttggccaggctggtcttgaactcctgacctcaaatgatccacctgcctcggcctcccaaagtgctgggattacaggcgtgagccaccatgcccggcctcttttgattcttaaattctaagatttgatgatctaggaggactgtcttggttactaaaaatggaaccgtgcctttaggtgcatcagtagcagaagaactctccgaatgctggagccattagtccctgtggtgctgcacagatgtaaccatttctggaatgttgctttgtttcattctgcacaactcattttaagaaaaacatgacaaactagagtgtgaccaagttaaaagggtctggaaactaggtcttttgaattgagaaaactgaggggatttagttcaaagaagagatgactcagagttttgtgtggggaccctggaactctcttaggcaactgagggctgaggacgtttcccactcagactctagagctaggctgctccttgggcaagttgctcagccactctgttcttgtttagtttccctatctttaaaaattggggataataggctgggcatggtggctcacacctgtaatcccaacactttgggaggccaaggaggacagattgcttgaacccaggagttcaagaccagccctggcaaaatcgcaagaccctgtctctacaaaagtaaaattaaaaagttagccaggcatggtggtgcgcacctgtagtctcagctacttacgacgctgaggtgggaggatcacttgagcctgagaggttgaggctgcagtgagctgtggtcctgccactgcactccagcctgggtgacagagtaaggcactgtctcaaaaaaaaagttgggggagggattataatagtacctgcctcatagggttgttgggagaattaaataagttattgtgtataaagcactgggaagcaatgcctagggcttaataaacaataaatgctagctgtcatcctcctcctcctcttcctcatcatcattttagttcaggccactataacaaagtaccacaaggtggtttaagcaacaggaatttaattctttcagttctagaggctggggagtccaagatccccagtgagggctcttcctggctggcagatggccacctcctccctgtatccacacgtgatggagagcaagtaagctactgcctcttcctcttcttgtaaggacactaattccttcatgggggtcctactcccacgacctcatctaaacctaattacgtcccaaaagccccacctccaaatatcatcgcactgagggcagggcctccacatacgaattttgaagagatacaacattcacttcgtaacagtcatcatcatcatgatctgctccagagggcagaacaagaaagattttggtaaatagaagagctctagcagttggaagagtccaacagaagaacaagtaccctttggggttcctgcctggagtcggaatgtctgcttggataaccttcaagctctgagtttgaacacttgatcagataactttggtgtttggaattgtagccagagttgtacgtgcataactgagccaaaggctgaaacgtgcatgtatataccagcctctctgggcacactctctctgcatggtagccagagcaggttctggctgctcttcaggctaatcgtctggcacctggactctggccacaacatcctctgatgtgcagaatccacttgaacatctgcaaaaaacttcaaggggaggagttgttttttgtttttttgtttttgtttgttttgtttttttgccactttacgaattggccacatgataggttgaggtgagccgaggacacaaaccttacacaggtaggcagcactaagctaaaatggattaaaaataactaactcaagcatgtcaaccaattagtaaatagaagaattgtcagtaaagcgtattgaaagaatatcatctaggatagcatttgatttcaggctggatgaaaaaataatcttcgaattttagagaattagaggaagccttcaaaattatgatgaaatattcatgatagtggtgatcatgatgggaactacaagttattgagggcatgtgccaggacccttgctatgcattacctccgattctttttgttttgttttgtttttgtttttgtttttgttttgagatggagtctcagtactttggaaggctgatgcaggcacatcacttgaggtcaggagttcgagatcagcctgaccaacgtggtgaaaccccgtctctactaaaaatacaaaaattagccaggcatggtggtgtgtgcctgtagccccagctactcaggaggcttaggcaggagaattgcttgaacccaggaggcagaggttgctgtgagccaagatcgtgccactgcactttagcctgggcaacagagcaagactccatctcaaaaaaaaaaaaaaaaaaaaaacctcaaggaggcaaaaattatgtttggcttggaggaggatccattgttctgcatccattcacaaatatttattgagtatccactatgtaccaggcactgtgctaggatcatatcaagcaaggcattgaaaaggtggcatttgagtggaggcttaaagcatgaatacatgtttaaaagccactgcaatgtggatattgctgtgaccattgtgctgttgaaggattctggagaggagggtaaggagaagggttgttgaggagatatgaaaagttggtgaacctgaatctataaatccatggcctgagtgccaggtagggttatgcgtgctaggctgcagcacttgtaggggcttaagagtctcactgccttcattagttaaagaaatgcttttgggggctgttctatagaaggctctgagttggccatggcattaggctctgcagttgatgctttttttttctggaggaagataaatcctgggggaaggatgtctgggccacggcatttccgtcctttcagggccttcgtcatcaccaggcacctgagtaggtggcaggagaggacccatctctgcaatggagagctgtcttctttttaaaagagcaaacaaacaaacaaaaacaaaacagaatttgaggccaggagtgatgactcacacctgtaatcccagcactttgggaggccaacgggggtggatctcttgactcaggagtttgagaccagcctgggcaacgtgacaaaaccccgtctctacaatacacacacacaaacacacaatttgagattttgcagaaaactgtttccccttgagatcctgaagtggaaatttccatcctcctgatgtcattggttatgtctcaaaggaaggtagaaaccaggaagcagctaaaacccaggctcttagctcagccccgggctcagtgataatggttacaaaatcgcctttctcagaattaaaagtaacatgatatgtttttatttcttttttgcttttagcacagaaggctctttcttgtggatatatcactcaaagtaagtgctttgaattctagatttctaggggatgtttcccacagccactctggcaccccctacagtccattcttcacacggcagccagccatggtgttcggccaaagtcggaggggtgggtgggtggattcctggggatctggaatgttatttctgcagcttccgtagacttatctgtatagaaccatggcttgtatcttgccctcagttctcctcaaagttctcttaagcagtgtcatttggggaacattcctgtcttgctgataaaaagtatccggggagatattgtctattattctgccctttaaatgttatataaagacccatataagaaattgctctaagaataaaaatcaggaaaaaaatttgagcctcttgagaaactagtgtgtatcattaaaattttctttttgtattttttgaaaagaaaatgagagccatgtaaacctttatatttccaatggttgggttggttgtcagaaagctcagaacaaagtattgcacttaactgcttgtacttaccccagccttcatttctgatatactttatcccctggtgtgaaatcccggcttttgtgcccacatgtcatgtgcccttggaaatttgctgaaatccacccagccagtatctcagctctgaaatgaaagtaaaggtgaaacttttctttgggatgactgaggtcatgtgaaaatatatacctgggtgacgaaatcaatgtatctctttctgttctctcttgtgttttttattcttgtgttgtttttctgtttattgtacctacgtattggaagccatctcaaacacttccaagagttaataggctttaaaacagatttcataatattatgcctgttcatgagttagctcaccaccgtatttgtccatcggactttcctctttccccatcctccagaaggcacccaccttttcttttctttcttttctttttatttttttttaattttctgagacggagtcttgctctgttgcccaggctggagtgcagtggtgccatcttggctcacggcaacctccttctcctgggttcaagcaatcctcccgcctcagcctcttgagtagctgggattataggcacctgccaccacgcccggctaattttttgtgtttttggtagagatggggtttcactgtgttggccaggctggtcttgaacgcctgacctcaggtgaccagctggcctttgcctcccaaagtattgggattacaggcgtgagccaccgtgcccgaccccccaccttgaagagactttcacaatgaatgagtgtggaaactttctcaaatgggtggctacagtggcttctaagtagtttcctgaacttcttgctcagtgaccctcagatttcctgaggctgttactgctaacctttgggcaacccaaatttttctctagacttttacaacaatctgaattctgctggttttagctaaagaaacatggaaacatgcatcggtttttcatgaagcgtataacttgttacagtcattttcaactcataaagctcttatatgtatgctatttcattcagtcttcaaaattaccttcatggtaggtctgttattagtactattaactatactttttggaggagaaagtcaaaattcagagagggaaaatgtcctatcacagtcacacagctagtaagtggcagatctagaactcaggtttatgcattaataccacccccactccagcccccttttcccttctcttcctctagggcccccaggatgagctgagggctgggggctacccaagggaggagagattgagggagtctcaggtctgttctctctcattcagctagagtgtctcatttctgtctgttttataaattggcattttaaggttttttatttttttaaagtaatctcggctatagaaagaatttggaaaccctaagtttggggacaccacattttctaaaaatatttgtaaactttttcatttcttagaaacccagaagttgatgacagcagtgctcagaagggctggtggtttctgagctggtttaacaatgggtaaggcgatcagacagcagtcggtgtttgcccacccgcctggtgcttgcagagggtccacacacaatggtttcatgttcatgaccttctcagtcactcatctttcttgcttattgaaattatatgaagaatattttgtgagtgggactaggacatttgagggttggttttgtttttgagacagggtctcactgtcactcaggctggagtgcagtggtgcaaacatagctcactgcagcttcaaactcttgggctcaagtgatcctcctgcctcagcctcacgagtagctagactacagacatgcactaccacatccagataaataagtcttttgttttgttttgtttcagttaacttgggggctgaggcttgggctgaagtttatttatttatttttatttttttgagatgcagttttgctcttattgcccaggctggagtgcagtggcgtggtctcggctcactacaacctccacctccttggttcaagtgatcctcctgcctcagcctcccaagtagctgggattacaggcgcccgccaccacactcggctaatttttgtatttttagtagagacagggtttcaccacgttggccaggctggtctctaactcctgacaggtgatctgcccaccttggcctcccaaattgctgagattataggcgtgatccaccatgcctggcctgggctaaagtttagattgcaggaaagacaatcataaactaaaatgttcttagaagaattgtcttatcaagtttccctcaccccccctgaaataacctgagggttgctgggtcattaaattgttaactgtggtgacttggaagggtaatgagttgagtactgcatcttttcatcaaaaatatgtctttatgaataaacgcttagtgcctagagcctttttctggtcagttcacttagtgcatgcataatctgccttggaacacatttccacaagatattcaccagttctctgaccaccgcaatcaccttccctgccttacctggtttactttccctttgtacttaggatccacaattatcaacaaggggaagaagacatagacaaagaaaaaggaagagaggagaccaaaggaaggaaaatgacacaacagagcttcggctatgggactggtttaatccaaagtaagaaaagcggcgtcactccctgtgcagcaaatccatggccctgcagggggtggtgtggcagtggaggcaacagtgccattgagaacattcctgatttaggagaaagagccttagcatattagacctttaacagtagacatatgtatatgtgcatctatttgattgtgatgtaaagtatatttctcactgtgagttatggtcaaaaacactgtgctaggcattgtgttagggagaggagacaggagaaatcaatcaacatggttgtatttgagaagttcatggtctcacaggggtcgttactgtgaaactattatttgcctagattggtaggaggcaggatcaactggaaggatgtggttctgggagtgaggagatgggagctgtccagggtgactttgagacctgagagactggtgggtgatggtgccattggccagaaaggggactggaggaggagacacaggcctcagagctgggggaggtggggacctccattaggaatgcatgtggatgcaggtgcttatgggacatctggacagagtcacagggtgctcctgagcttagcagatggtatgtgctggagatgtgcaatgaggtatcatcagagtaatcaggagagaatggaatccttttttttcatttgatttttaatttttattcattttgagacaggatcttgctctgtcacccaggctggagcgcagtggtgcaatcgtggctcactgcagccttgacctcccaggcttagcctcctgagtaaggaggcttggtgtgcgccaccacggccagctaatttttaattcttttgtagagacagggtcttactatgttgtccaggttgctcttgaactcctgggcttaagtgatcctcccaccttggcctcccaaagtgctgggattacaggtgtgagccaccatgcccagcctgaaaatagcatctatcccattgtgaaggagcttgggctctggaaagactgaatatgttctggcaacttctcttattgtttggggataagggatccatgccagtgtggagggatgggaattttggcttcccatatgtcatttgatgatctgcacaacagggtaggcatctctgaaatgctaaaccactcatagaaatgtgagaagatggaagcattgttgctttgataaagccccttagatggggcaatgagactccgccagggacaggctagatgggccagagatggtccccaaagtcccttctaaggagaatggggcaattttactgtggtacttgttctttgctgagcaggacttgggaggtggggctggggctgaatgactgggggcagagaggagggacagaccatagtcaccagctttcaccctcttcactcttccccttgcatggcttcatctccaaatgagtagggagcagatatttatttttaatttatcttatcttatcctttatttatttatttatttatttatttatttatttatttgagacagggtctcattctgccaccaggctggagggcagtggcacaatcatggctcactgtagcctccacctcccaggctcaagtgatcctcccgcctcagcctcccaagcagctgggactacaggcatgcgccaccacgcctggctaatttttgtattttttgtagaaacggggtcttgccatgttgcccaggctggtcttgaactcctggtttcaagtgatcccctgcctcggcctcccaaagtgctaggattacaggcatgagccactgcttctggacacaagcagattatttaaagaatgttggtttgaagtggcaccaaatttaagtcttctcagggcatctaagtctatttcttgcataaatgaatgattggatgaaggaatggatgagcaaataaacatactttgtataaatgtatcctttttggctcacgcctgtaatcctagcactttgggaggccgagacaggtggattgcctgagctcaggagttcaagaacagcctgggcaacatggtgaaaccccgtctctactgcaaaacaaaaaatcagctgggagtggttgtgggtgcctgtaatctcagctactcaggaggctgaggtatgagaattgcttgaacccaggaggcagaggttgcagtgagccaagatcatgccactgcactccagcctgggcaacaaagcgaaactctgtctcaaaaaaaaaaaaaaaagtatccttttctgtaaactacctaaaaccacagtatattgtgcatatttccatatcaaggtcgctttgcttccatgacaccacatcctcatttgtgaccgtctcccgagaggggcagctccctcttcccagctgtcagggattagagtttatgggagctaagtccagcaacctcttctctgttctttatatactgttttttttttttttttaagatggattctcgctttgttgcccaggctggagtgcagtggcgcaatctcggctcactgcaagctctgcctcccgggttcatgccattctcctgcctcagcctcccgagtagctgggactacaggcgcccgccactgcacccggctaatttttttgtatttttattagagacggggtttcatcgtgttagccagggtggtctcaatctcctgacctggtgatccacctgcctcagcctcccaaagtgctgggattacgggcgtgagccaccacgcccggcttatacaccattttccaatgtgctctcatccattttcatggcattaggtaccattagtgagattagataccatcctacatttaaatctttagcccagattttgcctttgagctgtgacttgtgtctacctgtctgcctgacatctctgcatgtctcacatggccagaatggatttctcaattccaccccacccttgttctcctcatttcccatcccagtaaatggctcaagacacacagtctgggagaccttttcctctgtctacctcatggtctaatgcattagcatgttctgtcaattcctcctccgaaatcctttctacttcatccccttctctccactcgacagccgctatgccatccctgttcatgttgccatcagcttttctctgtgtccttgtttagccaacctactcctgcttagagggaattcagtcaataatgagttgtgttggacgcagtggctcatgcctgtaattccagcactttgggaggctgaggcaggaggattgcttgtgtccagaagttcaagactagcctgggcaacttagtgaaaccctgtctcttcaaaaaaataaaaaattagctagatgcagtggcgcatgtctgtagtcccagctactcaggaggctaaggtgggaggatcacctatattccacatctttttttaacctactccatgattcatagaattttaatgcttccggctgggcatggtagctcacgcctgtaatcccagcactttgggaggccaaggtgggtggatcacctgaggtcgggagttcgagaccagcctgaccaacgtgccaaacccagtctttactaaaaatacaaaattagccaggtgtggtgacccatgcctgtaatcccagctactcaggaggctgaggcaggagaatcacttgaacccaggaggcagaggttgcagtaagccaagatctcaccattgcactccagctgggcaacaagagccaaactccgtctgaaaaaaaaaaagaattttaactcttcttctacccaccccttgggtaccaaaatgtgccataaataaatatataaaatttaaaagctgccaataacctaggaaggtgtgtgctttggttagggggcccttttattttgggggaagcttttgtggaacttctcacactggcatcacaccattgcatgtcctacgtggaaggaaagcatctgagcagctctttcctggcactttttcctttctttttagtgccccatctttgtgatcttggacttctctggcagttgacattatcaaagactagcttttcacatgtgtgagctgccctccgtcacttcttttttggggggttttgtgggttttgatgactaagactccttgatgcagcggttcatccaggaagctgatcttgatctcattctccctccgcccccatctccccagctgcctgcattttcaggctgttgtgtggctttgtagtcagggtcactgacctgttggaattgtcagtggaatcaaataattaacagctgggaaatagaatattttaatttttaattcaacataaatttttaatgttgctattttttcttccagcttgaaggaatccgaataactaaactggactctggttttctgactcagtccttctagaagacctggactgagagatcatgcggttaaggagtgtgtaacaggcggaccacctgttgggactgcgagattctcaaggggaaggactgggtctcatttctcccatctcagcgcttagcaggatgacctggtatagagcagggaactgggaaatgtgggtcaggggatcagacactccagttgggtcttttatataaattaaatggcaaaaggctccatacccttctccttctttcctaccctccactttatctgcaaaatgggaatgatgataacacccacttcatagaatggtcatgaagatcaaatgagagaataaaagtcaagcacttagcctctggtgcacaataagtattaaataagtatacctattcctccttttccttttttaaaaataatattaccaaatgtccagcttatacacatttacaagacttagctagtgggctatgttagagctactaaaagatctttgacaagctaaaactaagatgcaatgaatgaggtgtaacgaacaagagagttttaagttcagaaatggttacagaagtataagacagctgtgtgggtgttttttggtttttggtttctggtttacaatctcgtcattcaacaaagatgggagttttatagaactaaaagcaccatgtaagctactaaaaacaacaacaaaaaaggctcatcatttctcagtctgaattgacaaaaatgccaatgcaaataaaaatgattactttttattttatattgtttgtttatttatttatttcgagatggagtttcactcttgttgccctggctggagtgcagtggcgcgatcttggctcactgcaacctccgcctcctgggttcaagcaattctcctgcctcagcctcccaagtagctgggattacaggtgtgcaccaccacgcctggctaattttgtatttttttagtagagacagggtttcaccatgttggctaggctggtcttgaactcctgatctcaaatgatccacccgccttggcctcctaaaatgctgggattgcaggcatgagccaccgcgcccggcttattttttaagtggaaatagggttacctttagatctggacaaacctgggttttaaccccaacttcatcagcagaggaatgaaaaggcatataagaaatagtgtacgtggtagctcagctcagagcatggactccagagtcagcagatcttgtttaaatcccagctttaacccctaccagctgtgcaacctcaggcaagttgtttgacttatctgtgctagtttcttcattgataaaatgggaatcaaaatagcacctacctcagaagggtgagtgagccctttgcacagtgcgtggtcccaaaggaattgctcagtgtgtgttagcttgcatcattagtgaccaggtgtttggccttggacaagataataagctgctctgagacttggttttcttacctggaccatggacatgatacattgcagggctgttgcagagactaaatgagaaagtgtacgtggtgggtgcctggcacaggttggtgcagagtgcacagtagcttctttcatgattgaaggaaaccaagggcaactgtgtcctccatgcagcaggcgtacctggggtgctgagggcagagctaagtcttagagtttgagactccagacaagatgtggtgaaccaggagagcaccctgaaagtgtttcccctgtctgccatctggacaaacctggagcaatttcagcattgggggtgaaatgtaggaagcaggccagttccagctgtggtggaatctgggaagcagaccagatgtcatgcctgcggctggggtgggagggcagagtcagctcaagaactacagggtgcagcgtttggggacaagggacgggaggcccgagaggagagtctactgaggccccttttccactctgaggctgggatgaggcaggggatgacccagctgtactatcagcctcgctgtgggaaaaacccaactttgctgatgggtagggcggttctgtgaaaacccaggcctccactggccatgctggcccgacgtatttgctaacgtctccttgacagcctcaccaggaccacggcagtgcagccagtagggatcaccaggactttgccccaatcacttgccttcctggggttgaactaagatgctgcccacagtgaatccagtaaagtacaagcaaatgccaagcagggtgccaggcccatactggggtttgaatctaaatgacctgtgccagtctctgcttcccaacggggaaaatgcagccacctcctgagccaatagggagtcagagcctccccctgcctggagctttcaccctcatgctggggcccctgcggctctgtgctttctgcatttacccttcaggacttcagggttttgtgctttgttatagcttcctgttttgctttggccttgccaagtcccattccagctctctgagcacagcacagagccctccctctcaccccttttgtgttcctagtaaagatgctcctggtctaaggagaaggtccttgccagagccctaggctccagtcttggccttgctgggcctccatcaaatgccttcctttctggcgcctttgtctcctggtttgtaaagtaagcagtaacatcagaatccctttaatctggggccctttttgtccaatgaccaggttcccacccagatatctcttctagcaaaaggcaaatggaaacagctttttctctttctaatctaatgtcactctctcatccgcctttatcaaggcttaggatctccttaggctcagatgacatccacagggataaataacacccaaaggtgctactagtagcttaggaaggggctgggaaagtagggaaagggatttagaagtaggaagagaaaaaataaagtagaagaggtaagaaggtatgagatgtagagataagagcctcataagggccccccaaaatagccctgagagggctaggcccagtggctcacgcctgtaatcctggcactttggtaggctgaagctggcggatcacctgaggtcaggagttcaagagcagcctggccaacatggtgaaaccccatctctactaaaattacaaaaattagccaggagtggtggggcacgcttataatcccagctacttgagaggctgaggcaggaggatcacttgaacctgggaggcagagactacagtgagccaagatcctgccactgcactccagcctgggtgacagagcgagatctgtcttaaaaaaaaataaaaaataaaaataaaaaaaaaagatagccctcagaggcacctgagccaaagcctcatcttccttacccagaagatgctacccctgcaaatggcatacctcccagccaagtgtttggcgttaagctacagtcaggattcaaggacagtccctgcagatcatagctgaccccccttatccttggacagtctctgccccacaatggcaaagctgccctgactcagggaactctacgttttatcaccaggaaacacccagaggttgtgacagtgaccagatggaaggcgccggttgtgtgggaaggcactttcaacaaagccatcctaggaaattattatgccaaacagaaaattaccgtgcggttgatggtttttgctattggaaggtagatgtcactgataaaactgtccttgactgtctcttgttccactgtcaaaacatttgtgtggagactcctgaactgatggaagccagtcatgattttttgatttattagataggagaatgttttcatggaactggttcagtctcctttctgctgaggccctaaaatgctgagaacaaaataatagtaggtaagtccactcattcctacctcaaaatgagggacttgggttgcaggaaaacatgtctgttccacccaccaagcccagggtcaacagcatacccacaaccacctcctccctgaccaccatggcttcctttagaaattccacaagtgctagctgctagacagcccagagtgcatcattctttttcctatgctctacggcccaggaccaactacagagagatttatagcaagttctaggtgctgagtgacctaagcacagtggctttccacactggaacacagctgaccactcttccatgggttcctcagatcacttctactttttctctcatggaggatttggccctagaagatttgctggtcagagcttgctcttccaaaggttggataggttccagtttcaactcccttgttcagaacatatgacgcagaaaaactacgatcattcttacttgaaagttctagctctaggccaggtgcggtggctcacatctgtaatcccagcactttgggaggccgaggtgggtggatcacgaggtcaggagatcgagaccatcctagctaacacagtgaaaccccgtctctatgaaaaatacaaaaaattagctgggcgtggtggcacatgcctgtagtctcagctacttgggaggctgaggcaggagaatctcttgaacctgggaggcggaggttgcagtgagctgagatcacgcccctgggtgacagagcagactctgtctcaaaacaaaaagaagaaaagaaaagaaagaaagttctagctctaatgttagttattaaagataatccattttgctttttttggagaattttcctttttttttcaaaataaaactaaaagtccaattttcctatttttttttctgccctctgggcctttccctctatatctcttctgaagaagcttcatggaaagtcgattcctttgccttgtataaagagacttgaaggctcaggttgatctgagctttgccaaggtggggcttaaaagagagctctgtaaagatctgatagttctccaaagataaccttccccaacccagagcccagcagctattactgttccgtcattaacaataccaatcaagttctaatgtcactgaatgtgctgatcctagggacctatgtggtctctctaacagagaaaggtgactgtggagttttgacatgtttaccagaagaatctctactcatataggttgggagccacctaattagattaggtgaaccacccagctcacctaatcctttggcacaaaaggggataacccagccacgttgcagattgatttgatcctggtgtttccaaaaagaacaaaacgttgcccaatgccccacaatggcttcagccatccagttccaactctgcacaactaaactgtaaattgcacatcctggtgaaagcattctgccctcagctctgagacaagggaggactgtttgtactcagcagcaataaatctttacaagtggatttggacttttaggaggtgtaatgtttggtttgttttcaagcaacaatgcatggagccaactgcagtgctttaatctctaaacaatgtgaaacctcaaaatgaatctctcctgtactaaaccacccccccgccaccccaccccagtattgtttcccaagcttcagggcacaatagatttttctcgaagtcccagaatactgaaggatttcctggccactagccacagagccacactgaagtccctttttatattcctcagatatattctcttcatttaaagaatcaatactataaacccttggattaccacatgccaacattaaaagcacactttattttggtaacaaataaagggaatccaagcagcaacaaaaagcgaaaagaagtgccattcactttactcacaaaacaccatgattggccagtagtgtgatcagcacattaaattcagtccacgtgtgtttagggtttggtcaagttgtattaagccaactggcttattcttcctcttcctggtaatctccatagcatagcttcacaaatagtctatagcttaggcttacagaagacaccaataaaatgtttttcttttcttcttcttcttcttttttttttttttttttttgagatggagtcttgctctgtcacccaggctggagtgcagtggcaccatctcagctcactgcaacttctgcctcccaggttccggcaattctcctgccttagcctcccaagcagctgggactacaagtgtaagccaccacacccagctaatttttgtatttttagtagagatggggtttcatcatattggccaggctggtctcaaactcctgaccttgtgatccacccgcctcggcctcccaaagtgctgggattacaggcgtgagccaccgtgcccggcaatgggagacggcgtgcaatgcttttcaaatgaatagatgaatagttaaaataccactaaatacctactagaatggccaaaattcaaaacactgacaacaccaaatgctgacaaggatgtggagcaacaggaacacttattcattgctggtaggaatgcaaaatggtacagccactttggaagacaatttggcagtttcttacaaaactaaatatattcttaccacacgatccagcaatcgtactccttggtattcacccaaatgagttaaaaacttatgtctacaaaaaaacctgcacatggatatttacagaagctttatttcataattgccaaaacttgagagcaaccacaatgtcctttggtaggtgaatagaaaaatgaactaagtcacattcagacaatggactattattccatgctaaaaataaatgagctatcaagtcatgaaaagatatgttactaagtaaaagaagccacactgaaaaggctacatgctgtgtgcttatatgacattctggaaaaggtaaaactatggagacagtaaaaaggtcagtgattgttcagggttgttcagggaggcagggattaatgagcaaagctcagagaatttttagggcagtgatgctattttgtatgatactataatggtggatacatgtcattatacttttgttaaacccttagaatgtaccacaccaagagtgaaccctaatgtaaactatggatgttgggtgatagtgatatgtcagtgtagcttcatcgattgtaacaaatgtatcactctggtgcagggatgttgatagtggaggggtggggctgtgcaaatgtgggagcaggaggtatatgagaactctgtacttttggcgcaatttttctgtgaacataaaacttctctaaaaaaatagtccttatttttccttttttaaatttcttttaatttttttatcttctcttttcatctacatttactcagccaccgaatgtggcttactgctaacatagtcctttttttaagataaagtagttaaaataaggttaaatcagaagttgctcattctagtattcggatggactagtattttggatgatggtgtgtggacaatggattggtgttttaagtgactagtgggaggctcataggatgactatgtaacatgaaggcagatctagatctcataactcattctctgtatcacagaggacaagagagtgctgctgtttgggcttaatgcatccccagtggatccaagggtcacatcacccttgtatctggtctggcagtagcaacattggggtttatgttagggcttttgaatggagatcaagaactagtaccccctttgactgtccaaaatctgaaccaattggtaaattggacaaaggggtaaggaaggcagagggtggtaaatattactttcattatagttaaagctgatattggagaatgtggcttatatctgcaaaccctgggcctcctaaatatgtaacccccagagttagaaagacttaagcatccaggcacctacaggcctctggatgtgagaatagatcctgtactaagcttcctgtaaaacccagagcagttgagaacacatgctctcttggactggctggctcctaagagccagaggagaggaaggatagggtagtgcatatctagttctagttgctcttccaaaattggcagtgagataagtcattccagctccccacggactgagtgactgaatggtggagagtagccggggtattacactaacatgaaaacacacctggggtaggagaaatcattctcctactaaccataaaatatagacaagatgattttacatcacgtggtttctttcaggaatcccagcatgtggtttctttcaggaaacccacatgtgggttttttcagcttgtggtttctttcaggaatcccagaggataaatgttttgcttttcttctttgtttcagatataatgatcattacttggaggagttcataacatctgctaataggtacttcatggttggccacaaagtcatattttacatcatggtggatgatgtctccaagctgccgtttatagagctgggtcctctgcattccttcaaaatgtttgaggtcaagccagagaagaggtggcaagacatcagcatgatgcgtatgaagatcactggggagcacatcttggcccacatccaacacgaggtcgacttcctcttctgcatggatgtggaccaggtcttccaagaccattttggggtggagaccctaggccagtcagtggctcagctacaggctggcggtacaaggcagatccctatgactttacctaggagaggtggaaagagtcagcaggatacattccatttggccaggggatttttattaccatgcagccatttctggaggaacacccattcaggttctcaacatcacccaggagtgctttaagggaatcctcctggacaagaaaaatgacatagaagccaagtggcatgatgaaagccacctaaacaagtatttccttctcaataaaccctctaaaatcttatccctaaaatactgctgggattatcatataggcctgccttcagatattaaaactgtcaagtgatcgtggcagacaaaagagtataatttggttagaaataatgtctgacttcaaattgtgccagtagatttctgaatttaagagagaaatattctggctacttcctcagaaaagtaacacttaattttaacttcaaaaaatactaatgaaacaccaacagggcaaaaacataccattcctccttgtaacttggggctttgtaatgtggaagaatgaatctagggcaatcagatataaattcccagtgatttcttatctattctgggtttgggggaaatactatcaactgaaccaaaaataacttgtcataggcagagataaagccagaaacactctacacatgccagatgacatctggagaaaagggtgctaagggaagcgtttggcagcaagatatgattgtaaggggttgtcccttgagttcaatgtctgcctatttctgatgggtctaaagcaacatggagttactgtgcagcagaactctcagtaaagacaccatttgccttggcaatcctcaaaaagcttcaatagcagattgcttcagaccatctgtagtccgtccttttctcatctggatgttgtttggcttctgtgcgaaagattggtggagtgtcccagtagatatcatggtggtgtgtgatcagagtcccaaggaacctgaatgagccaaggtgcccagcatgaagtcaaaacaaagccttgacatgagtttgccatgaaatagcgaagagagagtggaagagaggagccaatcactgtggggcagtgccaccctgagggcacttagggtatggggttggtgcttaaatacatcacagatccaggtactgaatgggaggaagtgtgggtgatttccaatctcattgaccctatgttcagggacttgaacggaagatgtttcttgtgttgcctaagtggtattcagtctaccagactctgcaacttgcatcttcaaatccttggtaaagagatgtggatggtgtcagagaaggcaaaggcctgcagtggattgaagaggcttgcaagcagttctgtttctaggatgtgggcttcatcagaagacactcggtcaccacttagctagtctaaacctcagggttcctcagcccatcataccccaacttggaggactgacatcaaggagtagactggagaaacagccctcccatcaagtaacctcttgttctctcctgctccatctgcactatagaagtgtaataattagacatacttggcaaaatggctaattgatttggtaacagaagcatgagccataacaatggaagatctagttatcatgactgaacagcttaacattcaattcccttctctaagagaagctgtgaaatcctacatattatttaaagttaaccaaatcaatgtaaagggagttaggagacagtgtgtacctatgcacgtatatttatgttttgcttgtgttccagtctcggtcatttgtttccattttcaagcaatttatttgaagagccattgcactagcctgatgtatactgcaatgagcttctttgataaaatgaaacttagatttttctcgaccatttcaccgtgcctcctacttcattttttgccagaaaatctcacatccaacaaaacaaaacaaaaaccctgaattagtgggctttgaaaaggaaaaagcagggctttgaaaaagtagatcacacatcagttaagactcctgcttctctattagtcaggttgtcttggattcagtctggagtaggcagagcttaagggtttttaagtcctgacccaaagaaatgatctagcctgaaagtttagagcaaaggactaatgtttacttttaaaggaatttcttgatttttttaaaaaacttcattaaagtttaaatccccaatggacaaattcataatcttgttaatcgttattactaaactttttaaaaaatgtcccaatttacaattaaataaattactttctcagtatattctggtctggtcatggattgtgcatttcctcccaaagatattcaaaattgtcaattagagaattttaggttttcagactcagaaaagtcctcacgcccttctgaaaatgtgtccactattacagaaatagaacagacttgggattcccaaatttttgtttgtttttgagacagagtctcactctgtcacccatgctggagttcagtggtgtgatcatggttcactgcagccccgacctcctgggctcaagtgatcctctcacctcagcctcctgaatagctgggactacaggcaccaccacgccccactaattaagaaaaaaacgtttttatagaaatgtggtctcactatgttgcctaggctggtctcaaactcctgggcttaagtgatcctcctgccttggcctcccaaaacgctgggattacaggcgtgagccaccatgcccgtccaagggattccccaacttttaagcaacaaatacttatatagagctttccacagcaatgcgctgaaataatgaactgccagtgaaagaatcattagggaaaggcttgcccctgaagctcagggtggggcatcagggcagaggaagaaaacaatgccatcaccatatctggggattattagtcctgacctctggggaatatatctggtcaagtgggaaagtctggatttccagcaggtgtacttatactaaaaaatttaaagatgaccaggctaatttagtgagatgcactgaatatgcaacagggcatgattacctcatagtggagaattagtctcatttcataaaagaggaagatgaggtccagaaagcttttagactcgggaaagtcctcatgcccttctgaaaatgtgtccactattacaaaaatagaacagacttgggattcccaaatttttgtttgtttttgagacagggtctcactctgtcgcccacgccggagtgtggtggtgtaattatggctcatgtggccgcaacctcgaactcggctcaagtggtaagtggtaggtgactgatgtgggcttcatcagaggacagtcggtcatcagctggtcccactgcttagctagtgtaaacctcagcgttcctcagcccatcataccccaacttggagggttgacatcaaggagtagactggagaaatagctctcccatcaagtaactttttgtaagtggtaagtgactgaactgaggctcaaagcagggaaactcacaggacagatgtgttgacagtgcattcagagggccatgtttcatatcatggaaagcacaactatatatcttcccaggcctctaccatctcccactttttatgcatgaaacctgccccaaatgcattaagtaagtttaaaagcaccatgttaaaaaaaatcggttaggcacggtggcttaacccccataatcccaacacattgggaggccaaggcaggtggatcatttgactccaggagtttgagatcagccttggcaacagggcgaaaccccgtctctataaaaaatacaaaaattagccaggtgtggtggtgtgtgcctgtagtcttagctactcaggaggttgaagtgggaagatcacttgaacccaggaggtggaggttacgtgagccgagatcgtgccactgcactccagcctgggcaacagagaccctgtttcaaaaaataaaacattgttatcattcttatctttacattgtgcatggagggctgatgtaagcaccatggccgtgcactgagcggttatatcagggcggggcttcaggaggtgtgatcaggcagaggagtaggtggaaggaacaaaccatacttgctccttccactccacctcaaatctgggaaccacattcagccaaaaggggaaaaatgtgttcaaggcctgaaggatttctctttgtccctctttgctctctcttagccaaagccaccactatcaggaacctcaactatggcagtacttacaagcacttattttaatgtactgtttgttaaatgtgcctaacataaacaaataacactggcatgattgcatattaacaagcgtgaaaagtcatagaaagtgaatgtgtaacacactatacataccttttaaggaaagaaaagagtcaagtagggatccactggtgaatgtctgagatctgaaagagtgctgatccaggatttaaacccaggactgtctgcctatagattatcttactataaatcctgtgctctttccacagctccacacttctttctcacactgttttacacacacacacacacacacacacactttaaccatcttattgttgaaattggagataccaaagaaatcaacatcaatgctctcaatgcttttgttaggcattaaagagaggggatttaggagaccccaaactctttaaaggcaaaatgtaagtctaaaattggagaaagaggaacatgaaacctgaccaggtatgaggcataggtagtaccagggctaagggagtatgaaagaaggatggctcagggaggtggaagaagcctcagataatctgactctgaactgagctttgaaaggagagaaagggtcactgtgaagagtggatggaatgaggtttcagagaggcaagcagcaggtgtgaagcccaaagtgctacaataagaccttcatggaaatccacaggaatggtgctttgggaccggatgaaatcacctggcagagcctgtgtgaaaagagctggctgaccaccccatattcacccagcatttctggtgctctctctcccttctcagcaatccctgatctccttcagggaatttatgtgatttctatggaaactggtgccatgcttgaagcaagtacccttggctaaatcaatccatcaggactttccatttctctggtgacaactattgattcaagggtgggcaggtgacctaaagtagtcaaagtgaatttcaagtcttctactagaaataaggacacgtgtaaaaataggggctgctggaaaagggaagtccaccttaggataaaattgacaataggaaaggaggagcagagacactggaggaaacccaggccctggtgacaactttgagccattggatccagccttacctaaggtctgcactgtctgtgggcttttcaaatgcatgggccagtaaagtcccatgattgtttaagccagctggaattggactctctcttacttataactgacagtatctccattgaacccctctaggatgattagctccttaaaggcagggccatagtctgacattgcatcagctctagcacctactgcatcacgtatttcagaagtactccttaacaaatatttactgaacaaatgaatgaatgcaccaacatccattccgatcatgccttgatatgttttgctttagttggaaggttttacatttttgattatagactgtgtgtcctattaaaaagcaagtgtttggatatctggcacctggaacttttcctcctgtagtatacagtatgggaactcaggagttacagcctgggctgtaggcttaagctccaacttggtgccataagctggtggattcagtgctacttcaaggtcagcaatgtgtaaaataaatttgcttcatcagcataaagcagtggttctcagcctgggaatcactctcctctccatcccacgggacatttggcaatggcaatgtctggaggtatttttggttgtcacagttggtggaggggtgggtgctatctacatactgggtagaggccaggaatgttgctaaacatcctgggcaacatggcaaaaccctgtctctacacaaattacaaaaagaaaaagaaaaaaattagccaggcatggtggcgtgtgcctgtagtcccaggtactcgggaggctgaggtgagaggatcacctgaccccaggggttcaaagctgcagtgagctatgattgtaccactgctctcccacgtggacaacaagtgagaccctgtcttaaaaacagaacaaaacaaaaccagccaggcacaatggctcctgcctgtaatcacagcactttgggaggccaaggcaggtgcaccacttgaggtcaggagttcaagaccagcctggccatcatggtgagaccctgtctctactaaaaaatacaaaaattagccaggtgtggtggtgggcacctgtaatcccagctactcaggaggctgaggcaggagaatcgcttgaaccaaggaggcagaggttgcagtgagctgagattttgccactgcactcactccagcctgggcgacagagcgagactctgtctccaaaatcaaaacaaaatgaaacaaaaaaacaaaaaaccatcctacaacaaagaattatctagctcaacatgtcattagtaccgagtttcttggacttcagtaataaacaaacattgggaactaatatgcattacactcgcccgtctataccctgggaatagtcccctgttgccatcaagagcctctaactcacctcctggttgtccgctaacattcacagccttagagaacacaaaagtagttctctatactggacacgagagggcaggaatttccaaagataaccctgttatcctaagcgactgcagtgattaaaaatattcttttccggagctggtgaagactctgcacatttatagaaatagatgttaattttgcatacaaatgaaaatggcaattaatatttaaaggatgtggctataaaaaaacagccttattagttaaaataaatgagtttaacaattagttaaaataagccttagctatataaaccccaaaaggagtttactgggagactattggagaattctgtgaatagaagggagaattgacaggggagcaggggtgtgctgaagccagcttatactggcttgtgagagtctattataggcaatacttcccagctccctgttcagtgacatcactgtgataataggccgtggtgggagtatttaaaccatgggagtcaacacacactagaaaccagggctctttttcctttccttaatttccttctttctttctttttttaaagtgtcagttgttaaaaatttaccagtatatcactgcaaccaggccatgagtaagaaccaggaaagcttaggggcctctgcaactgaaaattgtggactctccctagaggtctgccattaatatgactcagttccaactatctccagtctcagggtttcttccttcaaaattctaaattcctaggaaagaaaactcaaaagtcacaacaccactcctgctcccagcagctgtgtcctggagtttgtttactggagaatgattacactatgggcagttctcagagaagcacatattgttgtgagctgggtatctaccctctaaaagtatctaccactttccacttatggctgtctggctgtcaatcacttcttcccatacattcaaaatattcccttctaccatgatccaaaaatgttatatactactccagcacagccccttctcccaacagaccactgaatccacagataatgtcagaggccaggctactcagagtctacttctccagatagtgatcatttctcctttgatcctttagacagcttgtatgactgttctgcaatctgtgacataaacggcaagtttagctcatatccaaacacactacagtgagagacaaggaagaaagagaagggaaaattgtagtaactcctatttaaagaggaaaatgatggtttcttgctctggaattcagtgggactgtgctgtaagtttccaatcacagctagccacattcttcaaccaccattccagtctacttcagacccattgaactatgtaaagtatgactggtcttaagggctgtggcagcctggaccaggtaaacagcttgtccagggtcccactaaaagctcacttattttacctttatcaggtaaatggcaagcagctggacacccacatgtgtgggacattgcttgcaggagttaatgcctctttctcagagataggggacatgaaatgctggttgtcaaacttggctgtaccctagaattacttggagagctaatattgatgtctggggccccacccagagattccaagtcaggtggcacagggtgaaggctggacactgggatttttacaagcttcccaggtgattctataatagtatgcagcaaagtgtgagaaccattgtcacaaaatacagcaatttgccttgtggtttcctacgtgtggtttctttagtgtttttatttctcgggggatttgctaaacttcttggatctgtaagtttataattttattttaaatcaaatttggaaagtttatggctataatttcttttttttgcagatgatatgactttatatttgaaaaaatctaaaaactccatcaaagaatgattagaactgataaattcagtaaagttgcagcatacaaaatcaacgtacaaaaactagtagcatttccacatgccaacagtgaagaatctgaaaaaaagtaatcccacttacaatacccacacatagaattaaatacttagaaattaacaaaagaagtgaaagagctctataataaaaactatgaaacattgatgagaaaaattgaagggaacacaaaaaaattgaaagatattccatattaatggagtggaaggatcgatattgttaaaatgtccatactccccaaagcaatcaacagattcaatgtaattccctattaaaacgctaataaaattcttcacagaaatagaaaaacagtccgaaaatttatttatttatttattttatgttattacataattttattatataaggattaaaaacaggtgagtatgagtttctagtcagtataacatttcccctgaagaactggaactgaacttaaaaggagcctaaggtaaaatgaatgttccatatgttcatctaggcgttgtgcaatcacatgtacgtgtttgtcaaatctcattcaagcaaatacataagatctgtgcttttctttatatgtattttacctccatttcaaagaaggaataataaaaacttgttttattattattacttccaaaaaatgtctgttcatgttctttacctgcttttctatgggtttttttttctcataaagttgttaaagtttcttataaatactaaatattaggcttttctcagatgtacagtttgcagaagatttcttccatcctataggttgtctgtttactctattgatattttatttttgtgtggagaaaatatcttcagtttaattagatcccatttgttaatttttgctcttgctgcaattccttttggcatctttgtgagatctttgcccatgcctatgttctgcatggtattgcctaggttgtctttcagggttcttgtagttttaggttttatatttaagtctttaatcccttgagttggttcttgtatatggtacaaggattgcggcccagttttattttattttatttttttattattatactttaagttctagggtacatgtgcacaatgtgcaggtttgttacataggtatacatgtgccatgttggtgtgctgcatccattaactcgtcatttacattaggtatatctcctaatgctatccctcccccctccccccaccccacgacaggccccggtgtgtgattttcccgtcctgtgtccaagtgttctcattgttcaattcccacctgtgagtgagaacatgcagtgtgtggttttctgtccttgtgatagtttgcacagaatgatggtttccaacttcttccatgtccttaaaaagacatgaactcatccttttttgtggctgcatagtattccatggtgtatatgtgccatattttcttaatccagtctatcattgatgggcatttgggttggttccaagtctttgctattgtgaatagtgctgcaataaacatatgtgtgcatgtgtctttatagcagcatgatttataaccctttgggtatatacccggtaatgggatggctgggtcaaatagtatttctagttctagatccttgaggaatcgccacactgtcttccacaatggttgaactagtttacactcccaccaacagtgtaaaagtgttcctatttctccacatcctcccag

SEQ ID NO: 705 - DNA, 1298 bp, Homo sapiens
cagcgctcgccggctcctcgcgcccctacccgctgcgctctgcccagagcagaagcccggccggccggcccacgggcgggaggacgcgcctccgctcgggcggaggcggcgcggtggctgatcagagcgcgtagggcttcgccggggccgggagctgggcgcggtcctgctcagcccagctcaccgcgcgccggccctcggcgccctggttctgcggatcaggagaaaataatgaatgtcaaaggaaaagtaattctgtcaatgctggttgtctcaactgtgatcattgtgttttgggaatttatcaacagcacagaaggctctttcttgtggatatatcactcaaaaaacccagaagttgatgacagcagtgctcagaagggctggtggtttctgagctggtttaacaatgggatccacaattatcaacaaggggaagaagacatagacaaagaaaaaggaagagaggaggaaacacccagaggttgtgacagtgaccagatggaaggcgccggttgtgtgggaaggcactttcaacaaagccatcctaggaaattattatgccaaacagaaaattaccgtgcggttgatggtttttgctattggaagatataatgatcattacttggaggagttcataacatctgctaataggtacttcatggttggccacaaagtcatattttacatcatggtggatgatgtctccaagctgccgtttatagagctgggtcctctgcattccttcaaaatgtttgaggtcaagccagagaagaggtggcaagacatcagcatgatgcgtatgaagatcactggggagcacatcttggcccacatccaacacgaggtcgacttcctcttctgcatggatgtggaccaggtcttccaagaccattttggggtggagaccctaggccagtcagtggctcagctacaggctggcggtacaaggcagatccctatgactttacctaggagaggtggaaagagtcagcaggatacattccatttggccaggggatttttattaccatgcagccatttctggaggaacacccattcaggttctcaacatcacccaggagtgctttaagggaatcctcctggacaagaaaaatgacatagaagccaagtggcatgatgaaagccacctaaacaagtatttccttctcaataaaccctctaaaatcttatccctaaaatactgctgggattatcatataggcctgccttcagatattaaaactgtcaagtgatcgtggcagacaaaagagtataatttggttagaaataatgtc

SEQ ID NO: 706 - protein, 212 aa, Homo sapiens
TKKKEERRKHPEVVTVTRWKAPVVWEGTFNKAILGNYYAKQKITVRLMVFAIGRYNDHYLEEFITSANRYFMVGHKVIFYIMVDDVSKLPFIELGPLHSFKMFEVKPEKRWQDISMMRMKITGEHILAHIQHEVDFLFCMDVDQVFQDHFGVETLGQSVAQLQAGGTRQIPMTLPRRGGKSQQDTFHLRFLLPCSHFWRNTHSGSQHHPGVL

SEQ ID NO: 707 - DNA, 159434 bp, Mus musculus
  misc_feature (1)...(159434): n = A,T,C or G
agagactttgacactcaggaatgggatggttgtatcagcaatgggatggttctattaggaatgggatggttgtttcaatccctccctctcagggctcagaagtctccttggaagaggatgcaggaagactgtaagagacaaaggtggtgagtgacttcaagagaatagcatctttcagacacaacagggctgatgcacatatgagtcacagactgagactggaacaaattcaagccagacaaattcccagcacagagaagaggaactgggcacgatgccccacccttagccaagacgctatttgcaactgacatctgctggggaaggggaaaatcagttttgtctaatgcagtgtcaccgagatagcaacctcactcgggggaagaccccaagcttggccaattcaaaacagactttatactttggtgtgcgtgtgccttattgatttgttgttattgttgttatagttttgagggggggttgtttgcttccttggttgttttgtttgcttgcttgtttttgttttgctttgctttgggttgtcttagtgttctattgctgtgaagagaatggggtcataaccacggcatcataaccgagacagcttgtaaagcacagtattgaattaacttgacctgcagtcatggcacatgaaagcaccgtcttccctccactccttgttctcattggctcatggctatctcacaagcaaatgcattcaatctacctttaaaagtcctcacagtaaaagtgcagagtctaagactcaggcaatcctttaactgtacaatcctgtataaccaaaaatagattatatacttctaaacacaacggctgtcttagggcttctattgccatgataaaaatgccatgacaaaaggcaacttgggtatgaaagagtttatttttcttacattttcatatcgaagtcagggcagggactcaggacagcatcctggaaacaggaactgaggcagaagctatagatgaatgctactttactggtttccccttcttcatgggctttctcagccagttttcttatataccccaggaccatttgcccacaggtaacaccacccacattagtgaacccttccacaccgcccactaatgactaaaatgacccacagtctcacctacagactaatcttactgaggcattttcttaactggttatctcttctaggacaaatttagcttctgttaaggtaataaaaaacaaaataaaacaaagaaattaacaggacaatgatctaccattcctaagaggaactgtggggccaggggatcaatggagctgtgtggaggaagcctaaagcaagagtggggttgaggtgtgtccaaacccagaaaacctcatcctgagattggcaggagtgggatcgctccccctctgccctagtgcacatagatttgtgcccccatcttttgccccaccagaggaggtcacatagcttgtagccaggttaaaacttccattccccttataaggtcatgtccagcagcatgtatggaattcctccttaagcaaatggggcgttcccagcaccctggcccctgctaatgatgtatgtacactcaccactatagcccctattcatctctgaaaggtttaaatatcccttgtctctccccacccccaccccccaattaaatgagttgtctcactgaagcctgtctcccgagagtctaatcttcattcagaatccatcagttgtgacctttggccgatcaccccatcaggggtctggggacaacagagaatgggagtcatagcatcggaagattgaacaaaaccaaaacaaccccagcaagacagatgctaaatccaacagcctcacgccagccacctggggcttgtgatgaaatcgtctgggttacaaaggggttggctccactcctctggttctgctgcttgcaccacacatagcttctcccgttggccagctccacttgatgcgtgcagctcttctcagaatccatcccacggtactggcatctccaaaatcccatgtatccactgcaacttaggtttgccctcatagtttcacagggtggcttctcaaggtctcctttcaagtacttcagtactgccacagactgaactcggtggcttactgtcagacccactgtcaaacatgaactctttattcttgggtttattatatctgtagaaccagcactacacagacaatactagagctgacatcttcaggggtagcctgtcccttagattatcattgcagtagcctctttcttgtataagtagttggttttgttttgttctaaacagagaaccccttcaatggcactatcagctccattttccccctagcaaatgaatttgcatttccttaaattgggcacctttcctagtatctccgtgaaggtttctctttaatagtgactatctctttaactgttacagatgctttgcctatatattcttgtctacaattttaaacttgctcatatacctttccctagtaaattttttcttatctttttcctctctctctctctctgctgaagaggagcagtgagcagtagccacgccatagcctaaatgttacatagttttgaaatttcttctgccgaagaaattagtctattattttgaattcagnnnnnnnnnnnnnnnnnnnnnnnnnnnnnnnnnnnnnnnnnnnnnnnnnnnnnnnnnnnnnnnnnnnnnnnnnnnnnnnnnnnnnnnnnnnnnnnnnnnnnnnnnnnnnnnnnnnnnnnnnnnnnnnnnnnnnnnnnnnnnnnnnnnnnnnnnnnnnnnnnnnnnnnnnnnnnnnnnnnnnnnnnnnnnnnnnnnnnnnnnnnnnnnnnnnnnnnnnnnnnnnnnnnnnnnnnnnnnnnnnnnnnnnnnnnnnnnnnnnnnnnnnnnnnnnnnnnnnnnnnnnnnnnnnnnnnnnnnnnnnnnnnnnnnnnnnnnnnnnnnnnnnnnnnnnnnnnnnnnnnnnnnnnnnnnnnnnnnnnnnnnnnnnnnnnnnnnnnnnnnnnnnnnnnnnnnnnnnnnnnnnnnnnnnnnnnnnnnnnnnnnnnnnnnnnnnnnnnnnnnnnnnnnnnnnnnnnncggctcacattcaagtgggctgtctcccctcagttaacctaattaaacccccctcacattcatgtccagcagattgtgggcatctaagtgactctagatcctgtcaagttggcaatcaaaattaaccatcaggcacaccctggggaagaggatcatgacttctataggctaccctgggatggggataagcaggtgaagggggaaggcaaaggtctgagagacatcttgcactctgaggcctgtggagcccccatgttattaaaaatcattaaaaaaagatttattcctatttagctgtatatggaacaaagtacaaaagggaaaaaacctagacatgaaactctgaacagaaactcttgtatctatctatctacctacctatctatctatctatctatctatctatctatctatctatctatctagtcatatcacatcacaattacttttttaaagaataacttcttgcccagcagtggtgatgaatcccagcacaagaaaggcagaggcaggtggctttctgagttcaaagccatcctgaactacagagtaagttccaggacagccagagctatacagagaaaccttgtcttgaaaaaccaaaacccaccaccgccaataacaacaacaacaacaaaaaccaacaaaagccagtccaacctaatccaaaccaaacaagaaaaataacttcttgcccctccccatccccagctcctggcaactaacactattctaggtattcacagaaataaagtcatacagcattattgctccttcttgtatccatgatgtctctgtctgtatgtctgtctagctacaatgggaaaacactcaagaactgtgtgcattaatctgtgtagagttttccttccttttgtttgctaaataatacagtctttcaactatttgtgtagtgtttatgttgaagtagacattggcagtaacctagagggctccagtgaggagcaaacctgagatgaccaccagtctggagccatagggtaccaggaaggagcaagcataaagcaaccattagtccagggcctagaaagccaggcaagatggacctccatatctacatggcttgggtgggacatagcactcctgacaccattcctgagatgacctcagatacccagagaccctcggcaccaataagatgagcaaggaaaaacaaaaaaaataacaagaatattaaaaaaaaaaaaagatgagcaaggaagtggtggagaaatggaagagaaagagaagcagaaggatgtgggcacaatgaagagaggcagaaccggggactcgagggtagtgaggaacaaactgatgtgaatatctggtgatgcctcctaaggctgtggtgagatgctggctctgctggctctgaggggcatgtctaggtctgtggctctgcagtagggagtgtctgttaccaccaaaggtcaggagggcatttctggtctggggtgcttcctagagccatgttgatgtctgagggcagtgcagaactggccctacccctcacttgggcattgtggaagagctggccctgagggcatgagagcaggagagctgtccctgccccttacctgctggagtacatgggaaagttcagcctgtacctcacctgggcagcaaagtaaagctagccctgctggtgagggtgattcagccccaagggcaagagagtgggatagcttcctctgcccctttctggctgcggcattgaatgagctagcaggggctgtgctggagagctcaccctggtggtatggtgggagagacggtaggctgaccagttcagatgcttcccaggtccagatacaaggctctgagctagtccattctaatatataccccatctatgaactgctggaatgcaggaagggtctggtcctacagatccaaagctgcaggatttccatgagacagggctacaggatatccgaggggagtctctgtgaggatccagtattgataatgtcacagaagccagaggcctagaaccagaccaatgactcattgcaaaggacatttataaacaaagaagtgtggacaaaagggtatagtgtgggacacactgatacactaaagcttccacaatgagatttcttttttcttcgtgaggggagagattttaaggggagaggttgggaatgagggggtgaggagatgagtgagatggcggtgtacggtgtgaaatgcatagggaaccaataaaaagttaaaaaaaagagcaacctagagatgaattaaagtacacagaaagatgcatataggtggtatttgaaaatgatgccattttctataagaaatttcagcttccttttggtatcttcagggaggggacccaggaacgccgagtggcctgttatcttgtcactggttatcctacttaacacagaatcttcaaggcctattcatgttgcatcatgtgtcaggattttcttgcttttaaagacaacaacaggctgggcatggtggcacacacctttaatcccagcacttgggaggcagaggcaggcagatttctgagttcgaggccagcctgtctacagagtgagttccaggacagccagggctacacaaagaaactctgtctcgaaaaccaaaccaaaccaaaccaaaccaaaccaaaacaaaacaaaacaaaacaaaagacaacaacatttcactttatgtttatacatttgtcagggatgaacactgggttgttttcatcttttggtgagtcacgttgctttgagcactgttgtacaaattcctgactatgagctgactggggaacatgaccttagaaatggaacccctgggctgcatggtaattctatgcttatatttttgaggggttgatgctgttcttcacaatagttctaccttttttttttcttccccaaaaaccgtgcacaggagattagatttcttcatcttcatcttgtgaatgctttctttctccttcctcctccctgtctccctgtctgtcgccctgtttctcctctctcttcctttctcctgcggtataatgatcctaatcggctttaagggatgactcttagagctttaattggctgtttcctttctaatgatgtgtgatgattatctttcatgcgcttgttggtcttttgtacatcctcagagagagtctattccattcctttggcaacttaaaaacaaacttgtttggttttggttgtaaattgcaggagttctttttatatactgtatatatgataacccatatcatatatcatttaaaaattcttttgttctgcattttttttgtggttgctgttgttatcattcttcaatgcataaaggttgtaagttatgtttaatttctttactttgtctatgcatgttttgtgtgtgtgtgtgtgtgtgtgtgtgtgtgagtgtgtgtgagtgtgtgtgagtgtgtgtgtgagtgtgtgtgtgagtgtgtgtgagtgtgtgagtgtgtgagtgtgtgtgtgtgtgagtgtgtgagtgtgtgtgtgaacatgtgtgtgtgtgagtgtgtgtgtgtgtgagtgtgtgagtgtgtgtgtgtgaacatgtgtgtgtttgagtgtgtgtgagtgtgtgtgtgtgtgtgtgtgtgtgtgtgtgtgtgtgtgtgtgccagctatgatgcccctgtggaggtctatgaatgactctcaggagtcagttctctccttccaccactgtgagtgaaaggggttgcactcgggtcattagggtgacagctggtccttaccctctgagccatctctccaggctccaaagtttacatttttatgtagttaagcttattaaattttctcattactctggtggccttcatattttttcttgaatcctacttggcccattttctcagacacactgtatcttgtgacctcttaaataggattcatatgataacctccttgatatgggttcagtttatacatcttagcaattgggaagtaacaaacaaggttatttgcttgaatagaataggttgaagatatgaaataatgagcaacgagggagcccgttggcccatgggtggatctctacgcagcctgtgttattcacagttcaggcactctcaaagaaatgagtgtatatggagttctgcacatcccctagtgggcccaaggaaatcattagactgttatcaccggtatactgagttttagttttgtttttgttgctgtaagcatctgtgggcgaggtcacacagtgaatgagagagagagaaccagaaagagagcagaggaagttgaatgtggttagtagtgaacactcccatggtaactaatctagtattgtgagagcaagggcttacttctgtgactcctctgaaccccttctaatgactaaaccacctcttaaacaccccactgtctctcaagcaggttttgacacagatttcccaaagaacaaagggtctgcaggccagagcctgagacttgcttagtgcaatgcagatgagaaagcagccccagagacttcttttcctgtacatcagctgtgccaaggagagaaaatcaaatcggtattgcttacaatggtttagaacattcacttccgtggctctgtcttttcgggtaggcaggaaacttggactcttgagtacaactagatgtatgcaataggtctatttctaaaattaaagaagttgttatttacaaccatttattcagtacccagtaagaataacactacctaagatctggcttataatacacacacacacacacacacacacacacacacgcatgcacgcactaaatgctttaccatactaaacacattacaagtaatactgctcttaatttgttaaaaaaaataatctgcaaggcaatattgctattctaatgccagagaataggaaacagggtctgaaggaaagcaaatatctggccacagtggcagaggaaggacccatgctcagcggagttccccactcagtgtgcttcctactctgcactctgtcttcagatggagcaaaggcaaggaggaattcactgtctagatgtagtgatacagaaaggaccctggaacaataagtaaggacaaccagctgcaggccatctgggaaatccttctctagaaagtcttaggattgaaagttagtgttgacaaagtccaaatggacacagctatggaccaatgcattctcccgggaggtgggaatacatcaggtttctttcaggaaacttcgtaccacgaggttccttcatagagttacaaagctttagactctaggttattgtgccagaggtagatgctaggctaaccccagttcatggcatagacctaccctaataggtttcaaactctttgaaaacccatacacccttatctaaattggagaatgtcatccacagactgttggcacttagtttgctgataggtgggaatggatcttgagtaagaacagagtcagtacaaagaccattgttcctaaggcagtcctagcatctacctgttctctggcttggcagtttagtagcttcttgaatatagcaaagcaagttgtgctcttctaagctcttcatttgtttcagtggctttggccatgttcctattatcttccatagggcccccgagatacttactgattgatggatgggaatgaaccagttcggcagggcaaatggccctgagccaatatcagaaacaaagcaggacaagtggaatagaagaagtcacaagcagttagaatctgttagattgtaagcatggatgttataggagaggagggagcctacagtaagaagagagacctgtatgagaacctaggcttgtcttagatttgatcttctatacaatctgttcatttctgcaggattctaaacatcattagaaattgatctatgattgcttataacagagctcctgttttctttccccctttttcttgtttttgttttctttttccttttttcttgtttttgattttgggatttttttgtcccaagttgccttctgaacgctgggattccaagcatgcaccgccacgcgacactgaaatgttcctgacttaggactcaaaaaaccgacttcaaccctcaagctctaaagtagcatgctaaatacgtgggtgtgtgaatttgttttctgacttagcgttgcagtgataaaatccttgattttgatcggatgtgaacaattttgaattacctatgttcaagcatttcctttataactggcttccatgcaaatctcatttccttcctgctttccctaggactcttgcaaaaactctacaacacagggaaacgctctgtggctgttcagttgtacactgtgctgataagtatttttcctttcaggaaaagatgtgacctggttttttatagagtttagctgggaatattaactatgacttccattctgttcttggcttgtggagccccatcagtcctgcagttcccgggggtcctcacaagctaatccaagccttgccctcccacctgcaggtagagtggcgactacaagtcccgggatgcgccgcgcttacacccagggtgaggcggatctctgcagtgacgtcaccgtgccgaggcggggcagaggggcgggcctggaggtgccggagcacggtggtgctgatgcaggatggctgagcgcgaccgagcccgggaggtctgagccgggcggggattgctccctgagcatcgcctagtccgcccgcctcgtggttgcgggcaggtgggccgggggcgcaggaccgggctggaggtcagcagcagggcggcccacctgatacgctgctctccttcccggcggcggagctgcggggcgtccagcgcaggcttgagatgacctgctgagaagctgcgggaggcggcctagcagcgggcagcggttggttcgcggcctcctcggtggcgctgcccagccgggccccccaccccatccctgtgccccctcctgctgcggcccgagatggcggatccagccgaatgcagcatcaaagtgatgtgccggttccggcccctcaacgaagcggagatcctccgcggggacaaattcatccccaaattcaaaggcgaggagacggtggtgatcggggtaagtggccttggtgtcttgcccctcctccggctttgcaccatagcctgagtggggatcttccggacgctacctccgacatcccagcggggctgggttcgcgggtggatcgtaaaagagcccttgcctggtgactcccccgcggcggtggtggcgcggggcggcgggggagtgcgaggtccgccattgttcgcgggtgggggctcgggtgggcctattgttcccactctagccgccgcgtgggcagtgtttaggcttgccagcaagtagggatgcccaggtcttggtcaaaagtgtcagctccacaacccacagatgcatccaggcattccagggttcgatttgtctcaagaccttagtcaaaaaggtatggaggaaaggtgcaagaaaaacaaaatctcctgggccctccataggcggtttcaccttgctctcttgtggaaggtgaggagtgctcttggtgtctctgggaggtctcttatgtttcctgcttcctatcatcccaattgtcctggatttgtgctttctgtggactacccccacccccaccaggtcctttctccctagtgtctgcagatagactcatatgcttcgttctagatggagagcagattctcgaatctgctaagagagggagttcccaaataaccctctgtatcaagagcagaagttacttaagcaaatccagagtctcccttttgatcacctttccccacctttcctcccacagtgttttccccaacttagctccttctctgcagcctggctacggggaaagggagggaatactcccttacagttcttaagggagtacaccaaaggaaataaactagttttgtccgcgccccctttcttaacctgctctccctagagtgtgtgtctcatggtgccctctttgtattcgagccgcgtggagagggactgagttaatgcgagcctctaggtccccactgatacgttcctggcatcccgctccaggctgctgatgcagccttcccgtctccagcattgattaagtgatgtcatctccatcactgagcatgctcggactaccccctcccccccattcccccagtgactgttgtatttaggtcaagtgattgacaggtgacagctttctgggtgtatagctagaggacacctagcctttttcaagagcgaaccctgcggttcttcacttagtctgtccccaacatctttggcaaggttgtctgctgcagtcgctgcaaaggtcttggaccagcagatgctagtcatattttccaccatcctggattagaggccaagccctggcctgggggcttcgtcttgtattatgtttaagaaggctcctcccactccctgcagactatgatctttttccttcccgttttcagttataggaaaacgcagacctctgaatactctggatgagcaaccacttattctgatatctgacctatggggaagggcagggatttcctcctctgtgcttagggttaacctgcagaaaagctgtacactacaattattgatgagggaattctatacttaatggcatatatgggttagtgagatagccatggcagcctggagctagggttacaagtagactgagatcccatcattgtctgatctgctgtttcctcagtgaggtgtggttcaattaggagtggcagttgctagggacttctagtccctccctcttggcttgtaacaatttttacagtactgattgctcagtgcctgaaaatgttcgggtgaccttgtgttttgtgttttgttttctctctccatgctttaaagggcctgaagtgtttctcaaagctagctctgcttccctctcctttttctgccttctcctctcccaccttcctcatcttctacaaggatcagtgaagtagagtaataaatcccctgtgcaaagcagagattcttagctttattactattaatcactctattactgtaagtattccaggcttaagtgtatacaaataatactaagttaaaacaaacatacacaaacactttaacaaaaagttatggatgtgaatatacatactgcatttcaactgtaaggtgttttttttttttttttttttctcatcctactactttaatttagcgaaataaagcatcatagaaaagcattaactattagcctgatgagttttcaaagaaacaggcattttcaggtcttagagctttcttcagtgtaatcttcagaccccaacaccccagggcgtcaatattctgatttctgaatctatacattcattagttttgcttgtttttctcagcataaaaccctacagtaggttgtctgttatgtttctggcaatgcttgtcacattggtcttgtttgtagtagtatttcaccatatgaatatgcctaaaatttacttattccttagatgtttttgaagagggtctagctttgttgtccaggctggctttgacctcatgaccctcctgctttagctctcacagtaccgggagtacaggtgtgagccaccaagcccagtaagtagctgttgagagacaattaattgccctgcatccatttggggctcttctggatggtgctgctatgaacctcactgtttgcatcttttggttcatgagtatatagtacagaccactctgagacagtaagtgttaagatttgtgttggcgtggccttgggacccttcccctcactaattatcaatgtagatgagaatatagcctggcagtatgtatggttcttaaacatcatgcggaatgtccccaagttgacagcagcatgtatgactcaattataggtagagttgatctcagtggcaaggctatcccaagaacgtggaacttagaactgcccggaaatctcactttcactctctgcagacacaagtgaaggaggacgtttggtggagttagctgttagttcaggtcattcttagttttgaagcagagatctttttttcctcccctttaaagtcctgtttagttcttgtggagttgtacatcaagatcgtcaggcggaatttctgagtttccctttaaggaaatgtacagtcttggaagagtctcctcaccatccgcacactctgtttggagcttccgtgcaaatccttccccgctgctgttcctccgccctgacttttccatccacaaccctgtctgtctctttactttgaacgagcgatattgtggtcattactttccccgttgctgtgatagaaagccatgactgaaaactttctgttagagtttatttgggcccctggttccagagggagagtccataatgtcaggggagagacaggagagctgacagctagagcaggaagctgagcgagcacctcctcacacagactcaggcagagcaagccagagtgagggtgaggctctaaccgtccctcaaagccagtcctcagtcactactttgtccagcaaggccgcatctcctaaaagttccataacctctccaacatccctaccaaccagagaccagatattcaaatacgtgagccttataggggacatttcttattcaaaccattacagctatgtttgttttgtctataacctcacttgttttaccttatattgttagtagtttgattacctatctagtgatattgttagctactgtagagataaggcccatccgggttttgctctagggccttatccataagaagtattgcagcatttattgatttctttgttagcctgggaacctttaatatatttttattatattttacacacacacacacacacacacacacacacacacacacacacacacacacagagccagaggcatcttcctcagttgttttccatcttaatttttgaggcagggtctctcactgaacctggagtttgcccagctggcaggacaggctgaccacagagacaagtgcccgctgttacacctgccgacttatgtgggtaccaggggtttaagttaggtcttaacgtttgtgtagtagacactttcctgactaaactatccctccagtcttgactttgttagagtaacttaccttaccgacttaattttataaacaggaggtggaaaatagttaaagcaaacaaatactctgagaacattaattatacttaaatgactataaaaattggaggaaaaatgccatgttcagcttgttgaaaattaggagagctactgactctggtgctgagccagagtgggaggggaaggctcatgactagaaaagggcccttttcttgtatcgaattaattcttcagagaaaattactggagttagaggatttctcagaggacaccttcattatctgctaaaatcctggtgagtcacttattactgggggctctgcctctcggttgcgaagcgcctgtactgatgaaaggtctctgggttggccagttcttactggttctttaatacgacctttcccacctcagtttcttcttgttgggtacttctgtttgcggtcctgagaacgtagaccttgctccacacggctactttctcctgagacagtgtcatctctgagagtctccgagtcagtcacaaacccagaactgaccatgggtgaggagaatggccttaggacccagtcgcttgcattagctttccacagttgatggccagaacaggaagggacctgacagagcctggagattgaggtgtgaagagatgggacagtacttgagaatttttcttttggtccactctatttattgatctttcaaagtaggaatttaaaatactattcagcactagaacgttgttaagagtatagttctaattgaaaatagtgtttgatgaatcttcctttaggtttgtattgctttagtagcaagttgccgtaactttagggacttagcataacccagattaattttgtcagtttacacaagtcagaaacccagtaggttggcggttttctccattttgagtctctaagagtccaaacctaactgctggtggggcagtgctctggctggagggaggtagaagctatagctttgctcactcaaaattggtgggagaagtcagtggtttgtaggcccacttcatcatcgtctaaggttttcttatcatgttgttagatgactagtgtactggctggttttgtgtatcaacttgatgtaagctggaattgtcacagacaaaggaggctcccttgaggaaatgcctccatgagatccagctgtaaggcattttctcaattagtgatcactgccttgatcactaattgagcaagctgagcaagccaggggaagcagtccagtaagcagcactcttccatggcctctgcatcagctcctgcctctaagttcctgccctgtgtgagttcctgtcctgacttcctttggtgatgaacagcaatgtggaagtgtaagctgaataaaccctttcctccacaacttgcttcatggtcataatgttttatacataaatacaaaccatgactaagacagttagcaaacttaattctacaaagtctcatttatcatataacatataatgggactagggagtatgggcatctttgaggaacattaatctgcctaccatacaacaccatactaagatataaagtattttcatcaaaacaacaacaacaacagcacagagagagagagagagagagagagagagagagagaatgaaactattcacccttgtatctgccactcattatttttcctctctgtaattttcctttgccaggttgtcataaaatgttaactatctttttgggtttgggtttatttcatttagcaactctttgtggtttgcttctgttgtatatatccatatataaatgacttgttgttgttttgcacaataactttttattgtgtatatggatataccgtagtgcttagccatttgtcttttgaaggacatttggattttttccaatttgtgtgattatgaagaaagccactataagcttttgcatatagattttgtgtgagcatacatttttgtttctcttggttgaatgcccagaagtgggattgctgtatcatttggtaactatatgtttaattctgtaagaaactgccaaattctttttcaaagtggttggaccattttgcattcctgtctaaaagtggtaacattataagccaaagttttaaatagcctagtcagtcactttaagtgcatgctaaactagtagagtctcaatgtatcagcccttcatcccctgtgctctaaattcagagatgtttttagttcccgaaaatagattagtaattttctataaaaatggcatgtaagatcggagtgcgcgaactcaggggcatagttataagctggcatacactcctcagggggactccctgttcccagggaggaatacagttcttcataatgaagaaccaagtagaggcagctggaaagtcaggcaaaactgagtacagacactgtggtgatttgaataggtttggctcccatagactgatgtgtttgaatgtttgatccattgggagtgtcaccattaggaggcgtgatcttattggaggaagtgtgtcactgtggggttggctttgaggtctcctacgctcaagccatgtctagtatcacacatagtctccttccgatgcctgtggatcaagatgtagaactctcagcttcttctcatgccaccatgtttcctactatgatgataatggactgaacctgtaaaactaaagccagtcccaattaaatgttgtcctttataagagttgccttggtcacagcaatagaaacctaactattagaaactaagacagataacctagctagtggtggcacttttgccaggtggccttaatttttctgggccttagtgttctcatatttaaagtagagagacttgtgtcacagggtaatgtggctcaaagaaaatgcccagtattagtcatctcccaggtttcctatcccctgtataaatcccctcctttccagagttagatttgttcccgcaggctcttctcgtactttggactcctctgaacacccttcttgcatcgtaggcacctgctcacccgcttcttctgcttgagtagccagtcttcgtcttacaagttccatgtggttacaggcgtcactagctgcttcttcatctgaggcgatcattctcaggactgcgtgcgtgtgcgtgcgtgtgtgtgcgtgcgtgcgtgcgtgcgtgcgtgcgtgcgtgtgtgtgtgcgtgtgtgtgtgtgtgtgtgtgtgtgtatcttcccctgccgcattataagttccctgggcagaggttgttgcttgtttgtgtatttatgtatttgattatttaagtgattttgtctgctgtactgtagtttgcatcgtcactttgtaaatgtattctgactgaagttgttctttctcccggcttggcagcaagtctgcataatgctgatttctgtgtttctttaaataacgtgggaatcacgatattcctctgtctacctgcattcatatggcccaactctgcatattaagaataatgttccactctccatcccccctatttaaagtttgaacactcctctatattttcccactggtccttggctcatgtttcacctgtgttttattgaaaaaaaaaaaaagaaggaaagaaagaaagaaagaaagaaagaaagaaagagaaaaaggcctgctcccaaatggtttctcttgagataaaggattttttttttaccagatggatccaattccatcttatttcttgctttttttaaataattaaaaaatatcttatttctgtggctgagaaagcacactccttttccacttattccacatcgactaaatttcttttagtagaaattgttacacacatttgtgatcatttgtaaatatggagagactgggagtgaacagatgaaatccattcgagcgtctctagccccaaacatatgtggtcagcctgggagggatgcccagatctgccatttcttagtgtggaaattggctggcctgtattgagttccggcttcctcacttggaagacaaagacgggagcagttcccttcaggggcagcatggtgtgaggcacttaatccacagacccagaaactggtattgaataagcatccagaaatcattccctgtatgggccaactagtggctgcttctctgtactcctgtgggacggactcaccgtgggagaccacaggtctttcagagctacttggtgtctgcaggagaaacccagatgcttctgtgagttaactcaccggcccagcctctcccctccctccagtgggtcccaatcttcctaaagctatggccctggccctttaatacagttcctcatgtagtggtgaccctcaagtataacattgttttcattgctactcataactctaattttgctactgttgtgacttgtgatgtgaatgtctttgttttccgatggtcccttgggctatgacccacaggttgaaaacctcctctccatccatgttccagctgtgctgtatcctggctcagtgactcccctcccctccttcctttctcacaccttcacgccccagagactacctccattgcttccctgcaagcatctaatcccatttgcttctgctccttcagggcggcctcaggtactccgaccaatccccctttcctctccctgtcagcaaggaagggttaggtagccctttccctatattttccccatcaggcacaatatccacttgtctcccattggactgaaagccctatgaatgccaaggaaacatgcttattcatcctgttctcaggacatggaagggtgccagggacagagatgcttagtgagatgtctgtgcaaacacagcccctcttgccagcccgagcctgcgcttgtttgcttgagacacactcctgactcctctggctttggaaacatgcctttcctgccttagctacattcatggttttgatattatcacttgtgatgactagcttttctctgacctggatgtggtggtacccatgtgcaatcccagaaccttggagactgaggcaggaacatctccagcctgggctgtgtagtgagattctattccagaaaggaaaaaaaaaacagtttttaatagtttttgaggatgctttttaaaatatatgctcactgaaaaaagtcagatcatgaaaatcatgaaggcagcaaaaatagctcattgtcaactgagcaggaaataccagttaacacttccctgtggacacctctccttcctgtatacttggttttaaaacacatcctgtcttatagcgagtgttctagaacccagcttactaagtggcaaacttccgagatttccattttgaagactgcttatgatttctgtgttttctaatcaattaactgcttccttctgaggggttttctccgttttccacccattataaatggatgttatccaccttagcccaccagccttctttgtgactttgcccagttatttttgtaaagtgtatttctggagttgagattgtggcataaaggttagctctgacctgaggtgtatcctccgtctgtggagggagcagctcggggatggagaatcttgtcctgtgtcttacagtctcgcttccctgcttgccctgtggaattgctgccggtttgtctcatcaggtagtcctgtcagtgctaaattaaattcttaccagagcgtgtcttcgtcatgcactgttaacccctagatccagagcgccgcactgtctgtcttcggactttcagtgtgaaccattgcggtttgtaggaggtctaccatcattttcagtatcccagaggatgctgtttctttccggtgatcaaaagctaaatcttcctcttgaggtcgacagagatagaggccaagtttgtagtcttacagagaaataggatggtgtgcgtggccttcttgtgctgacattggctggctggtgatagctctgggaagtggggcattgagtggggatcaaacacacctctcagagaggcctcaggaagaggacattactctctttttccttggtcactactactattaaagaagaagaaaaaaaaaacagtgaaatttcaaacgtacatccgagaggaaaggatgatcaggcccactcctaggtgctcctggaccaggttaaccatcatcaccaaatagccaactccacctgaccccctcctaacctttctcatattttctaaattcctttacagtagaaatctcgaattttatgtacgctaatccccaaacttcattccatatctctaaaaagtcaggagcctataatgtaatgcggaaacacattgtaactaaaatcctaccagcgattccctgctgacgagcacccgttgcctcataaattcttctcgaaagtgtgcttgggttggattggcaggtactgttgattccactggagagagagaaatgttcttcccatcctcaccttgaaacaagtgggggctctgcaaggatccaagcctttgtggaggctcgaccatgcacccagcgatgagggctaatcaagcttccagagccaactctgccaaccttatcctttctaatcaagcaaagcaaggctggtggtgcctttccgcaaggcacctgaaaaagcgccatactctatgaccttgccttgctgctgcatacacttcctggcttgagtcagcttgtggaatcgccagggccaggcacatgcacgctgtttgtcttccagccatggtcctcggcctggtctgaccagggatttggagaggctcatccaggtgtgtttgagagattttcatcttatcttttcatccttggtttgagttggatattgggaaacacattttcaaggggtgaagtgggtatttgagaacaaaatttggtgcagcacataaagaaaatagttcagctgtttctgttttctcattcaaagacgagaagaatggagaaaaccacattcaggtaatgtatgttttgacacttttcagggtaacgttcttaggagctgcagaccagtaatattattttagaagcattttctatgaagctcttggttccacaacaccagactgacaagcctcagggacctgtcccaggttccgtacctggctttgctccagtccttgtttgcccttggcctctggaggagcccggagctgtctgcttaattctctgggggaggttgttctgtagttttcctcaaaacctgtctggaaccttgctcctcagaggttattgatttccacctgggaactggggcaaaaaactgctgtctctgacatcagaaacttgggagagtcgccgggggagggactttgtttctgcagctgccacgtattgcaaagagaggaacagttgcccgtctgattgactggtgtctagacctctcttagacttgatttctgaagggctaaggttctgaatcaatactttctctatttgactttctgtgggaaactgaggtaaactgacctctacagggtctagctttttgggctgtttctctctccttgttaactggctgtcagagtagctcacaaattccaggcccagtcaagttcatgtaggcttggacaccaggggagtagggtggtgggatgagaaaaggagggtttagtccttatcagctgaccttgagttttatgtctgtgttgggatggcgggtgcaggggtcctacctaggccatgacacataccacgtgtgtcatgggatccccatggaagggtgaagtaaggagcggctgaattttaaaggggattgtggtgttcctggatcgccgttgctatcattatgatccattgaattcatgataccatccaataagttcatatttacagtatatgcgagattagctacagctacattagctttagaagaaaaaatgtgtagctctttcgaaagttctaaacaaaacagtaccagccattatctgtgtagacaggtaggcagcagcatcctgcgtactcttgaagacaaacggaagctacttgtacatgcgctgagtgtctgtgctacacatggctcctggcaaaggtttccttcaagatttactttacacatttttctgagatctagatatttgtccaaaaatacctgcaaaggggaaaatagatccctgtttgtcacttcctagccctggtggcgagcagggaaaggtgagctctgattctctttggctggctgatctagaaacctgtgactcagttaaaaggctgtctcagaagctgggcagtggtagcgctcgcctttaatctcagcacttgggaggcagaggcaggtggatttctgacttcgaggccagcctggtctacagactgagttccaggatagccagggctactcagagaaaccctgtcttgaaaaccaaaaaaaccaaaaaccaaaccaaaacaacaacagcagcaacaacaacaacaacaatataaatcagagagagagagggagagggagggagagagagagagagagagagagagagagagagagaaagagagccccaaaggaagacatcctgagatgatctctggctttggcacacacaagtgattttgtgcacctgtcccccaactccaaagtctatataaaccaaatataaagtagtaccaagtaggttatggggaatttgatgttaaatacattcattgtcactcaaaaatgtttccatttttaaagaggtgttttgtgcattgcccagtctggtggccactggtcacatccagtctattgaacaacttggaatactgctcatccatgtagggatgtttggtagttgcaaaatatataccagacactgaagacagtattaaacaaaaccacaataaaacagcacttccctcaaccaaaccaactaaaaacccgcagtaaaagacgttgttaacatggatgagacacattacaccctgcagaggtatttggggtagaatgtgttagactttatttttgctttatgaagatgtgactaatacgaaatttaagattgcatctgggcctatcattagttctcttggataacactgccccagcgtttaggcacagtgttctgactttgcaatcataggatttcgttcctctctggtgtattgagggcctattgtatactcagctcagttaagcattgtgagccctgccatcaacaggaaggaaaaatgaaccttgtaaatacctgtccagagaagccttgctgagagagagagagagagaacacttggttctctgttggggacagcaggctgagggaccaacactttgcccctccctcatctggaggaatccactctgcaagtgtaaacttggctctagttgctttgcagtctctgtaaccattttctacattccagtttgtaatcatcagtgtcccttcccatcccataatgctgggtcacttttgagaagtcctgggagcagcagcccaacggtgcccctattaaggataagatttctggggactggtgactaacaatgaaagagagcacaaaaatgtgcctggatcccatgggtcctaggaaatgccaccatactgccttgcttcctggctctgtggtcagccctgcattagccttgcagccagtgtttggcaggaactccaggcctaggtccttgcctgtgcctgtacagctctggaagcttagagtacttggggttgcctccctgggagacttgctgcaatttccaggcgagaagcaccannnnnnnnnnnnnnnnnnnnnnnnnnnnnnnnnnnnnnnnnttccaggcgagaagcaccacagtgactggaatctgcgatgtaccctcctgtcccggtcctgtcgctggtgtaggaatgatgagaccttttgtcctgggaatgcattttccattagcatggtgacttctaatgaggtcgctctgccgagtgggataaaagcgtccattaggatgtgggggtcgcagagctggactgtggtgggaagccaaggaaaccctttgtcactctctggtgccttttctttgtgtgtgcatcggttggaagagcttgccttgacagtgaagaaggctgcatagctttttgcaggaatctgattaagtgttgaaaatttactcccctccccgcaggcccctggtatctggatcagtgcaggattgatcgatcctctttgtaaatggtggaaaaccacaaaaagggcaatgcaggcaccgcaaaaatcatcgcaaatttgccgtttaatattcctatcctcccttctcctgttggtttgttattgttaaaaaatgtacaccaaccctggatatacaagttacccatgttacttgtatatgtggtataatatcttcacaatgctacttttcagtgattgcttaatgtctactgggctgccatagcagtgtgctcactgtctgtgtattgtggcatggaattcttcatcttgcacttatttcagatcatacttgctgagcggctctatgcgtggggctattttcagtagctcagttatttctacagaattcattaactagaagcagatttcctgggtccagtgcggcgagtacataaatccgatcctattaactatcagcctattgttttccgcaaaggctctactgattcctacagccttcagggatgtatgactggccagtctggcagcaaatccatgtctgaagtaaaggaactgaatcatttgagagggtgattggtatggcactggtctagtgaaaatccatagggatttcctctcctggtctttgctggtgtgtatgtgtgagttcccatcctggcaatataaaaggactgatttggggcatcactgtgccatatccccagtatccaatggctgacagaacagagtggagatggccacttatatttggaatgacctcaaggcttttctcacaaatcctcagatgtggttgtttctcccattgcactggataagcattagcttgtatctagcagcacccatgggagcactttactagatgacctggtgtgtgccatgctgaccgaggtgggaattcatgttgctggagggtggagtcacactacacaacaccaaagagattactccacattttgaaggttatatgtcatgtagggaccagaccggcactctagtcctagaagagagcatatactagtcccaccttnnnnnnnnnnnnnnnnnnnnatccaagatttttaatgaagaatacaaacttaaatggtgtcgaaggagataaagagaaaagaaggatgcagtcagcatttcccagagaaggaaagaagggcagctgaccactccatgtccaaaggacagcggaagctgccgatggccaggcctgggaagccgatgtggaggaagcagtaagagaccagacagcaaggtcttcaaagtggccttgaggaaatgaaatttgtctaggccagcttgttttattgctgtgccttgtgcctgggttaggaataacttccacaagatatttcttcagtgctgcctctctcggcctctcaggttcccaggaaggaggatacaattcatatttgctttccatagttttatggctgatggcataatatagaacatcaatttcccatcagtcccaagtgactttcacctgttggatgcctttgacttcatgtcaaaaggatgagcaaatctcatgtaatccaagtagctgagggatccagttgttctttttactggcaactgtatatagatcaccatggtcccagaaccatgcgcaacagtgtatatgtaactgagacacattccacacaatgctttgctcatggtatacatgtccctgggaggttcttgcattgtggctgagacttgtccagtttggtatctggcatatgccatgactcctctacaatagcttcaaactatgtctgttggccttttttattattgctaataactggagattggactccacaccttgttcattttagataaatgctttcccaccgagctaccttccccacattttgaaggaagcagagtttcttctttttcttttttttgcgggcatgtgcacacgcatgatacatgtgtgcttccctgttataggacccacctggaaatacagatactcctcaaggaatatagtccattttctccactctacagtttgcttctagattgttctagaaaagcttgtgggttaaggagtatttcccagtgttggctttgtgggagatggtagaagcagtaagaggtgggacttaactggaagatcataggtcactggagtgtgccctcaaagaagtctgtgccaccctgcctcttcctttctcttggccatgttctgccaccaccaaaaccccaaaaacaatagggccaatttatggacttacaccttcaaaactatgatccaaaataactctgtctagtaagagagatgagcaaacacacaggcacattgggaaacacacacacacacacacacacacacacacacacacacacacacaaacacacacacacacacagaatactgacactgaatagtttcattgaagatgaaacttaagatcatgacagatttggcaaagtggtttcatttcacaagtaagaagaattcctttatactgaatacattcccattgttttagattgaatgcactcagattcattaagcacaggagatgattgctatgaaattatttccttttctactcaaacctggaacccacacacaaacactcctctcttggtttgcaatatcctatcttaaaaattattttaatttcaactgaaggctgatttcataaaggaagatgagaccaagaaagctctaaattgaagacattaatataaatgagctacacttaacattctattgatagtcctctactctgaaaggaaaatgtctataatttacctaaattgccttgaaaagagaagaataagagacttcctcctttgggtgcctgttccctgtgctcccctcataagcaggggagcagtgccattgagtagctgttatggctccacagctattagcttcattcccaaggagtgcgggctgatgtcagccattgcttacatctgaataaacatacatacaatgtccataataaaaccactctgagccacaaagtctgagattcaaagcgaattttaaatcaactaatatgcttttaaaaaggatggctggtggcttgtcctagcttgcttattttagggtacagaggtgagcagagaaaggggttaaagtatctctcactgatcatgaatattttattttgcttgtttttttttttcttattttttctttcatttgtatgtatgtcctctgtgggtatacacacatgaatgtacatgggtcttcaggtgcccaggaggacaggagagggcattggttctgtggtgtgaaagtcgctgtaagccatctgatgtgagtacccagattagaacttgggtccgtgaaagcactcttaaccacggagccctttctctaactctgttttactctctttatgtcaattataaaatattctttatgatcattaaacatattcatgagagtaaaatgtggaaagtagaaatgtccccagtttgtctctgaataactgtctgatgtgggttaaattattttccgttccatgcttatcaattcaattctaaagttgaattggaattaaattaaaaggactaagtaacannnnnnnnnnnnnnnnnnnnttggaattaaattaaaaggactaagtaacaagagacaggtgggatggcttagtggataagtcttgaatttgaaggacatcatatgtgtgtacatcacacacacacacaaataaatgggaaaagtttaaaagcatgtatcctaaagcagtcttcagtttaaaaactgtaacaaaaataagttgtgaattattctaataaaatccacacccagaaagccataatggctcagcattttgccattttgtccttggccccatctgcaaccctacctcttggtatgggcacactccaggactaacctataattagtgtgtgtgtgtgtgtgtgtgatttttcttggtcttgaatctgtaaatttttttttaaagatattgtgtgctttctgtatcttattttaatattcatgtttcaaaatagttttttgtagttcctgagaaatctgatggtagaaaataatagagcattgaaacacagttctatttaggttgtgcatgtatgtgaatgggcacagtaaagaaactgctgacatgcccactccatgatacagaaaggtttttattgtagttaagaaaggaagaaagaaagaaagaaagaaagaaagaaagaaaggaaggaaggaagaaagaaagaaagaaagaaagaaagaaagaaagaaagaaaggaaggaaggaaggaaggaaggaaggaagagcaagctaacaaacaagcagccaggggcatctggaagagtccagagcagagagaaaaaaagaagcagactggccatggcttgggctatctgtgaaagaaggaagaaaagnnnnnnnnnnnnnnnnnnnnnnnnnnnnnnnnnnnnnnnnnnnnnnnnnnnnnnnnnnnnnnnnnnnnnnnnnnnnnnnnnnnnnnnnnnnnnnnnnnnnnnnnnnnnnnnnnnnnnnnnnnnnnnnnnnnnnnnnnnnnnnnnnnnnnnnnnnnnnnnnnnnnnnnnnnnnnnnnnnnnnnnnnnnnnnnnnnnnnnnnnnnnnnnnnnnnnnnnnnnnnnnnnnnnnnnnnnnnnnnnnnnnnnnnnnnnnnnnnnnnnnnnnnnnnnnnnnnnnnnnnnnnnnnnnnnnnnnnnnnnnnnnnnnnnnnnnnnnnnnnnnnnnnnnnnnnnnnnnnnnnnnnnnnnncacgtgcacacgtgtacacacacacacacacacacacacacacacacacactcacacacacaagaatatcaggagtagccagggacagagagtgtagagagcaggagtctgaggtgagaagggccagagtggaactttcaaatgtatgacaagtacttgtgaacgtggactgagggaggctggagcctgcataggctttgatatacagccacaggtatatgttagtgggatcatatgtcctttctgcctgacataagggaagtgactccttttggcagatgggagccctttccaaaagttcccaaggaatgctggcttttgtttaactgccagaaatcctttactactccagataaagctggagtttgactcaattttgaagtgagtcagtaggcctgcccttctggggagggaatggggcaccccttggacttgactgtattagtctatagtctgcttcactatcaaaacatgcagttagagacaacagaaagttattctctctctgttctggaagcctaagtcagagtaccaaagttgatttttaattaaatatttttttatttcctgttttaaagactttctcatgtgtactttccccagcactgtttgtgtgtgtgtgtgtgtgtgtgtgtgtgtgtgtgtgtgtgtgtgtgaggggagggtgatctggtatttctccctttctcttttaaggatgcaggaagcttattgcattgggaatcccccccacctcccaccccatcactggttaggacttcagcatccgagtttggggagagatgcaccttaatctctaacaagatacactgtattctctagcagatcagacttgccctggagcctatggtggcttcaagattccctagcagagagcctgaggtgagccctcttagagattagctggtataaatggtacaaacaagacctgttccagcctgccaacagggagcaatggggccatgccagaggcatgccagacttccctcatttccccaggggtgggtttattggacctcaaggcctgtgtatttggagacacatccctgaaatatgggtgcttctgttgtagtgtggtatatcctgccttgacataggtcaatagcactgaggccgttcctctctggaacatcctaacagtgatgtcttgactattttattcaaagagagaagagaattccagacaaatgctttgaaagagataataattcttatagcgtcatccccttacctagcctcacaggaactgtctggagcaaaagacagccacagtgaaggagctgagaatcaacagccgtttaggacccagctactataaaggcttcatcttccaaaagccaggattcttgagagaatagttcttctagtgttgctgttttcactttcccttttgtttttaggtaccattatttattctactaagaaacccaagaaataattcaggtcacagcttagcacacaggctcagagatacataactgacgtgctggtttcatgaaatgacactaatattccctattgtctgtctcatgcacgctttgtgaagaatgctagttttcttaggattattactgacatgatgaaacactgtcaccaagagtgggttgaggaggggagggtatttggcttacatttctacattgtagtctatcattgaagaaagtcagggcaggaacctggaggcaggagccagtgcagaggctgtagtggtttgaataagaatggttttagcaccagggactggcaggattgagaaggattgggggttgtggtcttattggaggaaatgtgttactgcgggtgggctttgaggtttcaaaagcctactccacgccctctctccctctttgccagtggatcagggtgtagcccttagctatttctccagcaccatgatgccatgcctgccaccatattcctggccatgatgataatggactaagcctccaaaactgtaagtgagccccagttaaatgcttttctgtataagatgtggtcctggtatttcttcatagcaatagaacagtggctaagacagaggccatggaggaatgctgcttactgacttgttctccatggctttctcagccttttttcttatagaacccaggaccaccagccatccacaatgggctgggtcctctcccattaagaaaatgccctacagctttgtctgcttatagctcacttttctggaggcattttctcaattgagtctctttcctctcagataactattgcttgtatcaagttgacataaatgtagtctggatactggttatgacctaaggaatgatttgcaaatcagcacatagcaggtgcatgtattggaatattggggtttatagatccctgtcaagtactagatttctcatgatgcctttgaagggccagaaaatatcaaaactcttctctgtctctgtctctgtctctgtctctgtctctgtctctgtctctgtctctgtctctctccctccctccctttctctctctctcctattagaaggtgaacctcttttagcatggagatatagaagctttcaggcatctggagtaaaaaataccctataaaaagcaattctgtccaatctggctaatttacttgaaacagaatgggcggatttatgttaaatgtcaccaccaaaccatctgttggttcagtggttctcaaccttcctaatgctgggaccctttaatatagttcttcatgttgtgttgacccccaactataaaattattttttttttgctactgttatgcattgtagtgcaaatgtctctgttttttgatggtcttaggcaacccgtgaaggggttgtttacctgcaaaggggccgcagtccatatgttgagagccactgtatgagatgcatatggatgtaggtctttgatagggtagctcatgagatgcctctctgtggtaggcagaataatggtctccatacatatttaattcctaacccagaactggattatgttatgttcccttttgagaaaacattaagattgcagatagaattaagctgatatctagcttactttcaagtagattaccatggttacctgaaccgttgtgaggaggaaatgagggccaccatcgcttcgaagataaaagaggggcctagaaactgttaaaccattgctgtgaagatagaggggggcctagagactgtcaaagagaaggaggaagtagccctctagagcctccagaaagaaatgctgttgtgatgataccttgatactagctcagcaggacctgggccagactgtggaccagtgtgtaagacccgaactataagatcatagatttgtggtgtctgtgtgtgtctgtgtaggctagcggtcaaccttgggtcatttcttaggagctatctactttgttttctgtgacaggatctgttactggcttggaacttaccatctaggcaaggctgactggccagtaagccccagggatcctcctgagtgatggggtgacacatacatgccccatgtcagcgtctaaggatcaagctttggtcctcggctcagatgattactttgaagctctggatgtgtggtaacttgttacgctgcaatgggaaatgagtaccgtctgccactgctttgtattatatctttcataaaccaaacgcatgtttatttactagaaatgaaaatgagatgagagaacagtactgttttgaagaattcgtttttaccttaacgaccaatagccaccattcagacatccctgtgtggtgggagtgtccgtgtgtgtgccttgctggtgcagtagggaactatactaaacgtctgcgtgtgagatggcgaggtagttggtttaagaattgaaaattactgatctatgtactttttttttttgacacagtgatgtttaaaacttaaaaatggaatcatgtgacaaagcatagaaagcctatatcttactgtccctgctttgattttatttctgattccagactgctttatggttaagtttccctgcagtctgagctcgtgggcagacacagatgaaataggcgagaggctttgtgactctgttgaaggaggtctgaggcctgcattgcttgtaagcagcaatctggacagttcatgttcctcacctgccttcccataggctccgtagcagtggggtcaacagagtggcccaagccgtggggatctcttcctccagaaccccgagatcgattccactctctcccacaccccgtgcatggttcctgatctcgtgactgaatggaggcagcactctacataatcaccgtggacacttggtctgagtaccccgttcctcatcgtcttactttgagctcacagtccagtggtctgggcctgcacgggatgcctttgttatctgtgatggtttcatgtgagtcccgaataagctctctgttcaccccaaattttctaaatcaactcttagaatattctttccgaggcagatggctgaggcaggcccctgtgtgtctttcccacctcaggggcacctttggctctttgcaagcatcctgcctcctttctgacagtgactgtcactgtgagatgacatttgcatttagtcatttccatagcaacctggagcagggaatgacacttctgctttctaattataaactggctttgggaaaggacttaacaaacattcagttggttctttctcagtagatccagagatgcttggtaacagtgaaatggagctcaaatttacagacttgggaggaagtgatcatttcagaggccgctatggctcatggtggagggaagtacaggtgttgggtagcagcagggcacttggtgaggatagggtacggcagggagcttggctggagatgaaatgtctcctgttcatggctggttctgaacgggtttctttgtattataagatgcaaaccaaaccaaaccaactccatgttgccaaactgcaatagaaagtaaaagtgagtaattgctgacatgaagctgaccagaaaagacacggactatagtttgaggtgattattacaaaaggatgtatgtggttagaggcatccagtggagccattcatatgagtgcacttgtttgtaaattaaaaataaatcagtatgaagatgctttcctcctgggtaataacacatttgtctgtctacagatgtgggggatgggtttgaatgcctcctctgtcccttttccacggacgtcaaaatccacagtcgagttccttacatgcaagggaagcatctatgcaatccttctgcatacctgaagttatctctcagctgtttacacatactaatggaagtgctcggaaactagttgctattctctgttgctaagggaataatggcaaaaagcctacatgctcagaaagacatttaagagataattttaatctgtaagtgggtaagttctcaaatgtagaacttcctagactagtgatctagggggaaatcctcaagatacgttaagataaaacaaacaaaacaggatggaggcagagctgtatgaaacgcccctttacagcatggctggagggggttaggggtgagagaatgctcatgcacagaggactctccgggtgacaggcgaggacctgctggtaatgttgggctgtaaggtagttatcagctggcagctgtgtgtccacgtgtgtgcacgtgtctgccttaataatcgctaaatccatgcagtgctgcctgaatgcccagggctaggacctcaccgtggcctcaggtggcagtgtaggctgctcacatcatgctgattctcaccacccttctgtctccagttcgcctctcttcgtcacacacacattgttccacttctccttctctcccatctctcccccacttacttattattcttagcagttctctgtcctgcccatgcctcatgtcgatgggtgggggtcatctggatgccctccatcccctctgagtgttcgccgatccaactaatcctctccattgataatagcactctcttgctgagtcatagaacatcgagaactcaagcttggaccaacctggatgctttattcttactggctagttgtcatagagctcgagagtgttctatacgtgttctggaaagtgtattctacacatgctactggagaaaaaaagcatcagtagtctcacctagctgtgaaccccatgagctacaattaatgatcggctggcaagatatgcccaatgcaacagtggcatgaatattatagcagtaaccaatcacctttaattggttttaaagccttctcctcaagatggtcccccaggcttgttaccgttaactgggagataaacctgcttctgccttgcttgtaggccataggggagaatgcaccactattattctgctcaatggacagagtaattaatttggaccctttgtagctttctttgttttacaactcatgcaagatggattgcttagcatatccttaactgtttcaagtcaaatgtcttatcaaaggaattgaattagaagtaacctggatgctgcagtttagtcccaggcttcattctctggctgcttgcttaggccttcatttccagaactcagtgtgtgagctgtcaggagtgtcttccgcttgtgactggtgggtgatgtctgccatgagaaacaggaaagaaggcaacatcatttctgacttttcatttgccaaggtagctaggtgaagtcctttggaaatcttttttgtgtcaggtagtacttgctacttgctaaataaattctcattcatgttgctgttttggagtttgttcttttggaaacccattagtagaatcaggaagtctggccataggagcaaggctgccacctttcatactcattcaggtagaattaaaacaacaaaggttcaaaagcctcctttctgaacctttgtcattactcttatcagccttgacagaactggcaagtttctctaagctctccaggtagtaaattgcgtggccaggggcagcaccaggttcgtgcacgcaggttcccaggttttcagatgcatcaagtcctttaatcacaataaccacacaaatatgtgtctactcttgttaccatcctgacttgagctcagagcagttaggtgacttgcctcagtcactcagatgctagatagcggagcctggcttccatctttgggctgtctggatttggctcattataatccccgcagtgcctcaagtgcttgcctacaacacagagctctgtatgttcttggcaagttgtatcttttttttcttcttctattttcccagctgtaaaaggaaagattgagcatcatggcttacatctcaccctagctccgattgacttgattctcagccacacacttgggatgcccttgagcctttgtaggatctactgcaagatcggataatggtaaatgctgctggaggtgtacagatctcagtgagggctagcacctcggcacactccggaattagagcttgtcaagagccaaggacttatttccccaaacaattagaggacaccagtaattatgtttaattgcacactgagcagtgttcctgttgtcccaacccattgttttaattgtgcttaggagcagcaggctattattttgcagtttgtgaggtttaaaatggctttgggtggcagtcagaggagcagaagaggtaagcgcacaggctctggaattgggcagattttgtgcaaatcctgaatctgccacttgcaggcaggcttaacttctataaatgatggcctcttattgagaataacatggcgacaacctcagggttgtgtgaggcctagctagcatgtatgtgaggtgagtggatggcagtcactcagacttgcctaggatgattatgaccaccatcatcatcattgtcatcatcatcatcagtagtaattattgcttttctttttgaggccaggttttgcttatgctgcccaggctggtcgtagtcccaccctcctgaatgccggaactacaggtagcatatcccgtcttgtcttagtttgttattattgataatgaggtgactacaggctttgggcatattccaggctccagccccaaatgtgtggccccatctggggtaagtatggactccagcctgtacggagtgctgtggttctgtggtttttgacagtagagtattcattatttcttctgtttcagaatgttgtctgtaatctcatttcctaagggtatgtgaaatggagctaaggcattcagttaaccactgaagaaagtataaccataaaataaaactcttgatcaaaaccttgggggaaaggagggaaaccttagcactcgtggacaatggtcttgatggttgatcattttaagcagtacatagatgggaccttaggtaacatgggagcataaagggaaagagactccttttgatttctctttcaggccctgtgagtgtatcaaagggataatcagcttactgataatctttagtctttccttggaacgcccctctttatagaagggaaggactctgaggctgggagtccatgttcagcagcgataggaagctacactcattaatgttgtattgtttgcattaaagtctcccattttagcacctaattattttcactggtgatagtcatatgaaatttccattggcaatatatttaaggaagaacaatttaaggaaacattagatggggctggagagatggcccagcagttaagagcaccgactgctcttccagaggtcctgagttcaattctcagcaaccacatggtgattcacaaccatctgtaatgggatctgatgccctcttctagtgtgcatgaagacagagcactcatatacataacataaataaataaatatttaagaaaaaaaagaaaccgttaggtgaagcgtagaatgagttatatgcggttacagaacagcaggaggagctgtattaaagggccacagcattagaagggttgagaaccatgggctaggaggtagggtctagagtgtgtgatggagcagaggcagatgcgaagcttacgtattttagagttacagaagtgtgcatgagaggaatatggtgcaaataagcgtccctgagaggctgtgaagagttcaggggcaaggaggtaggaggacagagagaaggatgaggccgtctctgaggccagccgagagaggggcaggacacctcttttactggtaaattctgaaagtaaatattagccggattcttgatgttaaataacccagcagaaagtgacagtggagattgaggttggttgcctggagggatgcaaatggctatgagagacaaggaactcagtgcatactcattggtcgttttgtagtcccagggaaggatactcttgtaactgactggcctcttccaaggaagggctctgcacactagagagttgagcggttcgagcggttctgaggaaagccagtctttgcaaagtatcagtttaaatctccccactagtccactattgcttcagagagcttttccttccctggagctgatcagcgatcttcgtcacagggatgatctacttggacatgtggcctgtgactggcaactggccactgtcatattgggggcttcaccttgggggttgtgaagtcaagagctttagacacagtgactaataggcaccctggaatggaccctgttcattgcatgacaggctccaagctttgatccaggaacctaaggtctcttattgtctagcttggtttgtgctggggctggggctggggctggggctggggctggggctggggctggggctggggctggggctggggctggggctggggctggggctggggctggggctggggctggggctggggctggggctggggtggtttccatgagtgattccaagtctggggcttcttgacctcaaaccaagtcccatgacatcagtggaagacggaagaaagcaggaaggagtgggaacctctgaggatctgactcatggttggcttttgtgtctgagtggcccacagtgagggaaggaaggggaatactgtgtacccagccctgccaccttgctcagatgcttcaccaggaaatgaaagagtctctgggtcagcagaccctctcgggttagaaatcaatgttcatctggctaacggagagaccaatccatcatccgcagactgggaggcgcgatcggaggtttcgtcagccttttgatctcagatctgtccagcctgttcagtctctgctgccactgttgcagtccacagctttgataggcgctgtccacagtcacagatgtggaactgatctggaacaggcatccacgggctcaccagggatggacataaatctttctaggcagcttacatgactgtcttagaattcttatccatactcatttcccagtaacttggttgggcgtagactaggtagaaagtcccagctgccgtgtgcaagatgtcctctcagagaggagtaccgctggaaagagggctttgaagcaggtgggctgcgtgtcagagaagggatcagaagaggagtttctggttgctaagcagtttcagacaccacagttctcctgagtcccccaagacccaaatgtctggaactttatcctatcctcaccggccacgtggaccgtgaagaccttttcttctaccattaggagagatgctgagcagtaatctcagcttaactttaaaatatcttgaacaagcaccaggcaccctgcaaagtgactctgacccacacagaacagagttgggcccacgggccctgcttgtgatttctaaccctttcatcacattaaagctccatcctgaccgtagcagaacagaagaggcaaggacagactgttccatgccacacagaattagataacaactttatcatacagccacccgagcctcagtttctcccactgtgaggtgggcatcctattagctagtccgtgggatcatccgaggattcagtgagctcgtttctttagctcaccccactcatgctaggtcccagagcagctcctgcttagccttctccatcactgtcgtcccctctctgtctgtagcctccgtcataaccgcccctggctgaaagtgctgcctagcactgccaacatcctgaatgcctcctcaaaatagaagcttacttcatgtgacgcttcacatttttaaaactgacaccttttttcatcagacagcactattactgaataatacaatggaacgaatctgtgaagttatctacataatgaggccagtgtggcacgaaagcagtgaagtccttaaaaacaccgtctgaattttcacctatttatagagctttgaagtatgtgcttctcgttcctgcttctttgcctttctcatcagaccctgaacacttggtccctgggaactgtctcctcactgttggcttcctagaatctagcaggctgcctgaccagggagcatggcagctacatgtcaaatgataaagatacttgtacttagactaatttgccaaacaaaatggaactgagctaggatctggcatgcagagtggtatgaaaaatatattggccaggtcggggctgctctagttactgtgaaggtctctctgtctatagagaggacttcatattttgcacagactgtggctaaaggaaaatgggtgttagagtcagagacactgagctgggtatggattgccatctacctgttgactatattagggagttgacctgctgtccctgtcacatcacaggtgatgatatgaggttcattgctgtaggaatgtaacttgccaacttgtggtatcccttggttctctctctcccttgtttcctgttgacacacttgaacttgtaggtggaaagaagagagacaatctctatagaatgtgtaagattaaaatggacagcctttcttgtcccagtcagcactgttgctagaatgatagtgacttgtggctcaacatggtgaccaattcattaggttcctagtttctacaagagcttgtgtcatggttctttgttgttgtatttgcctcgttgcctccctcccaaccccacctagtcatctctgtttgccaaactgcccagctctctcaggattcctaccattgcttcctgattggtcttaatgattattttattttatagtttctattcctaagcatcaggccttcacagagttgcaaatagaaaccagagcaggctattcctttgcttaaaagaatatcacagaaggatgtactgaggggcatctcagcactgccctctgagctctccacctgctcctaccatcctttgccttgctgttgctggatggagtgatgcactttgcagcagatcaaatgttccttaagtacgactcctttcctgtcacctgggcctggaacgttctgcccttgatttctcaggctggccagccttcaggccttggttctgctgtcacatcctctagagccatggtacaacctggcagaaactccctgttacagttatccacgcagaagtgctgaattgaaacgcagtggacttgatctgtgtggtcagaagtccagaactttgggaaactgtgggctctgaatcagactttcttgccgctgttcctttctctactgtgccaatgtcaatcaagtattatttctgacctctaatttctgtgtcttaagatgggtgtttaatattcaccttagagtcttgctatagttattcaagatggaagtctccttttggcacatagactttctattggcagtattttggagtgacattggaaatgactatattatttaaatgtctgtaatgaatatttaaacactgcaaggttccactcagagatgagtgaggtcagaaacaaattctttttactatataatttatttttatatgtttatattattttttatatacattggtgttttgcctgcatgtatgtttgtgtgaaagtgtcagatcttagacataaagacatttgcgagctgccacattggcagtaggatttgaaccctgctcctctggaagagcaggcagggttcttaaccactgagtcatcactccagccccaagaaacaaattcttaactaaacttctctgaaagttgttggtaacatctttgcgacatccacagtgattttatatgccttttaaagatggtttgttactaaactcaaatggtttccttactgctatgacaggggcctgagcagttttgaacaagttattggcacaaggcaaaaaggatctccttggaatgctggtgaagtaaggtgatggatggagtgacatccggagagaagcatcctagtccagcctaaggctccgatcgatcatccttaggcaaaggggatgacagggccttaggctaggtgaggctggtgactgggcctctgtatgctgctgtgatggtatgacgtggggcattgggaaatggagcagttggtttgctcagtgaccaggtcatgatgtccctgtaaaccttggccctgtctccatatcttcatctcagtgttgttacttctgtctatttatctaccagatccctgtgcaggcctaaagaagaatcagtgatttcacaaaagtggcctttgagtttctggaaagtgacccaggcaacagctgtcatcacaacccacacatacaaagtattgtctggagcaaagctatggggagacaaatgagacagtgctcagctatgtaacctctgggatcagtggtttgaaagtcacttaaaagtgagtgtaactgaagggttccgttagactgtcccttgtttacatgttctcaaaccaacatgggaagcaagtgatgtaggcttgtgaccctgagaaagccatgggctctctgaatctaactgcttcctgtaaaatgcagagtagcaattacatgaaagtgtggttacttagaaatgtacacagcagagggactagcgtgctcgatacaatatgtcagccctgtcttaccttgcgctgtaacccagaatcttgctttctttccaccacacagtgcttccagatgcctgctgtctggactagactgtgattagagaccccctggaggaggactgctgtggatgctcaaaggacagagaggatacttgttaggtgaacagatgacagcaattctagaggtcacacagctgagcagtatgcatcccactggtttctaagaagaggaagatggagggacaaagaatctcaaagaaagacgttatccttatgttggaaaagagaacatttggcatgagtcttaaaggatggcctgaatttttgacagacaaggtcaagctgttagatggcgttcaaattaaaggggaagatgcaagcagtggggtggcagcagggaggttgcaagctcactgccagatgtttgatgggcaagaacccacctggcaaacagtgagagcatctcagtgggctgtggggctcagcaagttgttgagcaccttggccaaggaagatgcatttggaaaaggatgcagaggtgtaccgaagggaagggagagtacatgaccacttagaaggcttgtgcggtggtttggcaaaaagtagtaagagtagctgagatgtaaggcaagagagaccagaggcatggaggaccactctgaccctgatgtggagaagatggccctgaacgtgtcagcctaggcgactaggggtagaaagaggagatggagaggtgagttgagttctctcttcagcctacagcttctcctcagcatccgcgcaggactggcttcaaggtagcttttaaacttcaaacctcctagatccacgagtcctctgtgtgaaatcatgtagtgtttgcaagcagcaacacacgtcttacacttcagatcatctctagattattggcataataaatcatatttgtttctgtctgacaataactggggtctggagccctgagttagaggtagactttgtgtcttctcttgagacttatggctgaaaccacagatatactttaaagtgcttccagggcagacagaacaaaacagatgatccagaatgagagagagcatgatgacatgatggaacttggattgacaagaaggagaacgagcgactgagatagggtggtcagaagaaagatgccgagctggcccatacagtatctggcatccagggagatggcagtttcaacatgctgactagagctcagaagcaaacagttggtttttcatagttctgttaaccaatgaatctgataagtgaaatgctgctcctggctgaagattggaattctgattttgatgatacattcattgtttaacccactagtgcttcaaggagtccagtccaggatcagaaaagagacaggcaaggcagagagtactgggcggacttgaattttgccttctcttgtgtgtggctgcctagcctttctagtactttaagcattggaatatgaggtgctttgtcatcaagtaaaaggtaaaataatttaaaaggctgatgatcttcccatacttgagaggacttggatgtttttgtttagaaaactggttttcattcagggacactgatttttgttaatagagatttctgcagggagagggactttaactactttatctgttgattgggctttgcaccactgcactggggaccaagtgtcctactgtctcctgagtgaggatgccatctcactgggctagaatgtctaagcttcatgctgcccatattcagcctttccatcctaaatgtgattagctacagaagtcctgcatacagtttatatccatcagccttccctttcgagcatccgtgaagcctctctgtgtgtaagtgtgtgtgtgtgactttgtgtctgtgtctctgtgtgcctgtgtgtacctttagccatcaaaacagagctgcccgagcctgctaatttctgctggttttagttagtgtcatcttcataggagacttctgtctgcagttatgaagttatcttaacaggaagagcaagctattgcattctgagttatgccctgtcatgttctgaacatgttctattatcacagcatgttagagtcagaggaattccacatttcatgttctatagaggaggaggcctagaggtaagttgtataaggtcacaatttggtcaaatgtgtgaaattcttagcaaatccatagctgaggaatatatgtgatcctggagggacagtgacaaaatgcctcttatgggtggtcttatgggtgggaggcttggcatggaaccagaattctggtgcttatataagctcacctcaccaccttccactcgtccgaggaagccattcctttttctcagaaagggaggctaacgtttctgtcccatggctcagaaaagcaaccagaaatgaggcacctgaacacaccatgagagtaaagctgtcatccggcatgctgggcaattattactatgcgagctgtttcccatcagtgaggaaatgagttagtactatttctccgctctggtcacctgcagtgtggcttgctgagctgctcaggtgatggtctgggcacaagctctcatatcagcgtcacgtgtacagccacatggctttgcggtgtgtgccgccacaggcttcagccgcctcagactgagtatgtgttgctggccctggcagctcctgcgaggtcgccatgccctcaaaggaaggtagacatttcctgttattgtgtatctggcaaaaatgatgtctccatcttgtttttagtgaaaaaaaaattctgcctctcctgtgaggaaaaaaaaaatattttcccacagacttgacttggtaccagatctactgaggtaaccactgcagagatttttttattcccttctccgagtgtacatactcagtgaacagtgaacccttgaagcctaaagcttgccttctctggagtctcccatgcctgaggcagaagctacttgtgagaacattagagactcctgcctcccattactattgccatgtgttagagctacacagattcatcattttcagggaaaatggaaagcacaggtgagtgtcttggctcactagaatgagaggcacaagcttcaggggaaggaccagccattccgacctcctctgttgtcctctgcatcctggcaggtgggagaggaaggactgcggtttgctttcattggaagcaaaacatcaccatgtctttgaaacagttttcattattctccttaaaagaagtcatccttctgtttccagtctcctgttagccaggcgataattctgcatttctttattatcgctctggcaatgtgcctccaagaatattcttccgtagctgtctgcgatcctgacagggtctgtgtgtccacacagcagggagtttggcaggagggagagaattgcagcctggtttcctgtaggaagaaggcttacaagactcattcttgtgcgctgcttttgttcccttgcggtctgtgaagtggtgggcattgccttgccaactccactgggagccagccgggcactgctttgtggacgtctgcttcattattgactctcctgggagcagcgttggcttcagccagcatgggccccagccaccttcctaagggcagagagccagtgtggggagggacagcagtgtggatgctctgtaggttagtgtttctggctgcattcagagcgtggtccatccagtgcaggcaggaaagcgagaggatgtagctggagtggagaagatagcctggttttatagtcctcttgttaggcagctaaagactggtgggccctggggaggtgtgacaaggatggggatgagcgagctgctggtcactactaggtatggggagtttgccttaatatgcagagccctcctccccttgccttgggaactttctgtcaacttcctgacaaacaagagggtagatgaacagtaaagagagatgaatgggtagaggaagacagggagcccctaggactattaaaatctagcgttggtggaaggagaatgtagactttcaaagagatacagctcatatctcctacccctacatcctataatgagatcctagcatcccacttctagcctccttggcacccaagttccatgttagtccagggccctcggcagctagtgggccgcttttgcacgaattaggggttagtgatcttctgggcaggtgtggccctacatgtctcctgcttggcaggtgaccagcacctctgtgaaggaaaagtcacgtcgttcccccccccccccccaaggtctagggcaaaactggttgatgttgttttttctttttgtcttgatacaaggtcttgcagtgttccgaggctggccctggatcttggggtgaggtgatctcgctccagcctcttgaattgctggcactacagccatctgctattgcactggatcaactcagtggattttaacaatgattggagtttccactcctcccctctgcacttccttaccttgcctgtgcaccttgggaaatggccacatgtttggcagtgattttactttgcacccattgaattcccattgcacccagtgcaggtgtaaagtaaaaggcaaagaggagtgaagcgtctggggttttaccttagttggggttctctagaagcacaagggaaaccagaataacgtgcagagtactttgagaggtgaacctaagaaaccctgaagagggaagtgaggcagggggcaaaggaagccctggggttgtctctttggagttgctatagtgagcaagtagaactctaggggccagttggaatacccacccagtgaccccttcacaccaattctggctcagacagctgaagcactgtcccccaagttttatctgtcaggctgaggattgctgggttggaagcctagacatcccttccagcctgttcgttaggagttctaagagcaccaccaactggcacagccaacagatcaagggatgcaggagccagcagtggaaggtcaggccagtctgtaaagactgggaggtgagtcaggttcctagaactctgcttcagggtggcagtgggtattttgctcatgtgtctcgaagcccccaaagctatagaggaaagtgattgagtctatgagtgcctgagtcagacccagttccttacctttcctgcatgggctttggaactgaacatgccactaattattctgaaataatgtagacaattgttctcagaaaaaagctactgttttgtgtctgtgccccctcctcattcttaagagctgagccttaaggcctggagtcatgggcctgtgggattgcgggagcccaaaatatgattccatatcaagatatgatttgggtatcaagagggcaacagggtgtcaagttctgagcaggttcagggaaagtttcacttttctgtatctctcccgtgtaggctcatggcgtgggaagtttgctgcaattctggttcttggtgtaagttggtcatcaggcctcaaaccttgcaatagagaataacagtgttcccatctcgagtgtcttctctagcaccaggctctgtggtagatcctctatttgcatggttgtatttgatgctcactggaagcctgaattgtggcttctgttggctctgcaggagaactataataaagaagacagacaacagaaagtgttggcaaggctatagcgacaccagaacctgcatacactgctggcaggaatagtaaccagctcagtcgctttggaggataatttgccagttcttcaaagctaaacttaaatgtagagttcctatatggctcagcaggtccactcctagatacattcccagagggaacacacaaaaccttatgtgtgaatagtcataatagccccaaggaaaatcaacacagtggtcccatctgttaatgaatggtacataaagcattatatatccatccagtggaatattgtttggtcttgaaatgaagccatgatacatggtggatggaacttgaaacatcctcggtgagggaggctgctcagaagaacacacactatgaccccttttatgcgacatactgacgacaggcggttctgtgaagtctggaggcagagctagtggttgcctagaacaagggagaatgttggggtgactgactgctaatccagcaaggggttcttctggggggtgataggaaggctctggacttagatggtaatgtgggacttgaatgctccctgcactgtattgcacaaaggaatgaagtttattgtgtggcaattatattttaacaaacaagtcctcaagcttctggtgacgatattcatgttggtaaatgtgggcatcaatactagcctaaggactaaggaagggcttcttagctaatgttttgggtatatcctttcagactgttaggagagcccttcatagtttagtttctcctcatgcacggtaatatgacgctctcctgatgtcccagtcgtggggggggggggggatctttagagttcttcaattaaaaccaaacccgtacaattttcagaaacaagtacacctgtccttccgtttgttttccacagggagaaagtgctttggagggtggacagtagcttccaaagtgaggcagagctgattagacttcggccttgtcttggttttactgctgtgagcagacaccacgaccaaggcaactcttataaggacaacattgaattgaggctggcatataggttcagaagttcagtcagtgccaccaaagcaggaacatgacagtgtccaggcaggcatggtgcaggagaagctgagagttctacatcttcatctgaaagctgccagcagaatattcacttccaggcagctaggatgactgacttaaagcccactcccacagtaacacacctaccctaccaaggccacaccccccaatagtgccactcgctgggtcaagcctattcaaaccatgacaggccctgtctgtcttgttctggaaacagtgccaagcctcatgttcctgggaggtgggctgaaggatgttgctggctgtgttgcatgcaggctcatggagatgggcatcgtcagggtgagcagatcaaaggctgccacacatgtttggctcgattaaagcgcctacagcactggctctttgctcattggtccaattagttgtgtgtactcagaaatcatttagagttgactgggaacagaacgaggaaatattttaagaaagggccagagactcatgccttttgtctccttgattcctagtgtgaacgatttaaagcagagattttagtgttctagggagtggcccagagcctggaccccaggcatgcactggttgcctacctggctgccctcttgaggcgtgatctgctgcctacctagctgcttctgccagtgcctcttcttgtgaaggacctttgggtgctgaacaattccagagtatttcttaatattttttctcactatctcatatgaagcctacatctttttccttgcctctgattgagtgctgtctgtctgtctgtcttgcttttctctgttggtaagagaccttgccataagcatggttacctgctttcttgcatttccaacttcttcccagttctcaagtcctttcctctggctccaggttagtaccatgcccatgcctaacactgaattgccctattgtcttttgctaccacactgatcaagttacttcattctttcctattaatctcaaaacacagtggcttctcctgcttttaggagagaaaaaaaatctcttaggaagacagcaccgtgtagaagaagaacactggcaaatcaaggtcacagaggtacttctgcagagcacagagctgaaaaggagcttccactttgtgacacacgggtgggtggtaatatcttgtaaagtcctcatggggagtgagatggagcgtaaatggccggctcggacggtcagcatggagcaagtcagttgaaagaatccctcctcccctgcactcccttcctgcaatttcgggaatgaagtcatctaagcacctgtgactaatgattgctctcagcaaccagcaactctcagcggaaacagtagcctttccatccctcttaatgaagatagggaaaacaaacattcaaattatggccactgttggtcacaactcttgttcagtctttaagattgttcctgggtttcttaataatgtatttataagatcaattcattttctgtgccttattctcgttactcatcttcggaacatcctcttccctttgtctttcgcagctgagttgcttgcaggcagggagcggttcttgggtaacgggtcaatgtattaataggcaggccatgtggttcacagacattttgctctcaacaacttgggaggaattctggtggcatgatttttgtttttaattttaaccagagaagtgtaaggaccatctgctaatgttttttttttgtatgtgatcccggtaggtcatttgttttagtattctgcgcctgtgcagttgcactgcagggcatggaggcttcgtgacagcggtggcaagcttcgttattggtaatgagtgtggagggtgccatccgggtccctcgtataatgttcagtgggtttacctgtctgcttaggatttgcaacttctgtttcagtgggaaactttcattgcagtgaaccatttggttggttggaaatgggtgctacactccttggcaagaagcaaaccaactttttaggtgataattatgtcaatgtgaggtggggttgcttgaattagaaccatgaaagccctgaaggatgaaaaatatgagatatgaagaatgtgctggttggatttttgccaatttgactcaaactggagtcacctgagatgagggagcctcaactgagaatatgcgtccatcagattggtctgtgcgcatgtctttgggagcattttctccaggatgtttgatgtgggagggcccagtctaccatggacagtgctacccctgggcaggtggccctggcctgtataagagagcaggctgagcaagtcacagggagcaagccagtgatcagggttcctccttggcctctgcatcagttcctgccttcaggttactgccgagctcctgccttaactccccttgatgaccaactctaacctataagatgtaataaagttgctttacatcataatgttttattacaaaaacataaaagcaaattaagacagcagttcataaggggtagccaaatgcaagtttgagctgaaggactgtgaggggagggaggttgataacaaagactgagaagggagtgaatagggtgcaggaggttccactgggctacactgcaggagagggagagtgcaggcagccctgggcaaagagcctagtgtgtgagtggaacaggagcctcaggagggtatcaagtgaggaagtgatgtcatcttatttttagaatacttactctggccagtgatagaaatgggttattagggatgaagaacaacaaggggactggctaggggctttggctgtttcatatcagagattgatggagagaattgtgtggtatagatattacgaattgataatgattcaggctatatcccagatgggatgtctggcatacactgagccttataaaaatactgcgtgtaattatcggggtgattgctgggatatttggatacggagagcatgatggttttctttattctagtgaagtttgggtggctaaggggcactcatagtggtggaactctctagaaggtggaactcctgaacctcaattttagatgaaggctgagatagtcatttcaatttcctaaaagtcaagcacataaccaagaggcttgggtttaggccagttcttgactacttctgtctgaaagagacgccagcagaggactctggcgtgtgtcatcagagaagatggagaggccatgtgctgagaggacacctgcagggaaatgagtcttcagaggctggtgggtggtggccccatccagaagaagtgccagggtccagcacctacacagcaatgttatttgaatttttttcctctagttgtaaacggtcaagtaggtgggtttgttgtctgcctacagaattctcagccattgcatcacgagaagcactagacgcttgtctccttggggattctgggtaagggcctctgttcttgttttgatcagaatttgtgagatattcttagtagaaaaatgtggggggaggggagaggaaaggagaggaggggtacaagtcagttctctgaaaacattcaacaacattctaatctttctcttttaatactttaaggttcatttaaaaacaaaagcctgtatagaatactgagcgcatgaaagactgaaatgtgtacatttctaactaacgtgctagctctgacaagatggttcctgtaactaatgattttcagagttttatctttctcagcgtcaacccagccatacaatcttgcaggcagttgctttgggggatttaactttaggtcatttaaaagtgtcatgctgtttgtcaactgataattgataatattttaaaaggggaataatgaattcttgtcttccatctctcttaaaggaaagtataccacattatagcaagcatttaagctggaaggtaaacttggggcatcccttctgtgtgtcccgtacaccatcattcagtggatcatttttcctgctacattaaatatatcttctctaaaactgaaagcagggtcatctcgctggtgctccatcgaagctaggagaaacagaaaatttgttttaagtttctagagggttcagtggacgacttaggaaaattctgtaaatatttattctcctgtgttttcagtgcatgtgacagaccccagggccccgtgtgtgccaggcaagagctctgccactcagatctacccgcagccctctgtaaatgcttagccttacttttttggtatcggctaaattaaaaaaatttttaaaaatcattttaaatagtgtttatgagttggtgtatgtgtgtgtgtggctatgtatacctgagtattggtgacttaagaagccagaggagggtcttggatcccaggaagctggagtttcatattattaagtgcctgacatgggttctgggaactgaacttgagtaccctgtaagggtaagactcattctattattattatttttttttttacactccagattttattcccctcctggcccatcctcctctgactgttccacatcccatacttcctccctgccccctgtcctcacccccatccccaccccaccagacctttaaactccctggggcctccactctcttgagggttaagtgcatcatctctgaatgaacacagacctggaagtcctctgttgtatgtttgttgggggcctcatgtcagctggtctatgctgattggttggtggtccagtgcttgagagatctcaggggtgcaggttaattgagactgctggtcctcctacagggttgccctcctcctcagcttcttccagcctttccctaattcaaccacaggggtcagcagcttctgtccattggttgggtgcaaatatctgcatctgactctttatctgcttgttaggtcttttagagggcagtcatgataggtcccttttttgtgagtactccatagtctcagtattagtgtcaggccttgggacctccccttgagctggattccactttgggcctgtcactgaatcttattttcctcaggctcctctccatttccatccctgtaactctttcagataggaacaattagggttttgactgtgggatggcaactccatccctcacttgatgccctgactttctactgggggtggactctataagttccttctccctactctctggcattttatctaaggtcccttcctttgagtcctgagagtctctcacctcccaggtctctggttcattctagaggcttctcccaacctcctatcttccgaggttgcctgtttccattctttctactggccttcagggtttcagtcctttttcccccacccgataccagatcaggtaccccccctttccctcccatgtcttccctctctcctccttgtggttgctttcttctctctcccaagtgggactgatgtgtcctcgcttgggccctttagcttgttgacctttttgagttctgtggacagtatcttgggaattctgtacttatttttggctaatatccacttattagtgagtacataccatgcatgtccttttgggtctgagctacctcactcaggatgatattttctagttccatccatttgccttgaaaactcaggatgtcctcgttcctaatagctgagtactattgtattgtgtaaactaaccacattttctatattcattcttctgtcgtgggacatctgggttgtttccagcttctggctatcacaaataaggcctctatgaacacagtggaacacgtgcccctgtgacatggtagggcatcttttgggaatattcccaagagtggtatcgctgggtcttcaggtagatctatttccaatttttgaggaacctccagattgatttccagagtggttgtaccattttgcaatctcaccagcaatgaaggggtgttcttctttctccacatcctcaccaacatgtgctgtcacctgaggttttgatcttagcaattctgattggtgtaaggtggaatctcagggttgttttgatttgcatttctctgctcactaaggactttgaacatttctttaggtgcttctcagacattcgagattcctctgttgtgaattctcagtttagttctataccccgctttttgatggggttgtttggttttttggtggttagtttcttgagttctttatatattttggatattagctctctattggatgtggggttagtgaagattttttcacaatctttaggttgctgatttatctcattgactatgtttttgccttacagaagctttctagtttcatgaggtccctcttatcaattcttgatcttagaatgtgagccactggagttctgtttaggaaatttctctctctaccaatgagttcaacactcttttccactttctcttctattagattcaatgtatctggttttatgttgaggtccttgatccacttggacttgagctttgtgcatggtaataaatatgggtctattttcattttctacatacagacagcccgttagaccagcatcatttactgaagatgcttttttccccccattgtatatttttggcttctttgtcaaaaatcaagtgtgtgtaagtgtgtggttttatttctgagttttcatttctattccattgatcaacatgtctgtctctataccaataccatgcaggttttatcactattgctctgttgtaaagcttgaggtcagggatggtgattcccccagctgttcttttattattaagaattgtttttcgctattctgggtttttgccattccagataaatttgagaattgcttttctcatgtctttgaagaattgtgttggtattttgatggagattgcattgaatctgtagattgcttttggtaggatggccatttttactatattaattctgccaatcaatgagcataggagatctctctattttctgaggtctactatttctttcttgagaaacttgaagttattttcatacagattattcacttgtttggttagaatcaccccaagatattttatattatttgtgactattgtgaagggagttgtttccctaatttctttcacagcctgcttatcatttgtataaaggaaggctactgatttatttgagttaattttatatccagccactttgctgaagttgttaccaggtttatgagttctctggtggaatttttgggtcacttatatatactatcatatcatctgcaaaagtgatacttttatttcttctttgccaatttgtattcccttgatctcttttgttgtcttattgctcagctatcattttgagtactatattgaatagatatgggaagagtgggcagccttgtcttgtccccgattttagtgggattgctttaagtatctctacatttaatttgctattaaatttgttggttaaaactgttggtttgcagtaaattgcttttattatgtttaggtatgggtcttgaattcttgatctctacattacttttaacatgaagaggtgttgtattttgtcaaatgctttttctgcatctaaggagatgatcatgtgattttttttctttgagtttctttatatagtggattatgttagtggactttcatatattgaaccaactttgcatccctggcatgaagcctgtttgattgtggtgaatgttggttttaatgtgttcttgggttcaatttgcaagaattttattgagtatttctttactttttatttctttattttttcgagacagggtttcttcgtgtagccctggttgtcctggaactcactctgtagaccaggctggcctcgaactcagaaatccgcctgcctctgcctcccaagtgctgggattaaaggcatgagccaccactgcctggctattgagtatttctgtgtcaatattcctaagcgagattggtctgaagttctcttttttagttagttccttgtgtgatttatatatcagagtaattgtggatccatagaatgaattaggtagtctttcttctgtttctattttatggaatagtttgaggactattggtatcaggtcttctttgaaggtctgatagaattctccactaaattcatctggccctgggctttttttttttttttttttttttttttttggttcggaggtttttaatgacttcttctatttccttatggtatatggacctgtttagatagtttacctgctcttgatttaactttggtatgtggtatctgtctagaaaaccatccatttcatctagattttccagttttattgagtataggcttttgtagtaggatctgatgatttttaaaaatttcctccgtttctgttattatgtctcccttttcatttctgaatttgttaatttggatacagcctctgggtcctttagttagtttggctaggggtttacctatcttattgattctctcaaaaaaacagcttttggttttgttcattctttgtattgttctctttgtttctatttggtttatttccggccctgagtttgactatttcctgctgtctactcctgttgggtgagtttgcttctttttgttctagagctctcaggtgtgctgttaagttggtagtgtaagatctctccagtttctttaccagggcacttagtaaatgaattttcctcttagcactgctttcattgtgtcccataagtttggatattatgtatcaacactttcattaaattccaggaagtctttaatttcttcctttatttcttcgctgaccaagttattgagtagagttgttcagtttccatgtgtatgtgggctttctgttggttttgctgttattgaagaccatggtgttattatttaggtgttgttatttaggccatggtgatctgataggatgcataggattatttcaatctttttatatctttggagggttgttttgtgactaattatatggtcgatattggagaaggtaccatgaggtgctgagaaaaaggtgtattcttttgttttagggtgaaatgttctgtagatatctgttaaatccatttggttcataacctctcttagtttcactgtgtctctgtttagtttctgtttcaatcacctgtccattggtaagagtggagtgttgaagtctctcacaattattgtatggggttcaatgtgtgttttgagctttagtaaagtttcttttatgaatgtgggtacccttgcatttggggcatagatgtttagaattgagactttctcttggtggattttccctttgatgaatataaagtatcctttctcatcacccttgataacttttggttgaaagtgtatttttattggatattaggatggcaactccagcttgtttcttcagaccatttgcttgggacacctttttctatccttttattctgagatagtgcctgtctttgttattgaggtgtgtctcttgtatgcagcaaaatgttggttcttgtttgcctatctagtctgttagcttatgtctttttataagtgagttgagtccattaatattgagagatattaaagacagatgactgttgggtcctgttatatttgattttgtaggtgactttatgtgcttgtggttctcttcttttgactttgttgtgagatgcttaatatcttgtcttttctttgatgttggagttttccttctaggatcctgggttgggttggtatagatattgattgaatttggttttgtcctggaatattttgttttctccatctatgttgattgagagttttgctggatatagtagcctgggccggcatttgtgttctcttcgagtctgcatgacttctgacctggctcttctggctttcatagtctcttttgagaagtctggtgtaattctgataggcctacctttgtatgttacttggctcttttcccttgcatcttttaatattctttctttgttctgtgtgattagtgttttgataattatgtgacgagaggattttctgttctggtcccatttatttggtgttctataggcttcttgtacctttatggccgtctctttctttaggttggggaagttttcttctcttctatgattttgttgaagatattttcatgtcctttgagctgggaatcttcattctcctctattctgattatttttagatttggtcttttcattgtgtcctgaatttcctggatgttttgtgttaggaattttttatgttttgaattttctttgacagttgtgttaatcttttctatggtatcttctacacctgatattctctcttcttctttctcttgtattctgttggtgatacttaacatttgtaattcctgacctctttcctaggttttccatttccagatttgtctccatttttgttttctttattgtttctacttccacttttaggtcttgaaccactttatgcaatttcttcacctgtttgattgtggtttcctgtatttctttaagggacttactttgtttcctctttaagggcttcttcttgttcatctgtgttttcctgtatttctttcagtgagttatttatattctctttaaaggactctattatctctacgagataggattttaggtcaccttcctcattttcaggtgtattggtgtattcagggcttgctgtcgtgggagaaccgtgttcagatgatgcccacggatattggcttctgttgcttacggtcttgtgcttgcctctcaccatctggttatccctggtgtttgctgctatgggtgactctgtctggagtctgactcttttttctcttagttgcttcaggtctcctggtaggcatgtggccctggctgtagcagacctcctttgggaccttccaactggggggttttcagagggacatttaagctattgtcttatgtgaagctgttctccaggggggccaatggactgtggtttctgtttccctgtgtgcagcagaactccagggaggctttccgtttactgcatgactttgggccagttactctgaatgcccaccaggggtctttggattgtggtgttggttgcccagttgccctgtgtagagaggaactcctgggatgccttcaagctgtgctgtcttcagaggagcagacaagctggtgatcagttgctcagttgccctgtgtacagtatatctcttgggatgtctctggctgtggtatcttcagtggagcagactagctagcagtctgtcccagcaaaaaagggatgggtggaaggggagtggtattcggtgggtgggagttttggggtttgatgggtccccaagtccactgagttcccagtggcagctgtgggacttctggaggattcttaccaaatgctctgagtgcagcagatctgggatgcctcaggatatggtgtcttctggggagcagtggtaatattcattcttaacctaactgaatttctccagtccctgatacgggttgaatatgaaaacggataacgctagtaagacagacagttagttgagtattttggtgaggaataggttttggttactcaaccaaataaatacctggtttactaactaaagtacaaaacaagtacagaactgtgaatgaaactaaggaagcaatcccttctcaccattcctttcagaatggctgtaggtctatgtctgtgaatgaggctcacctcgtccctgcccctcttttttatgttttataaaaagtctccattttctaaggtaaaattagacgtaacttgtttgcctggctaggtcaattctgttttcagaaactaaaggtcaaacatacaacctagagctgggatttcacctccatttgcctgtagccacaggatgaatgagtgaccatttagcctgcccaaaggcctgtgtgtctttgtaggaggattatggatgtagcatgacttctctgggagctctgatgagtggttgtctcttcgaggagtcagcctgtccctgactcgtaggaggtgtggttttagctctcttctctcttttcttgtcctttgtccttctgtttctgatttgtgggccaggctgtgtgagaggctgtgctgatttgtcttggcactgttggcagaggtgtgttcccccacaccccagtgttcattgctgtgcctgacattgagataccagttagtccttactgaatagggaatgacaggtagtgggagctatctggtgctgtggtagaggtctcccttcccctgacttagcagtttctctgaagtttacgtatgtagctgccagccaaactcctagacaaccactctccctcacatttcttcttttgatgcatagaagggctcctttgttttggaagctaccatccagtttagacattgcttctgtatgacagggaactgaattctacaggatgatagtagtgctctgtgtctactaacaatggctccttcaatctgatcatgtcatctctccagtaaatacaacacaggcaggttttatttggttacttatttgtcctgcagtaccctacctactgcctccagattttcttgccctgggcttgtgatatcccttatttcctgaatataccagaccctttgctgtctactcaccttgtgcctagaatgttcttccctgatttccacctttctgaactttccatgatgctcttacttgcttgacttgtctacctttttatccagataagtggataaagacttagagctctgtgccttcaaggcccttgacgtccagcatccgtgcgtgtggtgtatttgtggctcgtgctgtaaaaggttctgtggtgatggaaaggactggcttaaaaactgggctggcgatgtagttgcctgtggcttaactactactattagtgctttttaggcccaaacccctaatgtgttttctccattcctttctttcatctgctttcagcaagggaagccgtatgtctttgaccgagtgctgccgcccaacacaacccaggagcaggtctacaatgcctgtgcaaagcagattgtcaaaggtaagtgcccctttatttcctcctgggatgtcactaatgaaaacattaagtgacattcgcagcctagcaatcagtgtgcctccactgtaagcagagtcctgttaattggaaacactaaattgctgtcttggctctagccctgccttgctgtgactgacctcagtcacgttattcaacctctgcattagttttctctgttactgttgccgcctctttggtgggcttattctgttccctaagagctcacaaagcaaggtaagcggtgtcacagaatttctgtcgtggtctctggggactacagggagagtgttcctttcatgtttgagggaggaaatggattgctccatgctttagccgtacatgtttggctggtttcttttactaataactccgagaatgtagtcttacaggtgaaaggttgctcttgccaccaaggggtattctacagtgtcatgaagtcccccctttgagctagctgtgcagccatgtctgctctacagcagtccttaatttcaattttcaccatcctaccactttcagccatcctaccacatcccgacatgtgttcctccaaacaggtagcttcaagcttgcctttgtgccgcagagatcagttcttttcactgggactggccttggccctggaggatttgtgtcaaaataacagcagggcgaagaagcaatttgtacattgctctctcttgccatttcaaagcaggagcaggttggagcatgctgtggcaggccctgccatctggacaaggctgaggggcatctcccgcgtgcctgcttttctccatcaaatccttgccttcagatgggaatgccacggcagccatgtgctcaaaggtcttgatgctgccacccatacaggcagccatgggtttaaaagacagaagcatcttgcagctttcgatctgctgttctcagggagccgagctgactaacctatttgaaattcatgagattcaggcctggtacatctgctagatgaattctgaccctggacacctgtgtgggagactcacgtcagcaggcaatgttccctgctaaggtgcatgcttattcacactcttgttacagatatcaattaattctgaaggtcttctctgcgagattattatagaaaactaacaagaaaaaaataagcttagattttagctgtttaggatgaacagttttggcggacaggggccggtagtttctgtcttttgctccctctgcctctctttgagtggtttctggctttgaaatgtcttccttggctttctcctgttcaggcctgccttcccctgcggctgagcgtggacataggctttttttttgtttgtttttttaaattaaagtaagattaatcacatgtgccagaattcccatcttttctctcttcaattttattatcggaagcaaacagtatttgctacatgctgtgctaagcatgaaggccatttaaatacatccagctacctctgtgccaatgtaattagaaatggatgcactccatttaaaaaactacagtgattaacaaacaatagtaatcgcctttgcgttttcattcactagtgtgtggtctctttcagtgtttggatattttcttatgtattttcttatatgaggtatcagacagacattctcatccctgttaatgtggacattttttgtttgttttggtttggtttggtttttttttaatgtatcagctaaaaactaaattaagaagaagcagtccctgtgaatatctgtcccaactctaggtaacctgctaccccaaatagatggtgatctacaaagaaaaccctttggaagaacagggctcggcatgtgatatgcagacgtttctagggcacaatgactataacgtgaatgtactcatttggtagcaatagagaataccttattcttcttaaaaagaaattgttaggatgacaaaggcctagtggaacatttgttaaacatttaaagaaatagactcttatttattcttttcatacacgaaacaatacaccgtgattatttgagcctgtaacgtcttccttccactctcccgagaaatcctcaactcctctccccccctcccccaccccccatacttccagtatgtctccctcactacttcttgccctcccacccctgttttgaaccctgactttaattagtgatgtttgttggaatgctggctcatctcatagctgcagtgagttgatggctggaatggtcatgtcatgtctgaaagacagcatttcacagcaactctttctccagctctttctggctccccgagttgtattctgagccccattctttgggaatgtgggtgctagatatgccatcgaaggctgagcagttactcgcagagacacttattctcagtactttgatcagctccaagtctctactttaggcataactattgacaagacagtttcatggtaggacttgttagcacataataatatgattctccctagggctgatgacctcctgagctatgggcaaagcgcaggtttacagcatcaggcttaaatgcgtttctacgaagtaggcctcaaatccaagccaagccgagtgattatccatataacttcatgctgctattgtactggaggcgagtcttccctggcgagttggtgttgtagcatggaggtcgcaggcatcgcgttgatgccttttctccctcagtggcctgcatagcaccttctggtactatcaagctaaccagcagggaggaagcgtccagctgagttctctatgttgtacagccaatgcgttggtgtcttcagcaagacggtcttatcatctggttgtgctgcataaccaagaacagtcggaagcctgtattgtttcagggtcttcagaccctccctgagcaataacttgtagtgagctatcccgtactttgtactgagatttcatttaataactcatgtcttatagggggatcattgtcaactcatgcaggttatctgtgttcaaactctgtatgtatatatgtgtgtgtgtatttaattttgtttttttaatgaatttccaaagtagtaggttgctattgaggttctttgcatatccttagtttgggttagctcaccctgcccaattcctctctcttcatttcctatctccatgcctgtttaaagcctcagatccctgtatcctcactccttcatattgttttcttctatccacctttcctcttaagacctgttcacctctcctttttcgtgggccctttctgtcttcccgggcttgacagatacctgattgaacttttaaaagtaacctccaaggctcctgcgagagcaaatgactttcctttctgtgtcagtaaggtaaatcatacatccatagcaagaccttcttggagtacacaatggagcaccactgggtcttcttgtcatcagagccctgcctcagttgggattgggatgtggtaaagagactaagatgtgaatcaaatgactctgaagatcagcatggtcacctgattcgtgatgctgtcgcaggctgatgagctctgtctcattgtctattgagacctttacagagcctgatttaagatgtctagagtcccagtatttcctacacttgcatctttgtgtttttcaaactgttggctgaaagagtgtgaagatttctccatctctgtaggaagaggttgtaaggtttgtgactataatcacggcaaataaggctcccgtgggtgcctaggcattaaactccatggttaccagatattattgctgagatcctggtaaccgtgtgctggtcagcaggagccactccggaccttccttgccttccaaagcaatcaattgtggactgaacaaatgcttagaggaggtggtttttttgttcgctttttattttatttttttatttttaaaaaattttttccagttgatttctctaagctacagttatttatgtatacaggtaatattaagtgcttatcacctgataagcactgctagggactggagtcatcaaaacatctaagactgtctgctgggaactctcaatataggagaggcatttcatatgccattatcatgcttttaggctatgtaggttaagatgggtgtgtgtaccatgccaggaccacacagaggagtgccactttgtgccgatttggtgggtgaagggagggagtggaaaactgaggaaaggttcttcgaaaggttgggccccgaggactatagataatagccgtagtatcagcaggaacttcgagagcctgaagatacaaacgatgtggcacgctcgggtagttcggaaggaatggtgtagggttttgagtacacggtggcaaatgaggttgccagaggcagtctgcatccctctggtggacatgctggacggtatcccagaggccacgtgggcagactgaacagctttaaacttaggaagatacactcagatctgtttcattatcctgtatgctctgtattatgtctgctctcgagcaccttagatgtcgcatcctaaagcttcagttgatgaggtgtgtgaacacttctttctctaccctattagagtgaaatttgatgcttggagaataaagcactttggccagatctagaggaatgagtgggtctgggccttgagacctagtttgccgactgcctgcggctctgagctattttgccttacctttctttttcagtcaggtcatatggactattaactaacaggccaaagtgctaggggtagggatgagtgtgtgaggagagtagaggggaaagaacagctactgtggccttagagctttgtgctggtcagtcgtgggtgagcttccactctgaaatgcagagactttggaggggtcagtgtgtgcaaatagtcactctgctcagcagagattaaagcaaacgtgtttctcaagctcagaactgtctaccatttactgcgatgggagtgtgtgtttgctgccttgggtgcctggagcctgggtcttcattctgcaggcacgggcagcttgagttctttggtttgctggcaaaccttgggatcccaatggagcagcctttagctgttgtcagaagcctagtgagtgcccctgacacaacaccgtctcccctgggagggttagtaggctgggcagcctcttaggaataccgatgtatagtgtgaaggaccttgattcgtgattcacaaagcactcatttctgctcctgtcagacctgggctcagctgtaagcagaacctaggatgcgtgcatgctcaagtttctgaactctgtagccagagctggccagcgtcctctgtcctctcccctcccctttgggagataacatgccgcttgtcatctgcagcagaagcttctgggtttgctgggctgctggatagacggacactggcctgagaggtgtggggctcccatcatgccagataccgtcacaaaggacgcttctgtctggaagagcattatgtgtggaaacagtcattctgctccgcagagactaaagcaaatgtgtttctccagcccaggaaccatcagccatttactgtgatggaagtttgcaggcctttggttgggagctatgggctggtcccggaggcagtatgtggttctgcacagggcccagcacaagccagtgctcgagtcgtccctcagcagcctgtgctggctcctctctcagcccttgaactgcactgctcacccaaggcgttctctgccggcactccccactaaccataaaacacactcggaataaacaaatgcaccaccctctcaaatccgagaaaatagacaaccctaggtcgacaggaccttactttttttttgttttgttttgttttgtttgttttttgagacagggttctctgtgtagccctggctgtcctggaactcactctgtagaccaggctggactcgaactcagaaatcctcctgcctctgcctcctgactgctgagattaaaggcgtgcgccatcaccgcccccggctaggaccttatgttttaaaattatcttttagttcagaattgagtcgatagagggcaacatcagctgcattcaattttgatctgggatattctctaaaatgtattacgtgtaagatgattctgggtactttaaaggccaatcagagtgtgctttcgtggattctgtatgctctctatgaaaaaaaaccaaaacaaaacagcaaggaaattgtgttcagtgtggattttctctgagtacactcccacatgcctatcagtaactcagctcaaggtgagccaatgccacttaggcatgttccctccccgcccccctttttaaaatggggtctcatttagctcaggttatcataaatggggtctcatttagctcaggctatcctcaggccctcacagagctagggcttaccttgaagtctggttcttttgtttctgtctcatcagagctgagattataggtgtgtgacatcactcctcgactgtgggctgctgaggactgaagccagtgtttgtgccctctaaagaaacactctcccagtcgatccgagacttgatgtggggactcagtttgtaaacacaggagaacagggactgtaaactacctgcttggtgagactgtgtcctgtgctcagtgagaacagccctgaaagctcatggagatgctggaggaagaggaagatggcagaggaaggagtgtgggctggacgtaggctctggagtcaggttcctttagggtgcggcaggttgccacacttcagaagaaaggagcgaggtcagaagctggctggatgttggcccagaccagtaaatcctagagcacgacctacacaggagtgtgagggaggaagggcctcagtctgaggagaggtgtttagtttctagtaaataaaaagctttctgttgtgacagtgcctggcgttccaacggcctgaagttgtttgcgttgtgagcattgaactttaaaatctcaactgtaggatggaacctctttctttgggtccctcaaagnnnnnnnnnnnnnnnnnnnnnnnnnnnnnnnnnnnnnnnnnnnnnnnnnnnnnnnnnnnnnnnnnnnnnnnnnnnnnnnnnnnnnnnnnnnnnnnntgaagcttaaacctctaaccctaacactgacttcttcagttttctctctcttctttctgctgttactagggaaaccgctttcaaaaaccatttgtagaagacagatacatgtgagtgctcccttcccccatctcgatacttttcttctctgatcccaagtcatattgtaacaatctcagaatagtaaaataggtatgcttttttttttctttttttccttttgtaaacctagcaagaaaaacaaaccaccatcaacacccccccaccaccaccacagtcagcacaaacaggttcagagaggagagggaaccaccccaatctgaaatacatggaggtgacggcctggcacactttctcacatggccccaagtagcatcctctattcagggcacttcttgccctcaccatcaaccacattaagaattcctcccttggtgcagagtggtgggtcaaggatattaattatgcattgtttccctttctgtgatggttgtagagaggagggggaggcaggagggaatatgttttaatcacctctgctgctctgaaagaattcccaccgatgatcttcagctctgcaacataaagcagcccccacccgcacggctcccctcctccctgtgtgaaaccgaagccagcctgcctcgcgtgtgggctttcaccgtgcacttattgtgtaattaagagaaattcctgatgctgatgggtccaggctatcctcctagtgaggcagtgaaagaaaaccagaggcattaaatttaagtcaggcctgctagtttccagggtgattggagctcggtttgcagtgtggtgcctttcgctcccctagttctagtctgttgtgatgggacttccgtgaggccttcatgggaaatggtccaaaggatccagagttaagctgaccgagaccaaaccttcaggcaccacattctattctaatctccagaaactgcaagtctgctggcttttcctctccaagaatctcaagagactaacacctaggcgaaagcttcacgtagccgaaaaagactcttcccctggagtcccgcagtctgcagaaatgagagaccctttctccttatttgtgggacagcagactctcctttcttttcttatttcacaatcatacttaaagcacatgcagttggcacatatcatttttgtaagaagacagagatgggccattaggaactgcaaccttacatcatacaaccaaggccagtgtaggagcagcataatgaattaatgttcatctctcttgtgcttgcagatgtccttgagggttataatggaacaatttttgcatatgggcagacttcatcaggaaaaactcataccatggaggtaagtttgcactgtcggtgtctgaggtgtgagagcgtcagcaaagcgtgagatgggtgtgacagcagaggtggttaggttcagccagactcttctgtccttggggagttttaaagtgccaatgagcagtaaaatctcaagaatttagtttttaaaaaaccttggttgagctgtctgtccaagtgaaaaaataaatttcatttaaaaaaatagtcagatagcttttggctgccacagccatcttccagtaactcaccaaaatgatgaacacaaagggaaagaggagaggcacctatgttctctaggccttttaggaaacatggcattgttcctttggccacatacatgtgaatctacaaaaaggatgatattgtaaacataaagggaatgggcactgttcaaaaaggaatgccccataagtgctaccgcggcaaaactggaagagtctacaatgtcacccagcatgccgtgggcatcattgtaaataagcaagttaagggcaaaattctggccaagaggatcaatgtgcggattgaacacatcaagcacttgaagagcaaagacagcttcctgaagtgggtgaaggagaacgaccagaagaaaaaggaagccaaagagaagggcgcctgggttcagctgaagcgccagcctgcgccacgcagagaagcgcactctgtgaggactaacggaaaagagcctgagctgttggagcccattccatatgaattcatggcctaatgtacacaaaaaataaactatcagcaccaggacaaaaaaaaaaaaaagtcagatatagggggtatggcttagtttcctagcttgcaggaggccctgaattagagcctcagagcatctctctgtctctgtctctgtctctctctctgtctctctctctgtctctctctctctgtctctctgtctctctctctgtctctctctctcacacacacacacacacacacacacacatatacacacacatcactgctgctacaaccattatgaataggtaattagtggtgtggagtcttatggactgcaacaggtcctgtctgttagggtgaactgcagtctcttaagaataaattaaaaacaaaacaaagcaaaaccctataggtcagagacctaaagaggttggattctagaccaaatttggaccacaagcagacttttatttgacttgcatggtgtctgtcggtttgaatgtatctaggtatgtctgtatatatgaatttatctttaagatggaatgatttcacaaaattctaactttttcacgattgtggtttttccatttcctttgaacactgaagattttgtagcactggatgaatttagcaaaaactgcaatttcccagagcaggaattttcattgcttgtacttgtttttaatctttgtgattttttttctttattttcattgcctggacttgaacccagtgccttatgcatcctaagcaaacatttgccactgagctacgctcatagccttggttagtttttgttaacgcgtgttaaaagtggctgtcaatgagaagaggccccataaagtatttgttaaaacagtaccagtgtggtggctctgcccaccctgcgtgtttggggctaggttctccagtaggtcccagtccacttggcccacagcctgaatgcctatgaaccgatgtgccccttctgatgtgaactggtcgggtactcagcaggactgagtaagcagtggaagggatggcctcactcatgctctcactgggagcttgtggcttcaggctagcttctaaacaggaactctttattgcccccttttctgcttttcaccaggagctcctgaggtctctggtgctggataatttgtctaaagcagcaggtctcaacctgtgggttgtgatccctttggggaccacatattagatatcctgcatatcagatatttatattatgattcttaacagtagcaaaattacagttatgaagtagcaatgaaaataattttatagttgggatccctacaacataagggactatatatattaaagtgttcagtattaggaaggttgaaagctactgctctagaggccaggcctacctgacaggtgagatgannnnnnnnnnnnnnnnnnnnnnnnnnnnnnnnnnnnnnnnnnnnnnnnnnnnnnnnnnnnnnnnnnnnnnnnnnnnnnnnnnnnnnnnnnnnnnnnnnnnnnnnnnnnnnnnnnnnnnnnnnnnnnnnnnnnnnnnnnnnnnnnnnnnnnnnnnnnnnnnnnnnnnnnnnnnnnnnnnnnnnnnnnnnnnnnnnnnnnnnnnnnnnnnnnnnnnnnnnnnnnnnnnnnnnnnnnnnnnnnnnnnnnnnnnnnnnnnnnnnnnnnnnnnnnnnnnnnnnnnnnnnnnnnnnnnnnnnnnnnnnnnnnnnnnnnnnnnnnnnnnnnnnnnnnnnnnnnnnnnnnnnnnnnnnnnnnnnnnnnnnnnnnnnnnnnnnnnnnnnnnnnnnnnnnnnnnnnnnnnnnnnnnnnnnnnnnnnnnnnnnnnnnnnnnnnnnnnnnnnnnnnnnnnnnnnnnnnnnnnnnnnnnnnnnnnnnnnnnnnnnnnnnnnnnnnnnnnnnnnnnnnnnnnnnnnnnnnnnnaggaaggttattatatgaaatggaaccacagagtgagtttggagcattcagcttataagcagcagggtaggatgaatccttaatccttcaaactaaggttttttcatttatgaatccctcctgggaacaggccctgagacaactgctgcagaatagatttagctcatgaatcattcctattgaagaggagatttcaaaggcgcggggctaaactctttggcgctctgatgttctgtgcactgattggagtgtgggctggggtgctggggatctcatttctgttgtgttgactttctttggcccattttgcagaagaccaagcggtttggagactgtgcaaattaaagaaacgtgaggcccatttgcctcctcttctccatcaggactaactactgcccagcacatgggttatattagcgaattgtctatgcacctcgctccctaagcagcatattccagaagacctggccttggtgttgccatgccccgactttgcccccctccttttctctcaagggctttgaccttgcaggtactagtgaagttgtagttgcacactttcccagctccacttctgctgaagaccgaggatggaggactgaccgagaggaaagggagggagagggagagagtgttccttcagggtctcaagagggaacccatcagtttttaggttttggaaaacgagtaaggtgttatgtaacacgaaagaagaaccctttagtattttaaatcaccgaactattaggggatgcttacaaaaatgaattctaagcttttgggattaatttaccattgacaaaagtaaagtattttgctaagtgtcataaaaactgtagacactgagagagactgctctgcagaggaagatgtcggaggaaagtgagtgggagtcgctaatggggaagactgtggctgtcctgtgctgctgtggggacatttgagcctttgggggaacacactcctgagggacctcagaggagctggattccatgcctctgtcatctgagttccccagattctgtcacctatgcatgtttgtcagtcatcacgagttacctctcttggttgtgaccttcgcctaatgctggatggagttggctgacccttttccgtgttgcccagcccccatgctggatcctgttgttctgtgggtgctgagaggcgggaggagggtagggggtctgttaagcggaagccaggggaagggggattgctgcaagctaaagatgtagactgtaggaaacagacgttcaggatcctggaatgcaattaaataagaaatgctctgcaggcattgtgtcttctgaaaggaggatttatatattcagcatacacacagagctctttcaaaagcattcagaagggatgctagctctcaagtgagcagactgtcacattttaaagcatttttcttttaattccccaattttgggtctgatatccagtggtgttgcccttatcttctgttaaaagagaacaacacacaatcctccatcacactggaaagattagcttctcatgatactgcatttaagggggattttcagataaaataggactcattgggcagtattggtcctgaggatggtaggcaccatcatgcaaggtggacttttcaggagaatgtgcaggtcggtggagaggatgtccggtggctggctgcagacaggctgagagtgcgacttgtctcactacttggtctgttgcttggaagggatgaatccctgtactcagtgtgctgagagagatggctggacgcaccttgtggttttcttcctgtttagtgggacatctggaagctataggaattctgtggtctctccagccacctcgcaaaccttcctaatgattctgaacaaaatgaagagtacatggtgcttaaatgctgctggcctcttgctttcccatctccagtgtttgaggaaactgtgcacatccaggagaccacggcagaggactcagagtcttgttgagtgaccagcggaccatgtcctggttctccttcgggacttgctcctgaaaagctgcattcagttggaaaagtttctggagagagttgtacagagcacagctgtaaagtgtcctgtttactcccttggtggagcgatagacagcagcccaccctgtttactgtgcctctctcatccctgagccatagtgtactttgcctgtctcagatagggcatgcttgttttcagttcctgtttttgctgctgccagctcacccctgctgtccacagcctctgcccagcctagatctcaatcatcctgcacactctaggggctcctaaggaatccatatttactacctcagctggaagggccttcatgatcctgaattcaccttttttcatagcctggtaaccacattgtatctgtgtatgtatgcttcatttggaagcagtatgatctttacacacatgcacatatgcacacacattcacacacagaggatagtcatttgtatatagtatacattttccatatatgtcacacaggcattctccatgtatcacacacatctcccacatacattatatagacacagacacatctacttatacaggagtatgccacatgtttaaatatatgccacacacattccatatatgtcacacagagcatatacttactgttcagacatcctttacatacatacatcacacacaaatacattatatatgtatatacatatatatatacatacacacacaaacacatacaactcttttcatactgccacacaatagacacatatctcacatatatcaccccccctatataccacacatatgttccatgtgtgcatatatgtttgccatagcaaatgcctatcctacttagtatcacacatgtactccctgccccgggttattttggcaggctgattttaagtcaggaatcagtaaaagatggtctattggaagagaaccatctaggaaaacacatttgagtaaagtataaatgacttttagattaccagtcattctctggtagtggaccagagaagaatctgctatgggttaccatgggttattcaagagccctggaggttttgttgaaaagtcttgattggctgagtggggtagtacaatttaactgcaagaaaatctgtcctttaatcctagggattcttttgccagtagtttctgcagcgtagagctcatggctgtggtctgttttgttggtgtttatgatgacctatgtgatgtaaatgtgatcaggtatttggtgccgttttcctaagatactgtaaggtagtagcctggaatagggtgttgtcttataacttcttaggtcaagtcagccccaccccaactcagtgaggacctatgaggagatgaatgttatacactaacatgtattgagtccttcctgttgcagggaacacttcgtatattctattgactctgcactaattttatgcagtaaaccctgagtgttaggccaaccccatttttaatgtgtctagaaccaaactaaaacacagtgtaaatatatcatttggatactttctctagctctttcactggggaccctgtgctccatccaatggatgactgtgagcatccacttctgtatttgtcatgtactggcagagcttctcaggagaattctatatcaggctcctgacagtaagctcttgttggcatccacagtagtgtctggttttggtggttatctatgggatggatccccaggtggggcagtctctggatggtcattccttcagtctctgctccacactttgtctttataactctttccatgggtgttttgttcccccttctaagaaggacggaaggggtttgcagccccataggaggaacaataatatgaactaaccagtagccccagagctccctgggactaaaccaccaatcaaagaaaacacatggtggaacttgtgtctctagcagcatatgtagcagaggatggcctagttggtcatcaatgggaggagagggccttggtcctgtgaaggttctatgccccagtataggggactgccagggccaggaagcaggagtgggtgggttggtgagcacggggaggagggaagggatagggggttttcggagggggaactaggaaaggggataacatttgaaatgtaaataaagaaaatagctaataatatttatacacacacacaatacatcatttgatttatcattcttgatagatgagggcagcatgccagaagagctagatgagagagtagccaggcatatctgaattctgcattccttttgcttatagtagagtagggagtcaggagtcagatgtgctgagaaattgggataccaagtgcttggtggcatgtctttaatgcttctgtccatatggggttttgctcttggaaactcaaatgttgacttggaagttccttttaggagagcagtatgtgatgaagacctggaggagaaagaggattaatcgaggggaaagtggttgaccttcagggcactgggcagatgtggaccaggtgtctgtgtgaatctgtaaaggttgctgactgggcagatgtggaccaggtgtctgtgagaatctgtaaatgttgctgactgggcagatgtggaccaggtgtctgtgtgaatctgtaaaggttgctgggcatctccaaggactgaggagaaaactggcttttgtgttactatatctagagttttataacttcccaaaagtctaaaatcttcaggtacaccatcactgtagatctccaggctatgtttgtggcagataggttgtttaacacttgggagaggacttgagtagtcatttcactggtagattaagagaagattctatggtatacaacctagccatggctttaagtacatcagatccctttagtgggaattgttggatattgtctcttccgttccctcccacagggcatcaacatatcaatactcatggcatctcttgacagccctcataggtggaaaaagaaattctaggcataaaagtatatttagtaatgttcaaaaagagtatttatccctccacctgtttgctaaaatcaaataagagtgggaaaaaggaatataagaatgcccttcaagtcaatttaaatactaaaaggagtaaaaaacatatttagaacaattcagttggagaattctagatttcaaaatgagaacactgggatggattttcttggccggtctgtaaaatgctcctgaagagggtatttttgagggtaagggctttagacaatcttggacaatggttggatctatccattctccagcagatcagatttgggattagctgatctggactggctttctggccaatctctaactcctgcaggttaaactaaagcgtgcctgttcacctcccaccttcttctttcccacagtttcactgcttctctgtgtggattcacacaggaggggagatggcctccccactccaaccaggacagacccccctccccacagccaggacagtactctgctggcaacagatgggagctccccgggaagccaacagcatgtgtgtgtgtgtgtgtgtgtgtgtgtgtgtgtgtgtgtgtatgtgtgtgtgtgtgcgtgtgtgtgtgtgcgtgtgtgcgtgcgtgtgctttctgttttgtaagttttgtttaacaagccctgggttgagccaggacttatgcccatttctagccttccctaccaatcgttctagaaacttctgtttgttgtgcaggaacaaacaaaacatgactcacacactcaacttggagttttacagattaaacgacattgtttgaaaaaggcagagccccgtttgctcctctcccgtgcttcccagcacttcctgactgttctgtgtctttcgctcataggggaagttacatgatcctcagcttatgggtatcattccaaggattgcacatgatatttttgatcacatctattccatggacgagaacctggagtttcatatcaaggtaagtgcttttattaagaacaagacaggccactaggccccaagtcatattacacagtctttctcctcctatataaataaatgtacaggatggttcttttcatcaagtgtcattctgtgggaaatagacactatttattaatttcagtcaataccaaacatttgggatgcttgcagtaggaacataaaaacatagaagccccctttaggatggaatcgttatacccattgcctggattctccccttttctcaatgcatttctgaggatagtccaggaatatgtatgtgtgggggtcaggacaccgttccccatgtgagttccctggaacataatctcttatgttaccaatagggaagctgccagagaaaagcattgtatggacaaataaacttggaaaatacttttttgaccagggctaaacttaccacaagttcaaatgctgtcatgaatagtgtggttctcagaaggaatgcaccctggataatgacacattcatgtcaccttgggaagtgttggcaggcaattcgcctgcctcttttctcttcctctttgttattattttattttaactcagaaatgctaatattgcttaaacttgaattgaaagagagacttctactctattattatttctgttgaattataaaatttggacttctttgtaaattccagaaggctacttgtttaaacagagaggcatgtcataaggtggcgactgtgtgaccagtgtagaacaggccatggagattagggaattccagccctggattttcctttgtttttaagtttaaaaaaaaggagagagatagttcatatggcataaaattcatcctttaaaaacatttctgtggagcttagattatttctcaaactgtatagccacgttcttgtgtaaatttttaatatttctacacacaccaccaaacacactaccttgtacccctctcttctccgttttcacttgccttctgagtctaaattttgctctctgttttgttgagcgtcttgggcagcatgggagccccttgatgaatgttctaggtttccaatcctgccatctcgtggggagagggatggcgagggggnnnnnnnnnnnnnnnnnnnnnnnnnnnnnnnnnnnnnnnnnnnnnnnnnnnnnnnnnnnnnnnnnnnnnnnnnnnnnnnnnnnnnnnnnnnnnnnnnnnnnnnnnnnnnnnnnnnnnnnnnnnnnnnnnnnnnnnnnnnnnnnnnnnnnnnnnnnnnnnnnnnnnnnnnnnnnnnnctgccctgcttctgggctcccagatacacacaatgtctgcttctccatctttgtgcctagaggggctgcagagcagggaggagagaggctgttctaagaaggcagggtagctcagtggagaggctgtcctgaaggcttgaacctggtacacatgacccagtgggtgagtaatgagggagcagaagttcagacacagacggatgggccacgttacaagtagaccctagcaccaactgatacttggtacctttttcattgtattaggcttctttctggcctggatagatggctccgtgggtaaaggcatttcctgccaagcctgacaatccaagtttggtccctgagcatcacatgtggaagagaactgcatcccacaagtgttctccacctgtgcaccagggctcaggcccttccctcatccacacaaaataaataaataaatgcagcaatcaaaaaccttaaccctctccccttatttatttctacagcaagctgctcctaactttacatttcaaaaagctgtttgtgcaattatgagtcacatccggtacaccacaggtctctcggttgctgaaagcaacctcgccaggcttcctatgtctgaggatgcagagcttgttgctttgatgggatcaaggtttacaagcttagtgcttctctacggctatttatgctgacacactttaaactgctgtagaggtcttaagtgataatcctgaataagatgttaaaccaattactgccctggaaatcgtgccttgtggcagagtcttattacgattaagaatggcgctggcttgaaatggtggtggggggaagggaagaatattccctcagtctctagaatcaagtcttaccgtctaggctcccattgtgcatttcctagttacgcttgattttctattaataggaattgtaaggggacaggttatcagtgtctgcttctgaacttacgtgctaacaggttaaaccaaaaggatccggctaaggcaatattgaaatctgctccttaatgtgtcccatgggggttttgaacattatttctgatcgtgctgtggtttttctgccgaacaatgcctattggtttcccttctgcctggccacacaaagcatttgaaataataaaatgaaatctgacgcctcaagaaagtcgaatataccagcatccagttttaacctgtattaaacaggaacaggattttaattgccaggcttggcagtacgtggttcatggcttctttttagatgtaattgattttctctgtaatttgtggaagtaaaaatcacatgtttagggtctccaaagttgactgaatatgatcaaatacattgtgtgcatgtatgaaaaacatttaaaaaaaatctcaggggtagtggaaaatcttaatggcagtcaggcaatcatgagctggaatagactgacaccagaatgagaccagcttcaggagagcctggctagagacgactagaattgggctttggggacctcacagaggtgagtgggcaacctgaaaggttagcgagaacggttaggggctggtgggatagctcagtggtacagtgcatgccttgcgtgtgtgaggccctagacgaccagagagatgtagtgcactgggcagatgaacagacaggtattagcagaggtacaggtacccaggagcaggtgccaggacactcagctgctgcttgtagatttcaaagtaggaatctcaaagctgccgggaactgggccagtgggtggtgctagatgaaggcacacaaaagataacaggccagggctgagctacaacagagtttagtgtcagggcagaggggccttcacattctccagatcagaggtgaggttggtccactcctgaagtttcacctgggtagtcacagcctagctttacagctgtacagcgacaattgaggctggcttaatgatggggtatatccagagaaatgtgttgaaagacagttgtatcattctgtaagcctcatagataataggcaaaaccagggatctatgatatcactaggcaatgtgatcttacggaactgctgccgtgtatgtggtctgttgcttaatattatcatgtagctcacaactatatttttgttccttttttaattaattattttatctatattatattccaaatgttgtcccctcccgttccaggtccccccttcacccctctcccctcccctttgcttctgagagggtgctcccacacctacctcaccctgctaggatcccccttccctggggcatcaagtttttacaagattaagcacatcctttcccattgaggccagacagggccctcctctgctgcgtatgtagcgggggccatggaccagccccacgaatgctctttggtgatcagtgcttagtctctgagagctctgaggggtccagttagttgatactgttgttcttcctgtggggtcgcaatctccttcagctaccctcagtccttctcctaactcttccataggggtccctggcctcagtccagggttgactgttaagtatctgcatctgtctcagtcacctgctggtagagccactcagaggcttctgtctgtaggcacaacatggcatcagtaatagtgtcaaggtttggtgcctgtgccagggatggatcccaagctgggctggtctctggatgacctttccttcagtctttactctatttttgtccctgcgtttccattttgcatatcttcctattttgcacaggtgcttatgagtatgggggaaattttatctgggaggaaagagtctgatataggcagtgtgtaaaatcctggaaagaatttttcacatctcaaagactaacagcttcatttgccagattgaggccatatgtacattagattcctcagaactcattcttagtttaagcatcgcattagttcagctatcagaccagtcacccgggaattcagacgctgattctgggttctggtgtcggaggctctgatgcagtggaactgtggtcgtttccagggctccgtgcttctgtagctgatactgatatatgtggggtcggctgaagcttaagaacgattattcagaaggcttccttttccttacacagtctaatcatcttttgtttggtttttgagaaaaaatttcttctgtagccccagctgaccttagattcacaacaaccctctcactcagccttcttatctgggacataggcatagctaccacacctggccaatagtctttattaaaccacatttgttccagtccatcacagactccaaacctggtgtcttcatcagtaccttctcaggtacctgtctgaactcctgttgttccaagcatccttagcctctccgtcatgcactgttcctgtgggtctgacgaggctgtggcatcatgcagctgggtgaagtctgctatgtttgaccaacacttgtttaggatgctttctcttatggctgttaccacacatggacatgggcttgatattcagccaaggctaaacttaggttctcttgtaagaggctatctagcagctgatatagggaacacctgggaccagaggagtcagaagtgtagagctagagaatggtccatggttggcagatgggttggtcacagtggccaagcaagaggaacacacgaggggtgcctgcggctctgtgctcaggactctgacctttccctcggcgttccctcttctcagccacagagaaagctttcatgagtttgatagtgatggttttaaaacatggtatggtgtttctatttcaatttcaatttttctttatctaggtttcctattttgagatctacttggacaaaataagggacttgcttgatggtgagttccacctgaatgcattgtgcttgctctgtagttgaagtccggggtgggggtgggggggggggttgagatgcgttagcatgcttctgcctggacagctgatgaaaatgtagagtgatgtttgccttcaggctgtgtgctcttcccagccacagcttaaacttgcctctcgtctgtaaccatagctattcttggagcacagggtttttaacttccctttccttctttgcatgccatcattttcaccaccacagtgtccaagaccaacttggcagttcatgaagacaaaaacagagtcccctatgtaaaggtatgcaaagacttggggcaatgcagctaacttttctctggtctgtgcaaatactgcatgagatgctataaagagtatccaaaggcatagtttatctataacattgatataagtataaaaaaccccaacagccagtatttaggttcttcaactgtagctttcctgtatgtaaattattattattattattattatttgttgctgagaatctaatccagtgcttcatgtataagttatgagctattatactcagccctctttatgaaatctattatttaagtactactacttagtatataaaagaggttttgggattgaatgcagtggtgtatgctctgaacctcaccgaagcctattgtggccttgtctattgtgctgaaatgatgaatgatggagggtgaggcagtacattctcatttcctcccctctcataagttttcttcttttaatttctggctcctgaaagcattgctttagggtatgaacaggagcttaaaaagcatttcttccagctttcccagggctggctggctcatacttctctttaatgtagaatccaagccccaggcaagggggaagcactgttggtcagcatcattgcctttctgtttagctgtacctttagggggagaaaggatgcttagctgctttgagatgctgttgctttgcaaccgctgtaatggccaacctgccctacctttgactcttgcaggggtgcaccgagaggtttgtgtcaagcccggaggaggtcatggatgtgatcgatgagggcaaagcaaaccgacacgtggctgtgacaagtaagtgtgtgtgtgtgtgtgtgggggggggaggtgatgtctatgctgttacatagcacggcagtatctgccctctgtgcaggacagctgggtgacgaggatgtgagggaaggtagcagagagcagcgagcaggcagagcccaggccctgtgctgcgtgagtgtatgcagcactctgaggtcttgaagaattgcctgagattccttgggttctgatcaaagtcttagaaagaaaatccaagttactaaattcatgccaaacacaaggaaaaacagttggggctctacctctgtagagagagaataatgcaaagagggcatcagagcagagcaggcggcttccaaggagtccctgaagctggagagctcacagcaggcacactcacatgagctaagatgcctgtctcatcccggggagctgcacgtgtttatcagcaaggcagaggctccttaaattgactagcactgtcctttcagagggatgtgggcagaggagtgtaagttcactcagagctgaaggaactaagaatttcaagttcggaagagaaaaaaaaaatcaggagaggatgtgtgcgctgcagttcattgatgctctgggttctgatgttgaggaagatgcaatgtgctgcaggctaggcacgcaggcttgaccaactgtcaggactctaagcctgggagctgccccaggaaaagcctgctgctgaggaagggagcgaaggtattgtatagaagagattcaagcagtagttggtggctggtctagacccttctaggagcaggtctgaggctcctgtgtgaatgggctccagctctgtgactcagaatcctcttctacacccacagcctgtgaaatgatgcttgtatatgcatcagttttcagagctgacctaggcttgtgtgctgtgtaggaaacactgcttcttgctgttctgcccgaaacccaaatgtacatgacaaacctttcttgctgtgtttcctaagctgccagtcatgaattatttacactgtacctgcttcagagccgagcatgtcgaatgttactagtgtccttagcattctgtcagggtttttttcccacattatttgtacatgtgtgtgtgtgtgtgtgtatgtatgtatgtatgtatgtatgtatgtatgtatgtgtttgtgcacgagcgtgggcatgtgtgcgtgctcacgtgtgtacgcatgctatgtagataagcacatggaagctagggagaacctactcttgaaagttttcctctaacgtgtgggtcttggaaattgccctgggatgccaggcttgacagcgagcatcttcacccattgagtcatcgtaccagctccggtttctattttagtggggtgagtatatttaacagtgctctgttgctaagtccatttgcattgtgggcaacatctgaccgtgtgtcgccacaatgctccatcttccccagctgagacctgaactcggggacctttgcagcgggtgctttacaggctgtcccatctccccagctccggttttaattttcaagatcagcttgactattcaggatgctgtgagagtttgtagacttttaaaagtttagggtagacttttctacttttgtagataatatcattgagattttgatacagttgtatttggatagattattttggcttatatatgtgcatgttttgtgtgcctgtgtgtattttatgtatgtgtaggcctgaagttgatgttgtatcttcctttggctggattttcacattttatttttgttgaggcagcctctttactgacacagtacttatcaattccagctcatcctgctagctctgagcccactctgtttctgctctgcagtccagggttacagataattgccatgcctgaccagcctttaaacgggttctgggatcccaaactccagtcctcgtgcttgctcagcaaagccttatctattaaagccatctctgcagatccaatgttgatatcttaacaatattttatcttcaaataaatgatcacagcttatgtttcccatctatctctatctgctttaatatctgtaagtggcattttggacctttggctacaaatctgtcattttctttaagtttatttctattttatccttcatattgctaatgtgaatagattgtcttcttaatattttattttttatttttattagatattttcttcatttacatttcaaatgctatccccaaagccccctatatcttcttaatatttttaggtcaggcatggaaacataaatggtttttacgcgttgatttttctagcgtgcagcattgctaaatttatttatttgtgaccttttaaaatgggatctttaaagctgggcgtggtggcgcacgcttttaatcccagcacttgggaggcagaggcaggcggatttctgagttcgaggacagcctggtctacagagtgagttccaggacagccagggctacacagagaaaccctgtctcgaaccccctcccccccaaaataaaatgggatctttagagggtttattttttttgaacaatctggtgagatgctttctgaggaatggtgaaagttgcttgggaccattactgggtctgctgtaaggggaagcgtttttccttggtatcctggccatttaacctgggaggccagtgcgtgtttcatatgggttgtagaggaatgtgtcttaatcttccctgaaggaagctcctggtagttcaggctacacatgggcaggacaaactgtgtcaggcactacactgtaataaacttcagggcttccacaggaccagcaaggaagctgtgagcttcttgggggttgagagagtggggtatgggatggatatagggcttctggccgaccctgagggtctttaattcctttgttacttgaaggcactgtaaatctgccctctctacaatgaatgaacttttttgtttgtttgtttgtttgttttgtttctttttaaaagaagaaacagtggcctcagatgcgtccccaaattggcttcaccagctgcagagagctgcagcagggtgacatgattggctgtgttttgaaggactagaggtctgctgcccgtgctgccgagctctctgcggagcagtaagccatttattttccttttcagacatgaacgaacacagctctaggagtcacagtatcttcctgattaacattaagcaagagaatgtggagactgaaaaaaaactcagcgggaagctgtatttggttgatttggctgggagtgaaaaggtaattggttcttatttatattatctgtaatttctccctgctatttgctcaagtgtacagttgtagaagttctgtgccttttacttcctggttttaaagaagtttgaagtgttgaggcatggtactatcgtgtttctttgcattctcattttgtcctgtgggctaagagtcgccagttcccttcagaggcatgtgtgtcagaggctctgattcattgatgcttggtagcctagggctttaagcaggtgttagtatgacttagcctagcaaggcagctgcaaaaggtgggatgggcgcccttaggatggaaggagccatctgatttcatggactccatacagtaggctcgggagggctctccccctgggacatggttggccctgcttctgtacctttgccttgctgaggaaaggtctggaacctgggctctgccagtgtttccgttctcctggaagtgggtttgaagtaacaggggacctttcatatgggtgaccttgggtcatccggttggaaaggcttctttggttttgttgtgattctctttccacacctcgctctgttctatgcccccaggcaccggctaagaccacatcctcttcccatgccagcccccttccacagcaccaggggatgttcccatggccatactctggcgggcacaagccctgtagacagcatcatagagccagcatacatgcacaatttctatttctgccatcatcagtgacatcagctggttgttctcatcagagcaggtcctgaagtactgtcagtctccctagctatacaggtgattgccactcatggcctcacactgctaagttcctgaaccctaactatggctacacacatccccgtaagtcatggcttttgaattgtcctcttacttggctgggcatctcaaatgttatgtgtgtgggctggctacattctcagctgctcatgaggatgaagggagcacgttgtccagctgtagacggaccactgactggacggactgccatgctgggtataagcccatacagagagccatgtagcgatgagttgtttaggactgaagtacacctggtagctgcctcctgctggcagttgctgcttcttgttaagggtacttatgaggtgtttcaagtgtctctgcttggtttttaattcatgtttttcttccttttcccctggatgagtccatatgagtgtactgtcctgagaccagagctctgggatttccatcccatcaccccaaagtgccatccttcccttagggcaccagagtggtatctttggggctcattgtccttgcctgcctcggaaggtgatgcatggtccctgctttgaatatttcatggagttaagatgctcaaattagagatcgtctaaaactgcctgtcataggctgctgatttttgtggcccattaccccatgatgtctctgcctgccacatttttggggcagaagagtctgtactattttcagaaccttgctcctggacaacattcccctctgttattggggagtgaagggggtctcctttatatatatttgagtccatcattgttcagtttaaagttatttctcctctttccttttctttttttccttttttcttttttggagagcagctgttcaccctgcttttgctcagaaaaccacgacaaatcttactgaatcctctcccctcctttaaaaaaaaaaagttggcagcatttgtaaacctctctatctatattaaatgctgtaaacgtgaacttatctgtactaacgaagtggaggacacaccgtgtacagtgggctatagaagaaaaaccaaatttatagtgtaacacacatatccttgtctttgcatgtctccccaagccttttgcatctgagacaccccttctttcctttctttgctccccactgcctccttccatgctacgggaaaaaagtagagaagaaacaaccagagcacccatccccacttctttagtcttttgcctggaatttgggctcataaatggtttcctcactgtgccgcaccagaccccatgtaactgggaggctgtgattcagtcccctaggatccagctcacagtggtgacagcacttctggaggctggttttctggatggatgtcccccagggaagtatctgcagttctcccacttgagccatttcagccattccactaaagcccaattgagaggaaaatgacaacgggggagatcagatcctcagcctctggctccggggaccgcttccggctccggggaccgcttccggctccggggaccgctggatggggtgcttcttaccttccttgcctgctttcctgcagggcctgccggctgcccctccgcgcgccgattttctgctctgtgctcacacagtcctcactgccttttctgtccgttcgtaggtcagcaaaaccggtgccgagggagctgttcttgatgaagctaaaaatatcaacaagtctttgtctgctcttggaaatgtgatttctgccttggcagaagggacagtaagtaatcctgtcaccatctattaaatagtattatgggactctgcctttgggatttatgtattcttattgggatggattgccacacatcccagacgctcatttattttcctctttggaggagagattcctggctggagtgcctgttgctgggtgctccactccactaggaagtatgaatggtgttgctaacttcctgtgacacgggtcatagcatggatagtctttggcaagatccaaagacctggctgcaagtcctctttccacgtgtttgtaagtttggccagcttgcttctgtagtttttctttgaatgggctgtcaaaaccaatactccttcttttcttaaatagaaaacacatgtaccgtaccgggacagcaagatgactcggattctccaggactctctgggtgggaactgtaggaccaccattgtcatttgctgttctccttcagtcttcaatgaagccgagaccaagtccacgctgatgtttggacagaggtgcgtgtgggcaggtctcagaagccatgctctgagctacgtagtagagcataggtgtgaatgtcttggagcaatggtcaaaagggccaaaaattattcagttgcatctagcaggtgacctataaacttgagacattgtttagggaggcaacagggattgcattttttttttttaagtagaggtcaggaatgtgcctgtctgaagaatgctattgaacaaagcaaagcaaaacacccaactcattgttgcagctacttttgttctttgtggactcaaagcctaacctttagctctataggatttcgcatacataaatctcaagattgataagcacttttaactccagttatttgaaatttgaaattcatttcaacattattcaggaaagcaatcagaaactgagataaaggcagagtagaggcgtgtataatggaggaaaggaacccaatgcattaaccctgagggtgggaggcatgaggtgtgtgtggaggaaagcgcaagggatgaccacattctcactgtttgaaaggctggagtcaatgtgccctgcctctgaacgttagctgatgcaagcatgaaggagctagagcagtcttcatatgtgtggatcttaccttccttactcccaccctcaccctctttcagtttttctagacagagtttattcagtgtaatcatccctggctgtcctggactctttgtagaccaggctggcctcaaactcacagagatctgcccgcctcggcctctgagtcctgagagtaaaggcttgtgccaccacacctggctttcttgtctttcttgacacggtccttttcacctaccttaccctgctgccacagctgacctcttcagtcttgtttgttcagtttccagaccctgtcttctcagctgtgtttttgggtgttgggtacctaagcttgggatactgtggccttggatggtctgagcatcgttgatgctcattgtgctaattccagacagatgtgctggggtggattctcctatcattattacattcagtgctgaacagctgctgatctatctctgtgcgcctttactgcctcaggtgtcaatggggttcccagtgttcccctgttatagacctgggagtatgttgtatggtaatgcccaagaagtcatttcaaatggggatgggtgctctgtggaaaattgctacagctgtttgaactgcattgcacatcgtagacattttctgagtctcaacaggacataggattctttggctgtgggctgtctaaacaataattgtgttgcaacgttgtaggattaatctatctcttaaaggatcggggtcctttgtttcttcctaaatgacttctttgatttgatacaggcttgaggtagtggcattgaatcaaggtgacacctttgtttcctggccactgatccactctctccttacttctctctgagcctcatatctctctaccgtagagatgaagtggctccttccgaggacttctgggaggaggatgatatgagttgcccaagggctggtacagaggaggctatcactgacttcaagctcgccttaaatactctggcagtattgagggttggaaagatagtgggtaagactagactagaaagaaggagcagcgttgcaatataaaagacagtttgaatgaaacagcatttcacgactggaactatagggtaaagaaatactataggaaatttgggattccaggagataaaatgtaatatcaaatatgtttctaggtgaaatagttggtctgcttcttgtaccagaccctgaagtgcatgacgtcagctttccagcatgggacgtgtgcagtggtcagtaggtgcacgcttattgaacagtgaagcaagcgagctcaggttcatggtgaaggatcgtcagggagctgtgtcagggaggtgtcccttggtcaaccctagaagtcgacctgggtttgatctagtttgttttctagtcagtagtctgatgtatatgatagtttctctctctctctctctctctctctctctctctctctctctctctctgtccatgttaattgattctttagggatagtggatttgtccatgggctttctgtctgctttactgttaactatatgcactgaacccaactatacagcagacatggatctgatcatcagattagacatgatatcccagagtgaataggattaaatactgggctggagagatggttcagctgtttctccagaggtcctgagttcaattcccagcaaccacatggtggctcacaaccatctgtaatggaatctaatgatttcttctggcacacaggtatacatgcaggtagaatgcgcatatacataacaaatatataaagctaagaaagaataataagatcaagcgctttgaacccaaaagctgctggtttcgtcccaagtgccagataaccagtgctcattttattcttgttgcagaactgtgggcagcatgatttctgtgggtctcctgaggacacagaggaggtgtatatttctgctgggctgaaatgcactgatgtgctgagttaatcacagcacgtgctttgaagctgtagaaactcagcagcatccacaggtgcctgaagcaccctgggaagagcctggcagcctgtgttaggattttagctttagtactgcattctcaggggaaatacaccctgatggactctcatttgatcaagctttcccctttagttctctgagtgcccagcatcagagagcagcaggtagtccagatacctgagaatcagaaagcccaattaaaacattttgttgatctttttttttttctatgctccagcatgttattctttagttttaagttactctcttcctagtactttcttttctagcatttttcagaaaagatatttgtgactttcagatgtgtgaactcaaatcactccatgatcttcgaagtctgtttcatgtgccttggtttggtggaggcggaggtggcccagatcagtatgtttcggtccagcaagaataattcagtctgttttcttgttgactgtgagaggggattggtgactcggggagagggatagtatttgtgttcctggtgtgcactgctctcagaaggaaaccatgctaccactttaatcaagccacctgtcatagtgacagttggacccagcagagactgagtagtgtacatttaaattcatgtcacaagagtgtgagaacattgtacctgcagaggcagagtgagccacttgcgaaggtgcacacattggtgcatttgacataaaaccaagagttcagtcacctctgttggagaacctgttgctaggataccagagggtaaccatagcccttggaggaagagatgctgttcttcactggtcacgagagctttaattcctccttcatgactaaccttttaaggcctggagagtgttttggagcagaaatgagttctgaggaaagtgtagctgttacacagcagtgagactcgggcagatcagaaggtttggtgtacccaaatgtctaagctctttaatcaaacatgaatccagctattgctctgtctgtgtttatagatggctaatgtttgcactcagttgactgagtcaagtggatgatcctgggtaatgaacatggccttcccgatcattcacagagaggccttgatgagcaaaagctgacgtttctcagggagaactgaagaccagaaaacacacttgctctgcatttcaagctggctgcttggacttgacttagctttgtggcccccacagacacatgagccagtttccttagaaaaccaagaggagactgtgctgcatgtccttctctgtctctgcattccttcccccttgacctccgccataccaatttccccaataaacccagatagatggagatgggatactggactaccgtctgcagagaccacagtcctctcccttactctctctcccctcctctcctaacatttcctgtgtagagcatatattacagacttttcccttgcactgagggtgcgaggttgcttgtctagagcctccttattcaaatatgagtactctctggaacacctggagatcaaggaaagatgccaaagcgagaggtaccaggagcaagcatcttctggctccttaaggaggccagagtagttagaagagactctaaagacatccagtgtgcttttcacttagaactatggccagcgaataagtaagtatgagaagagatcagtgaggagacaggcaagggaggcctttttcaagtgcacgtgatgggaatgccttcaagagtgttaggtgggagtgctcagcctcttgaaggagacatgcttagtcctcttagaacctaagtgtgtacctcttcacgcgcatactggacatttgggatggagggcctgaaggagctgggaaaggtgatgacacttgagagctgaaaggtggctgtcttctcatttcacagtagatgtttcttatataaccacatcggcatttgcctccaaatttaagaaggtgtgctggtcctctgatcactgttggctatacctataacactcttccccaaggtgttagctttaagtctttaaaaaaaaaaaaaagcaaaaaacaaaaacaaaaacaaaaatccccaggttcatttcctccctggagggagaagagctctaatacccaggcaaacccagatgacacactactgaaatgatatttgaacctctgcagcaaggcaacacaggaaacaggtaccatggtaatagcatccacacagtaggttacctcttgcaagtggatcttctgttagggctgaaacaatattgaacaaggagctgagctgttcatatgagttccagttgtaaatctgcaaacaggtcagcacacattagggttaatcacagggtctcaccacttcaggagtaaatacagctccaaaggtcacctgtgtcggagacagtgtccccaccctagatgactggactttgctgctcttgccatgctgtttgcataacaacaaaccatcatgtgagactgtattacactagtggggtctaatctaccttaattagattatcacactttgttgtgaggcaggtacaatgcttcctggtgcatttctgaataaactttatttttaagcaatgcatgactgttagacttcagacaaaattataaaattggcctttagagcctttcccagttcctagtgtcttactgagttcatgtgtgattgtgaactaactgaaattcttttggaagctaagctggacaataaagacacatatctgggactggggagatggctcagcagttaagagcactgactgctcttccagagatcctgagttcaattcccagcaaccacatggtggctcacaaccacctgtaatgggatccgatgtcctcttatggtgtgcctgaagatagcaaaagtgtactcatatacataaaataaataatccttaaaaaacataaaataaatgagactcagcctagggttttacatatatatatataaatatgtaaacgtctatatatatatatatatatatatatatatatatatatatacatacatacatatatttaaaagacacatatctgggtcattggcaccaggctctgtattgacttatcatgtctaagtatgtacgagtgtaggcagtaaatatgtgggaaaaacaaaagatccagaaattgcatataggtggagagatgctgcctttctatataagtttatttctataatgcatttttattaatatagaatacatatagtaaggagcataacataattatacagtcataaacatttacaaatgcacacaaacacgtaaccatctcccattgacttagaagtctgcctcttgcacctgcttagccagtgctctgtgctcaagagtaaccagcatcccgatgacttcagcccgcatggattgggattggcatgtaaggcttttgaacctcacatgcataaggccacatagtactgttttcattcagctgtctttatgcatcattgtatctggaaattatttcacactgttgggcgtagcagtttagtgtttatagttatgcagtattctattgaatgtattcattgtactgttggtaggtgtttgactgctttcatttaggggctattgcaataacattacagtgtctgttgcctgtggatatacctgttgataagtgtagatatgagtcatggggtgtggcatagttatagcagacgctacaaaccacttttctaaagttacagttaggacctatactcacagcaggcggtcagaggtaaggtcgctgccctttctcactgccagcccttctggtgggcacagaaaggcatctcatcagttccctttccgtcccccagaactaaggatctagtgttctttttgcagtgcatcttggcacttccttcaggaactgcctattcaagtctttttctgctttttccttcttgatttgtgggagttattccagctaactgctatctatatgtattttagtaccttcccctgttttacaaacatgcctttttaatcctacttttagtgagggaagttttaaatttatagtcaatttttttcttttatgttgtattcaagaaatctttacctaacacaaggtcttgaggatattttcagtattttgctttagacattttaccattttcacctatgatgcatcaggaatagaattcttatgtggagttttgttttgtttgtttgtttttttaactgtacattgaaaggactatgtccctgctctgtggtatgagaacttcccatacatcagatggcagtggtgtgagtttctgtctggatcatttattcaggctatgtaatcactttaaggattatggctttctaagtactgatattcatatgtatgcatgcacatgcatgcatgcacacacacagatcacacacacacacacacgctctctctctctctctctaagatatgggagataacttaaatctatggagccattttggtagagtcatctctctttttcttagctcatttctccatcccctggcctcaggggatgtaaaagtttgctcaagtcccatctggagcagagaaaatctataaggatccagcgtgagagtgttttcctaccgtggcttgagcaccaggccagagtgggttatattctattccatcccctcttactctgttgtctctgcctagctctgggccctgttcgcatcactacagtggctcccttccctctgctctgtagtcaggccaggccagtaaggaagtgggtagcaggtgatggaaaaggacagaggggatgagtgcaaggcctgcatttccctgcaggctcattgtgagctggattgctctagagctcaggccattacagttcccacaagtaaggtttgtcttcaagctctctttctgaggcttcaccatgtttactaattgaggcattacatgtcccctttctcagcacctttccacacctttcttagacttggcaaactgctcaagttgagtgggtcattgcttcactgccccagcttattatagaaatagaagaaaaagaattttctgggcatctcagaaagttaccctgcgatagacttgatagttctacttgagaaatgtacctctgagcaacactgcctggagacagcacaggggctccatcttttcctctctggtaccatttgcagtcttcagggcactatttatgacttaaataaaatcagtagtcttaaattgtatccttcagtgacagcaagcatcttagctatgaggctttttttttttttttctctcctacttcctgacttaagttgataacaggggacacagccatgcctgtgcttgcagcccagacgcagccatagcaccacctgagggtgttagaaggcagggtgagaaagccagactgcaccaagtcttaaagtactaataaaattactgctattgaagaattaaaattgaagcagttctggggagagcagccttaaggtacagcaaatgagaattatcctaattctttcatgagtccagcactgatatcatttaactcctctttcaacagttgggttatttagttgtctgctctagaaattaattttgcaatggcaactgtagcactggggcggacggttgaattacttgcaccaaaatagaaatcatgtcccaaatgtcatttgatgacaacagtaattaacctggatcacacatcagctgtagcagcaaacatgacagtcctagaattgtttagagattaaaatgagaatgtcagtggcaagaagacagagcaccatgtattttcacatgagctttgcctgcttaacaagcagggagcaaacaggcgaggaatttactgtttcccgggtgtggctgaacccgtctgtttctgtgcaggcctaggtgagcctagccttttgtttaatctcacctaatgcagatgctgatttcttttcttctccccagcttctcctttcatcgactgtctatcacgcacatgacatcacacccctaagccacgtgccctacgagatcatgaaaaaaaaaatggtgcccatgagacctgtttgtcatgcattatgttatttttaagacattctgaatttggatatacaaatattaaaaaaaatcccaacttctggctatttataaacagtgagatgatttcagaataaccagccttttattctggtgtgctgatgcttgcctttgctgaggggatcattaggaagccatggtgtcccccagtcaccctctctcacttatgtggcccacctaccttatagccatgtgttggcatgtgcctaacactttggttctaggcaccaaaggcaaataagagaagtagctgattgttcaatttgtgtcgctgacataagaaaccccaagctgtaagaggtggggcactttgcccatccttgttggtatgttcctagtgttttgtaagtgtttaccgagttgattgggaattctgtttagaagactagtctggcagaggtctgtggaatgcttaaacatgctgaacaccggggtaagcctctaacccacggcctgaagacagactgtgaggacacagaggaagttagacaaaatgggaccctgaggcacaatctgaatgaaagtccattggactgtgaaggagaagaggaaagggtggctctggagccttaagaaataacagtgtgaggttggagcaatggctcaggggttaagagtgcttgttctctcatgaggaccaaagattagacctcagcatccagtcagatagctcacagcccccagggatccagtgccctcttctggtccccgagggtacaggcatgtgcatgcatgtgtgtacacaccccccctccctccactcacctatacgtacagtcacatagacatgcatacatagaagtacacacacatactaaaaataagtccttttaaaaagctctagtaagcattgccagtgatgccgcttgagggctgtaggtaggtgccacagggagtctttgccattccagttccttttggatgtgaagggaatctgagacttgttatataaaatcagtaagggctaatggctattcttggaatttatttcctgtgttttaatcccagagcaaagaccatcaagaatacagtctctgtgaacttggaactaacagcagaagagtggaagaagaaatatgaaaaagagaaagagaagaacaaggccttgaagagtgtcctccagcatctggagatggagctgaacaggtggaggaacggtgagagcgagcggagtggagagaaggtttcctccttcctgggatggctggcatcttgggggactcttgggaaaggggggtgactgtggaagtcaagcctttccaattcctgtgatggcgagtgttttattattttgttttactaaagttttattattcctggccactgtgccccagctcattccatcccgtgacctgtgcacagtggggtggaccaagtgacagggatcagttgctcaattagtctctttaagtgtgtatatgtgcgtgtgtggattgaggggtgcacatgtgtggggagggggtacatgtttgtgtatgtatgtatgtgtaggggtgtacatgtatctggaggtgtgtgtgtgtgtgtgtgtgtgtgtgtataggctagagaattgctatgtgtgttatccccctcctttgcaacaggctttctcctttgcctggagctgacccattaggttagactagttcgtgtgccccatggatccgtctgtctccacctccccagctctaggattacaagcgcatgccaccatgcctgacatttttatgtgtcctcatgggatagaactctggtccttgcattgagcatcaaaggctttcccgagagagcagttccccatcctggctagagtctgtttcagatgctctgttttttcatgttgctgtccttcatttcagggatcctggcttcatggttacaggagagcttctgagactttttttttttttttctaataccaattgctttggctaaatgaaaactaggatttgcttcagtcttgccatttacttgtgggtaaatgtcacctctggccagaacttgccttttctgacctgcctcaccattcagttcctcagagtgagacatagtgggctgaagaaaccctttgctaagatggaccctgacaggcctgcttcatgaccagtttttccgcccccttcttcagtctctttggtttgctctataggagaaaatatctcctagagctggcgtgaagcgggtgggtgggttgtgggggaggtgtaaggggtggcttccagattccgggcagacatattattttggtgactttagcattatgacagagctcagacggtagcagtctcttttaatctggaagcaaagcaagttggagctgtgtgtcagaggacggcaatagctagaagtcatttgttcctcagatcccttgcttccctgtggtgtgtgtatttcagcagctactgcagcctgtggtgccctgagagaaggggcctggggattgctgagctggtctggaggtagcagggtctgtttgcagctgcgcagagagctggaagccgattgctggtgatggtatttgttgctgctccttgctagtaaggattgggtatcaacgagccacttattcacttgagaagcaattacgtggcaaacaagaattcaagagaggatcaaaatttgacccagtagcctaaataacaggattttcttctcttcggaagcatttctagctacacatgtgtttcaaaaggtgctagaataattgaataactcagcacctgagctgaatgatgatccctgcagtttggcaggagcagcagagtcgggtgtgtggaaattgggatgggaggtggctatgggaagctttgtggtggctctggaatcctttcgggtcaaatccctgtgggatgactcggccacttagtaaagccctttggtgtgacgttggctcactggccctagaagcattctgagttggacaataaccttgttttaatcgtttctcatctcttgcccgactctagcagaccagttctccaacacatatccagtgccaccttgtggaatctgctctgcctcatttgcctgacttcctgcatgcctagcatctttttggggtcctgcatcctattggcttctttatatgccaccactttaactgtctgttaaaaagtatgatttatgagtcttttggtggaattctacataaatctttaagctacataatttggggaaagtaaggcatagtttctggtatatcacagacctacaataaatgcatattacacaattgtgcgcctaacatggaatctgggcatccgggtgagacctgtgctttgaatgtaaagggaactttcagtcactgtcaatacatgtatggtaatagtctatgctgcacaccaagaaaacaaagtgtgtgtccagagattttatagcaggcagttaacctctttgagaagccaccgagggcttccttgaataaacaatatagagaattgactggagagatcagttagctgggtgaaacaggagatttaaggtgagctccagcttcctgtggggggaactgaattgactggggaactgagggtgagagcggaagaccagtgtagggtgtgggctggggaagcagtggtcttgggtgaacttggcaggtagtataggaattgttcttcaagtaatgagaagccactcagctatagaacacttcagaagagtggcgttttaaggtctcttagttgtgctggagaaaggactggggtaggcagaagaaggtgtggtagaggcagggagaaggcagttaaactgaaaaataggaggtagaatggaatgaattggattggcattgaaacagaaatttgcagggtttggtgaggactaaccatgcagggaaggcggtgtcaaggtggttctgaggcttttgtcttggctaagttggctcatagacagaactgttcccttagactagaaatacaggaacagagccggcctggggagcagagcaggaaagagaaagcctggggtgaccagaaagcatccacaggagggtcctgcgagaaggttgttctggggctcttcagaactgcaagagggaacttgagtattactgatctttcctgtggttgaaggcataggtagaggcaaggctcctataggtgatagagtggagagggaagagaggaagtagaggttgacagactcctcccaacagcctgtggccttgtaacctctgagcagctggatgggaggtgttctgcagagaaccttgccttccctgctagtatttgtgttttaaaggtgacattactggaggcaatggtttgtaagtgcagagaacatggactgatgggagagactacgggtgatcagagagcagtgagggagagtgaggaggctcgagtagtgctatcccgaaccactctcggctccctgtacctgactcctgaggcatggtagccatgtggaaaagaaagctggcaggatattgccaagttccttttgaattatgggatagattgttggatctaaacttttaggaggcagatacttaatttacttcagtgttccttgggtactgatatttctacattgggatctgaacacgctctaggagccctgacaatgggtactttccgtacggaagatactcctgtccttgcatggtatgcgtataatttaaaagcctcactgctccattccagctgtgagagagcaaggatgaagtgtgtgcacacgtatgtgctgtgagtgcttggtctgctgcagttgccatcacagagaatccagtggcaaagcaaggcaggaggaaatcaattacaaatcaggtgcagacagatgaatggataaatgaggacacatgtctaacccagttggtggtgacaggtgagaaagaggcatgccctgttacatatctagaggctgatctaaggtctaacccctcctacctccacctggaccaagtttcagccttagaagcttgattgatactatacactgtgagtttatgttccctctaggacacatgttgaaatcacagatcctgaggtactgggtgttggtttctttgggagttgtcctagttaggacttctcctgctgtgatgaaacaccataaccaaaagcagcttagggaggaaagggtttagtcagcttacactttcacattgtagttcctcactgaaggaagtcagggcaggaattcaaacagggcaggaaccaggaggcagagatgatggaggggtgctgcttactggcttgttctccttggcttgttcaggtcactcatacaaccctggaccaccagcccagaagtggccctactcacaatgggatgggccctcccacattaattagtaattaagagaatgctgtcttttttttttaataatacaagtaagaaataatattttattttcagaacagaatcatgaagcaatattacattttttttctggccttctgtgataatgcatgcacatggtgtacagtaattacatattcagacaaaataccaatacacataaaacaaaaacatgaataaaaaaattaaaattaataccaaggtaaaaattaaattagcagacctctacatcatagtactcagaaataatccatgttaacaagttgtctgctatgtatacacatatgtaaaagaccttacaacaaatgtaatgaatttccacacattatcatcatatacagccttttaatatttcttacactaaatatcagtcaagttacagtaaattcttgaactgctgtaatggttggtttaataccacagcatcgacatatacatccaacacagatttttaaaagagagtgaagacaagcatttaaaaatttaagaaaatgtaaaaagtaaacacaaagatatttaatttttctccttattctgcattgtcacagaaaaggtagggatacaattttgatgacctatttttaccttccatgcactttgatgtctgcatctttgacttcagaatacatatctgtaatgtcagattatacaatataaattaagtataagataaattaaataaatgctctgatgcctccatcgcagtaggtattgttcatcattgctttgtctattcagagatatttatgtttctatatgatacttaggattattattctatctgtatgaagaatgttattgtaattttcttaggtgttgtattaaaacaataaagtgtaaaaggtcataaacgtaccaaaagctccaggaaccttacccatcacagaaacacaagtcaatactacactgagactttacttcagcatagccaacaatggccagcattagtgcaacaaatagaaacaatgttttgttaggctatggttatgtaggatgctgcaatatcgcctgctgctgggaatgggaagttgtcaagtccttacagaagccaggattgaggttaagagaatgtctgtcttagtttgggatttactgctgtgaacagacacaaggcaagtcttataaaggacaacatttaattggggctggcttacaggttcagaggttcagctcattatcatcaaggtggaacatggcaacatccaggcaggcatggtgcaagaggagctgagagttctatatcttcatctgaaggctactaatggaagactgacttccagggagctagggtgagggtcttaagcccacccacgcccacagtgacacacttaccccaccaaggccacacctcccaatagtgccactccctgtgccaagcatatacaaaccatcacaatgtccaatgggcttgcctgaagtccatttttatggaggcattttctcaactgaggttcccatctctgaatggacactagcctgtgtctaggtgaactaacgcaagccagcacagaggtgactatgtcttgaggactgttgcctccgtcatcccatgagactctgctgctgcttatttgaggataaaaagaggtgtcatcagcaaacccagaagatctccctgaccccatccatccaagaacaggatgtctgtgtcgccacacggacctccaacttctaacttccgagttaggagaaatggttctgttgtccagaccacatcctgtggtgctttgccatagcagctctgagagactgagatggcagcctctttagcactgcaagctggactgttctcccctgcatatagttgggccttggttctcagatgaggacctgtgacttggagcgtatattctgcgagcctaattctttctggcattgcttctgaggcatactagccctctacacatgcatggagaactaaggagaggccccgtcttttcttgtttgtttttttgtttttgttttggttctctggctggcctgggactcagatctacctttgcctgcctctgcctgcagagtgctgcagttaaaggtgcgggccaccaccacccgagcaccccttttattaaggaaggaatggggagagtcacctcacgaccatggcttcctgcagttattgtcctctggttgcaagcagtggcagctgcagcagcgaccgactctgctcagcctaaatggaatgaaggcctgggaaggatataaagggaacacagcatctaaagatgctgcacacatgtctgcgcacatggctgaagtggggagcaaccagaggatagccgcctttcaggtgtttgcttcccaaagcacttggagatttggaggagcaggatagacgtggccatagcgtgctttgtgtagtctgtgaagggcaggctactttgactgtgtgataggtaaagcctgagtttagtccctgggtgaaaggagagaactgacttggtgggttatgatccacctcacaagtaggccatgacgcgtatgtacgtgtatggacatacgctaagtaaacacctacgtataaattttgaagtaaatcaagtcccagcctcatagctcacgcctgtcctcccagcatcttagaggcagaagcgggaagactccaagagaccgtgcctcaaagagagtcatgaaaggggaaacaaaactatactttttctagtttcaactccattttttttttttttgggaggggaagcaaggatatgtgaatgtaagtgtaatttctaagaaaaataaagggggggggaatcaaaccaaaaaagagaaccaagtttaaaatttaaaaagcactttttagttttgcaattataattctcttacatcatttcttctgccccttccttccttcaagcccttcccacatccctccttgcaagcccctcccacatccctccctgcaagcccctcccacatccctccctgcaagcccctcccacatccctccttgcaagcccctcccacatccctccctgcaagcccctcccacatccctcccagctcttctttaaatccatggccgctttttgtgtgctagttattactgcccaacttacatttttacagatgacacgtgtttatttgcatgtgcgcgcgcgcgtgtgtgtgcgtgtgcgtgtgcgtgtgtgtgtgtgtgtgtgtgtacctgtcacactttactctgaactgcgagttcagaggacaccttttcatgagttaactcttgtgccccagagactgaattcaggcgatgaggcttggctgcaggcatctttacctgctaaggcatgttgttagcccctaagacaagatttttacggaggttcgtgtcagggagaaaaaatgacccaaaaatccagctgttggggtgtcagggaaaggtggtctggtgtgtctgcagagtctctcctgttgaacaattaggtatacagtgagtgtagtgggttcctattgatgctgtctggggaaatcataacagtaaatgctttcttttgtttggttttcttgagacacgattttgctgtgttgtccaggctggctttaacctttcatcctcctgcctcggcttgcccagtgctgggacttcagtaggggaccactgtgcctgttgagattcactctgggggaggtgctggtcccctcttaggcttcataagtgtgagctcacaggaattagcatttcagtcaagatgtctaatttgttatgtgttcttccttccttgagagtgcagctaaactaatagaaataccgactgctcagcaaaccacgtggcctattcaaaaggtcatgaatgtaaagaaggccacagaatctggttagcctgtgcattagaaaattgctgtagacaggattaggggctgcagaggctgcttacaatatttttaggaagagtgtgaaggatgctatttgtatgcaaagcagcctcataaaggaatgatttctttcttttttttttttttttttaaacttcacatttatataatgacgtcttgttgccagctgttcctgcccatctggcaacttaaagatctccttttagtgtcttcgatacagaaattgcttagtgataggtttgccactaggcccgtttaattggtattaaaacaaaacacctcgtttgccagatctacagtggtttctggtggaagctgtgagtgacctgcaaatccctgccctggagtggctgagaaaatgcaattacctctctgtgttctccagaggctttggggactcaacttaggaaaagaattactagcttgttgctatttcatgtgtgaaattttaatgatttcctggcagtctaatagtattcctaaagaaaaaaaaagtccaaataaatccattaaatccattttagaatttttaactaatagacctaatgagggtttttgttctttttttttagtctgccattctcatccactgaaattgatagattctcccctccacccccaacccccccttttcagaaatgttatttatgctctctggggattttcgttttataattagaaggttctgcaagccttataggtatgctctaacagaatgctcctgtgtaaacacagatctttttagtccttaaaggtaattacagctgacaatagtaaatgccaggatgcttatttaaggacaggaggcctttcagcgtaggacaccagacattttccaaggttagaagctcttctttaggcagcagatacaagcctcgtgggctggactaaaagaaatctgcttttaataaaccagagcgaaaataaaaaaccctgctaatctccacttggtggtctctctctctctctctctctctctctctctctctctctctctctctctctctctctctccctccctccctccctcctccatccctccccctggttgattgagagcattattcctccagggttggtttgcagccctcctctctgttacaatcagttattccataatcatctcgtggagtacactgcagtgcagggaatattctcgattaacatggtaagattgccatggagacagattgcctggtgtcagctcttgcatggtgtttggaatttacagtccctagacaccggacatcgtggttaccagggtcgcttctggaagtcattcccctgccctttgaagggcagtggtgtttggttcctccctgggttgaagctgtgctgcctttgcttctgtgtgtggctgctttgttcagctccgtctgaatggtggttgaaaaaaaaaaatcctgcctgcctgacctttagaatatgaactggcgagagcttgctgtttacatgtagctttgtgggagatgtgttgacactttgattcagagaagtgctcaggagaaaccagaaaggctgctgtggcttccaaacactgttttcataatgataaaaataaccctgaaatggacttgcataactatttggtattttactttgtaaaagaccgcttgggtactaagttattttgaatatgctagaaaaattaattgagactcagaacgaatatctgaactgccaagcatgcgtagttgcgcactcctcagggagcaggggtggacttcagactgtgatgctggccgtgctcctgacatcctccctcttcctgcatctttagagcaatttcatgataaaaggagccttgcttcctcttctgtacagaaagcaaatgaagaagctaagcaggctacgtgcctgcgagtaattagacctgtgaaaatgtgcagcacggcttcaggaacccgctgcagcactagagatgtttatgagagtttattgatcattttcaaggggaccatagcagcagggtcagctttctggacctctgcaacctggagcatcacctacccctcggtaatgatgctgtcagaagaagacaactttagggggaatcggatctgggacttggtttgagcaggtcacttgtaggtcacaggagttaatccctggcctctgtctgcccagatgaatttaaaagggggtgggggcagccctcagttcatcttgcttacagatatcattgcctgtctagccatttggaaccaaagctcgcagggaatacatctcttgcaaatgtcttggatcttatctctttctctgcagcgagtgtctgcgggtgatctggtggtgcatggagggtttctgggtcaggtcagtacatttcagagtttcaccttcatcgggttgaagcaggaaggtcaaattaatagtgggttgctgtgtttcccagattttacaaactattcctgaaaaatccaaaaaataaccatatgccggactttcacaaatgccagtgtcagattcctaagaacagaattagaaagaaacaagaggttttaatatatgctgtgcatttcctgagtgtctgagggcacattctgaattatctgggtggttagaaattatgtctgtgtcttcatccatccactcacccactcaactgtctgttcatctcgtcatccatcttgcctctctgatagcccatgggtttaacggactgtagagaatattgattctttaaatgagtgaaattcattcctcatgctaacgttgttgatgaacgttttgaaccagcgattggagctgggcgatatactgatttgattcaggttcagctcagaggtcaccatgatctggttttatttcaggtcaataattttagaggaacgctcccacatagcgtgtagtccagttgacggggaaacacaaggagactttgttttacctgcagtgaagcatggcttatctagggcttgtttcccgttactgctttagatgtaactgatacaaaagtgaagtcattcgtgttagctttgcttacatagaagcctgcacacaagccttaaagccagggcaccccagtgttttgtgtatgctgagataatgtgcgctgtgttcaggtgggttcctggaggcatgaaatatactgttcctttccccgacttttggctcagggcagtttcctgggaaatgtttgcagaacagatattacgagctgggaagctgagtaaggtctgaggtgtcctgaggctcaggggctggagtgaagttgctggctacactgtggtggagaactgtctttggtgtgggtttgctttcaagtattccagctgaaagatggagtcaggctgtgtggtttccatagaatctgtttcctacattctgtctttgcatcatgattttcctgatggggcagcccctggccagcttgaaatccgtgccttttccccctgtcagcattgtcaaattgagtgcttcctttgaaggcccagcagaccctgctcggcggattgagaagtggtgtggggattccagattagctgcctttttttttttttttccctgagactacctgacatcacaagaaattattctatttgaactctcctgcagagccaattaatttgggcttcctgcggggagagtgcggtggtggagctcctgatctcgaaggaccgatccagtccttgagtccaggttgccctaacttccaccggctcccaagagtctgagtttgggaggagtggagtcccacagcgttctggttaaacagtggcgctgtgttccttgctttggctgtttctactaatgacacagtaacataattaattggtaattagggtgcctcaaaggtctatttccctttgaatcggtgactagagagaatatgattctagtaaagcactaatgtatttctccacaaaaggaaacatgtatgcaggagctcgcaggcagtgctggggttggagcagttggatgagctctgtggccagtgcagccgtttgatttctgccatgcattcttggtctaacagtggtcgattagctacacctttcttcccaagcagaaagaatggactgtagctctacacaaggactctctgttgtgtctgctgtgtctttgtcactgggagcggcaattcttagagctcttcctggagggttgcatgcttgatttctttagttctcagcatcctgcttgctgtattttctcaggggaagctgtacccgaggacgaacagatcagcgccaaggaccagaagagcctagagccctgtgacaacacacccatcatagacaacatcacgcctgttgtggacggcatctctgccgagaaggagaagtatgacgaggagatcaccagtttgtaccgacagctcgatgataaggtctgtggttcagagcaggcgccccatctccgtgggcccgaaagacgccactcagccccagtgggccagttaaagagataagttatctcctaatggtgaagagataagaggaagagttgattgtgttgccacatcagggggaagaatgtggaaggggctccatgaccccaaccccatctgcagggcacagacctgagcattatgtttaaataggggagacattgggatggtaggcagtgtgtggggatagcctcagttttggttctactggatgcttccaagaactattgcttgtgtggacatgtcagttcctaactgcccggagagctgccatttgaagactgctctcgccctgtgataacgtgtctcccagagtctgttgttattggaatgcaagggcactacaggtttgggttaccagctacagaccttcaggtactctttgtaccatgtgccttgaaaggggatttgataggctaggtatcatgcgttttagataggccctccctgagtattaactctgcttctctgcggagttgatcaggtgactggcagaaagtaaagagagatacaaaatgaagatagagatggtaggcttctatcctgtttttccttgcctcgtggggttagtgctctctcagaaggcagctcctgtgtgcctattgtatacattagccagagactggtagtcttcactctggtacaaagactgaaggtggcacttgcagtcagccccctggagctgaggtaggctgcagaccattattgatgtatatcttcctgatatctgttttctagcttgattactacagaaagttataatcaaaaagagctgggggaggggagagttggtctagatagacaagacctcacttccagaaatctgggaagattattacagaagaggacggcagtgtgagagtatgtgggtgtgtttgtctcctccttccttctccgtgcctttcccctctcttctcagagaagtcaacagtagcagccccactaggttcaggcgactcctttggctcaagtgtgaggctgatcacatagctgcatggccctgagctcggacctaatcactttaatgactgacccctctctccttgtgaagctcttcccggaggcagactaatgggtgatgcagtttgaccatgttaactggggttgctttctcctaggacaaactcaaatagtcatgtgactagagaaaagattccttgaacagcaggtctcactcatccccagtaaagtccacttaggaaccccggaggcccagaaacttaaatcagtgcgccctgtgatgctggcatattgcccttgggatatcctaagcgctttcagttcatttnnnnnnnnnnnnnnnnnnnnnnnnnnnnnnctatggggacacctctggcccggatgtaatagttttgttctgggaatgccaccattaatcttacagggctctgtctttgggttacagcccagagtctgctatcacctttgcaagctgaatgtgactggttgaggattctcctttgcttgtctgtggttctccatgttatatgtcacccaaacattaaagcagggtgaccctaccattccacaaacacatctcagaagatacccatgagaactgggtactttgcctttcgtgctgagtccccccccgcccccctcccccccgcctgcctttttaaacctgggtaattgtactcaacacctcaatgcaaaagtagatcaatagtaagttaatagtttttgcaaacgtattgatttctccaaagaactgctattgttttcaacagtgaggaaaagccacacgcaatctcttcctcactttacagattcccacatgtactgattcttggatgacaggtcagaattggttctatgatgctgagagatatgggagagagtggagcacagaggtgatgccccggaggacatcaaagctctcggtctactgtgccgcttgactgtgtcttattggccgtcattctcacgtgacctctcagactctagaggaaggccccatgcttccaatgatttagatgtttagattctttgagaatgcatgagttgggacacagtgtcttcttcggttattgaagtctctgggatggagtggggcattcgctggctggtagcatgtctttcttaagttttcacagcctgtagttgacagagcaggagcgtgttttcctagctcttgaccttgagccccacactcacttcattttggccttagccctttaaccaaggaactggttaggctcagtacgtctttctaggacacagtgggagaaagattacatagtttctccaaatccctctgtgctattcctcatgggtctaagaagagataaacgcaaggtcctgatccttgatggagaagctcgcactttgtagtagacctgcagcttaatgataagaggcgcagggacgacgcccgtgcttacctgtacgctattcttatctgtaactgagggctcacagatgtcacttcaaagattgttatggagactaaaagtcccaggtagataacaggatgctgtaaataccaggttgctcatcagtctcctctgtgggttctctttgcttgatgtagaagacgcctcatatggggccgtgaaaggctgtcagtacagtgggaggctgggttctagagtaaaaatatacacggtggctttgtgttgctcacggaaggcagtaaattcaagaactgtaagttgactacatactgtactaatgactgtttatcaaaaaacatatccagatttggtgactttttgacagcggaggtgaccgtatcatttcatgtataagaaaaatccaactacgaaattaatttctgaaaagtgccttgaaatcttttatctcagagtgagcatgcttaaacatgtcctgagagatacactcgacgtgcagaaagtacagcaagcacaccttattcagaaaggcctaggaaattacagtgaaatcagatagacaacactaattccttagaaggttgccctcataaggggcaagcctactcgaaggcttgtctctaagcactgatttgccttctcggagagctctgttttaactctctggatggtttcccatcacatcttagcttgtcacctgtcggggaggaaggctacatcttcaggctttgccaagagtgccgtgtgcaagctcaagccacatcaccctgtcccttcttatttttgtccgtcccttgggggcagttgtggattttgggttgttttgcttcgttgcctcggggaagtgatgaggttgaactttttgggtcttttattttaagctctttactcttcttgtgctgaggagcagaaatataaaattggtccttgtaactgacatgctaaatgtatgaagctgaaggaaagcatggcctagaaaacagtgagttagctgtgcaagcgccagttcttggcagttttgctatgctgtaatttctctgattctttttgccagaaggatttggcaaggagggaaataatcaatattctattcaccatggaagaaacatcggtgtataaagttcagtgcacacgagcttcctgagcatactagtgagatcgagtatataggaaagaccagagacacaggacgagggtgtgcagagccttccctgcacacgtgagagtgctggtgctctggagggtaccagctacaccatccgcttaatcccgtgccggtgatggcgtagactccaccatacatggtgcagatgtctgtggcaaacaggttctgtgaccaggctccgccattcacctgcctcacctcacctctgaagcggatccaaagtgcaggagaagggtccttcaatgaggaaaacactggcacaaacctgtgtttgaggaaaaaaacttgtgtttgaggaaaaaacctgtcacaaagacaatgtaatacactgagctgttatttgactgcttgggggtgccagccgagacgggcattccaataggacttttataatgaaaggagatgtgagcctggagccacattgtcattttttttttcacagaatgtgcttaaaatttcctttgaaatcatgaaaacagagcaggaaaggccacattcttccctagtggttccgcctcaagcctgctgcctgcctgtccttcactggaggtggcttgctggtgggggagagaggcaggcagagcactcttgctttctcaatagcaacacctagtggcagtgaagagagctgtcgttttcctgtgtgctcacccagccggctgcaggactttgcttgttttgcttttcaattggcaagactattggttgcagtcaagagggccgtctattggagaaaactccacggaagctcgagtttttttactctaagtaaatgggcatggtgtagtagccctttcttcccgtcacttggcaacattcctggtcacagatgggcttgccagtttacatctttatttggggaaggatgtctctgtagtccctttcagtcccgaagtatgagacccctggtttctggatgggcaggatttgggttctccaggcagatgttacctttcctagaaagaactctacacggcagattaccaagctcctggaatggcccctgctgcactttccccatctaatgagtgaactcgggactggcctcttggtgtctgattctggaaggggaaccaggatgtcaaaaccgacacaactaactaaaaattaaacatgatgtttcatttcaggatgatgaaattaaccagcagagccagctggctgaaaagctgaagcaacagatgttggatcaggatgaggtaacagacacaatgaattcttttttacagaggggtttttttttttctctctctcaatcacttttcgttgataatattagtcctagaaatacagtttgcaaatagccttttttttcttttttttttcttttttttaattgggtatttacttcatttacatttccaatactatcccaaaagtcccccacattctcccccacccactcgccacccaccccaaatagcctttttttaaaaccttaaagcgcatggagatttcttggtcgcccttctctcagggtctgctaaaggttggttgtggcaatgtgtagccagcaagctcctgactctgtagtactctgagcctcagggttgctctgtgccgcacttagtctttggggggcgggcagacacctctgtcccggggagggtggtgcttgctcagtctctgcagcagcatcccgttattttaggctacttcacctctacgaactgcctcatagacagaatggtttttggcatctgagtataattaatcatattcaccccgttagcctctcctatctcaccggcctctcctgcttctctgtttcctttcccaagccctcaagagtccatgtagaacagaaagtacgtggcatttgtcttcctgagtctggcttattttgcttatcatgatgatgtcttagatcctttcctacaaatgacatgatctcctatttctttactactaagtaaaacttcattgtgtgtatttatatatctattaatcgtctgtctgtcatctacctacccatcatatatttacctacttgctgatttgcctgtcatccatccatcccgtctacgtctgtcatactttctctacctagtcgtctgttgatgggcacctaggctggttccgtaacctggcagttgcaaaaggctggtgtgtgttttagcatagactgtgtcctcctgttctgccctacaggggatacacaaacaaaatcaaaagtagaccatcaaagaggaaaggcagctggggccgtagtgctgctactctgtatttggtacactaaaaaggaggccacctggtttcagcacccccccgccccccgccggcattcatttctaccacaaatgtcttttttgcaccgttctgcagtggattttacaaacaggaacccaagccaagcacagccagccgatctaccagagacagcattctcttgctgagatcacctaagtatttttctcttttgtgctttaagatgcttcgttgctaaagtgcctttggttggcttatacagtgccggcaggtggcagagatcgatgtcccagtctcagcccccacacccagggagctctgtaaccatttccttcctttctgcttcccatcatctttccagtgtaatgagtgtggttctgcagggaggcaggctgtgtctttggagtcatgtgaaccctgtttaatagattcctaccttagctgtggttgtggccacttatgttccctgttgtccgcttccacatgtactctgcatctccaagagtggttcagctgccttggatcaattccttttgttaccattcagactttaatattttttccttgcaaactgataaatgtccattaaggaaatcagacaataacaatggtaacagctacatgaaacatccacaaacccaggacctcattttaccatgtgtatagattttagggtatattcttctatacagttctgataaacagtaaaggaaagtaacttcatttcaagtactgtttgggtgattttgaaatgaacttaaatacaatatgaaattgtggcactgtttccagcggctctgccagtgtactgccactcattaaaagcagttctcccatcttttgtttaacatgaaaaagccaaccagctgtagtgccctggtgtacgtgtgtgtgtgtgtgtgtgtgtgtgtgtgtgtgtctcagtctgacttagagcataaaattcttaaaaggtaaaaaagagaaaagatttttgaaataacacttgaaaatgtgtttagcatctgtaacacacggtgagagttctccacaatctgactgctcccaacttgttctcccggatctggttttaaaattgctttgtgcagggagagcgcaggtcgttgacatataattagtgcactcacctggccttctccttgccccagctcctggcttccacgagaagggactatgagaagatccaggaggagctgacacgcctccagatcgaaaatgaggcagctaaagacgaagtgaaagaagtcctccaggccctggaggagctggctgtcaattacgaccagaagtcacaagaagtggaggacaagaccagggccaacgagcaactgactgatgagctggcccagaaaacggttggagcaatggtgttaaagggggcggggcttctctgttaacaaatgggaaggcagttggctgagtgcttatctgtgtaagacttggtgtgctccctgaggcctctcctccagtcccttcaccacagactacccagcacagctgctttacacccaggaagctgatgacatcagcaagaatgctttctggaaagggttaaatgcagatgctagatccaggaaaagcttagtgagaagtttgactttatggctcttttggcctcaggcgagatttttaaaccgtcctgagtattcattgctttatttctcaaaaacgacaataatgtgcttcttcatggcacctgtgttagtgacactttacgtaaagcacttagcaaggacctctgtgtgtggtcactgaatagcaccgaaagcgttgttactaaagagcagaggcaggggatgcccaggagttcagcagtccacagtttacatcctgctgaatgacagtgttccccgacttcccaccctcttgtcctagtcggaaggacagaggtaagctggccctgttcactggcttccagccgagggatcgctgtatttctggttcctccctgagagacagctgttgtgggttttacttggtgggctagtgacaggtagtctgctgtggccggtgagcatttggtgatgtggcggatgccatgccctttgctgcctggagatggctcacagagaaattgagttgctgtagcctggtgtccttggtggctctgcctgaaggacctggtgtcctggactgtgccatactaccttaatagaaacatcagtcccgggcactcagagcagggtggggaggaaagcactggctgctggcagtggagcggacaggaagtactatttactccccacatcctactgcatcggggaagaaaggccttcctaatggtttccatgggacagggctgctatgtctgtggtattaaataaggtgaaacaaatagttggcagtgctgatggactgtaagtccctgcagactcactgagagaggactgccactctgcctctactcagtgtccccctgggttcctacagcgtgtcccttctgtgttgtacatctgaaagcaaggcaagattttctatagtacgcttctcgttttgtgtcagaacaactattatcagactgctttaatatactatttttagtaagtggtagcgactcactgaaaatgcctttgaattaacttgcaaggcccggggaggagaggacttccttctgcagcacaggctgttggtaccaagatgctagaagagctacgattccagtgctgcgcctgaagaaggcattgcttctcctgctaacaatcggggtggggggatagaaaagaggttaatttgatgaagtttggtgagaaaatcgagcttttgctgctatgaagaagctctgctatggaacctgagtaattctgaagaattatagtatttaatttggcttccctgaggactagaagatgttctaagttgttacctatcctcattagtgtttgtctgggctattgattccagaccccattactcagggtatttggatgggacccagggaggagatttttgtttgagcatggagctggggaacctgaaatagaacaagggggaagaaacaacctttggtaagttagaaaatgtagttaaatcctataaacgtagggcctctttttgcgccagtgtgtacaggtagagaccaagtcagccctcagcatccttctttaaagtgtgctctgtctttttattttgagacagtctcattgttttggaactcactgagtatggtagattgttgtccaatggccagaggaatccttccagtcctgggataacaatggcgcaccaccagacccagatagagcttccaggattcaaacctaggtccttatgcttgtgccccaagcaccttacagacggagctctctctccaacctcttatttatttaaaaggccttactacaatttacttatttttatgttcacgtaccatggtacctgggtggaggtcagaggacagtttgctggagtcagttcttaccttgacccagtgagccctgctctgggccctgaattcatttacagtaactcactttgctagcgtcgatataaccaataataataataataatacatatctagtaataatacatagctggttttacaaggtaacatctctgaattaagtttctgtatcagaaccaagtgctacgcagcagtcagccttcagagtgcttttccactgagatcagaggagtgattaaagagctgggtctggcatgggctgttgagctctggaggtcacaggtggaaattcatgggccaccttggtaacctgtggctgactttgttttccagacgacactgacaaccacccagcgagagctgagtcagctgcaagagcttagtaaccaccagaaaaagagggccacagagatcctgaacctgcttctcaaggacctgggggagataggcggaattattggcaccaacgatgtgaagactgtaagccagacttgtgttctctgttcctaccctgactggtgtgatccgagtcaagctctgcagcacctgaggctcagggctgtactctgcacctggcgcatgctgaaaaaggagagctggcgcatgaagcaggggctgggggaggggatggagaggaacagtttgcctttcagatctggggggcatcttccagtcttggttggttttgtgtggcttgtttttttttttctttagccttacctgcaatgctctcacactggggctcagctgggagaagctgcaggccaggtctcagtccccacccttccccacccccccagcccaatgcagtgagaattctccagccaagcagtacgaattgagaaagcttccagctgaaagtcataggcagctagcaggggctgaaagagtaaaccacacttaattatgtgtaacaggaggaggctaggccttgttactcagggtcatctgcatcacctggggctaattagcaatttagaccccaggctgacctcagacatactgaagcggactctgtgttttaacaagatgactcgtggcttattaaagttagagaacccaatttggtttcattgcagtggctccacaatccacaggacccgactgttgtgtttcctctctgcccatccttagctactttcattttcatatctttacgcttttgcctcgtagcaagatcactgctgtagcaccaactgtcaagtctttattcatttacatccagtgtgctgtatcactaaccacttttatccaggagaggggactatataccagaaattcccaatcttatgtagccttagggcagctgcaaggcagcggtttcaggccctgccaggttaagcttttaagtcacggctaggctggtctgtgcttgacggttaatgtttagagccacatgttgctgttgagcagtgtagttctgacatggggctgattaaaggctcgcaggacctcatggagtggatttgtgggacgttggcacctcctgctgataacaataagaaaagatatttttatgctaagatcttacactgagctgaggaacacattagtgaactcaaagcgtgtctgtgctttgccattaaaggtccttcctgccggaaatcctaagtatgatgagaggatttttaaatacctaattgcatgctttgggattatttttaggttccagacactagatgcccttagctaatttcattgatgactctcacttacagatcacggtagtctcagagagcctccttccatgctggaccaatggcaaaggctgccagtgtatctgtgctgttgcattatgggagggatagaacggggagcagtatcgggaggcaaatctcagtcaccaacccaactcacgtttagcaagggcctccatgatggggagtcacagctgataattgtagcttttcctgctggtcacttagtattgtgctgcagtcattgttaggtggtattgaattcttatatggttaataaatcacaatacaggaacgcaaaactgtatacttcatgtttgctaccaatatttagggctcatacccaatatcattttatctcagttctcaaatgtttacacagaaaaatatgtgatttaatgacagcaatgataacatttgaggaggtgggaggggcagagagggggctgatgggaggacaccgaacatcagaaattgctggcgttcctgggctagattctgctgggacatagtcttcctaaggtgcaaggctgccctctggtggttaaacatagtgcacacaaagctacttttctgcatggttcagcttgtataccatgcatcttagcagatgggtctaacccaataccttgtctccatttttgttttctagtggagttctgaaagttagaaaccagatatacctcattcaggaattctgtcagaaccatctcttgtcagtgttaacttaggcttgttcttagatatcttatcagagtaggttactgtctacttggaagggcagctccaaaaaggcaaaggaaaagattggtagcagcagatggctaagcatggaaattttcacatgaggaggcactgggcgattggtgcattctctggcattagaggttctgtttgaagagtgtggtgaaagtcttttatagttcagccattgcatgtagacatcaggctcctcaccactacggaaagtgtggagaagagaattgaagtgctgggtggaacttcttctctacaggcgagattatgaagggcccccactagggacattgggtcaccgttgtagacatgcagggtggggcttctgaggagggttctccttcataaattcttcaatagtttttcttctcgtatcatcctttctatcctcaaatcggttataaggaagtgtatggttaacagaggagcacgtttgatgtgggttttggtgggaactttcttgtgtgcaatctctgaggacttgatggtgacttcgacatgtatgtttttggcttcccctgtggctacaatgtttgccccaaagctagggctgtctcagggacccatggttagggttcacagacttctgatgtgtccttctgtgctcagctggcagatgtgaacggggtcattgaggaggagttcaccatggcacgcctgtacattagcaagatgaagtcggaggtcaagtctctcgtgaaccgcagcaagcagctggagagtgcccagatggactctaacaggaagatgaacgccagtgagcgcgagctggcagcgtgccagttgcttatctcacaggtaggctatccattggaccctgttcacgagcatccattgaggtctgcccctgatccggtgcccttctcagggttaatagtgcgtactagggagagccagtgcactcggccttatatgagtgggccttaagatagcccacagtcctcttgtgtttctgaaacaaagattccactttgtagctgggattatccttgaactcatcctcctcctaaagtgggacgtagtgggacggtctgatgctgcttgtagtccaagattagtcttgacctcttttctcagccccacccctcaccccgtactcgaatatgggtgattggtgtgaattgccaagcctggtctctgggtttatccttaaacctagattttgttgtgtaaattacacaaacccctcaaggcttctctgtcttcaaagtgtctcgatttctctgcccactcatggatggctttgtagttgagcatatatgatgtatctttaagtctcctattagcgcgggaagattcctacatctgtaaatccctaccatgggagcagtataagatgtatgggtagaaactactgtgggtggtggtggcaggtgctgttgcactgtttttcacatgtacacacaacataaacatgtcatgtgcattttcttgcatgatctttaaaaagttttgtagggagattttatttatttatttttcaaataaaggtatgattgtgattaaatactttgcaaaatacacgacggtgaagtctgggtttctcaagctcagggcatgtgtccttgatgagctagcaagccagctctttccccattggaatggcgtttccatctcaggaaggtagctcagaggaccatgggacagttctgggctgcacggacatgtaagcttacatttgggtttgagatttccaagacggtaccagtgtgtgctgttcaccacctcatagctgagtcgtttggggaaatgggtaccagtgtggactggcatgtctaacagtgccaagcagcagggcatcagattgtgctatggctttaaacgtatgatgcagtaacagaaagagctccaactttcttgtctaaaatggattctatgggttgtttttatatgaagtgaaatattatttaaagggcactttagtgctggtatgtggtagaatgttgataaacatgatgagatataatttagcaatccttttgaaaacactggtaaaatataaaaccagaaaaaaaatacatacttggtgttctgtatgtgtgagctcaatacaggtgtgctcacatgtatgtgcacatgtggagaccaaaggctggctttgggtactttcttctgctgcttttcttgtctactatatatgctcatgatgatgagtctagtgcttgtgttttggctagactggccaacaatcctctgggacccacctgtctttgtccatcctcagtactggggctgtaggcaaatgccaccactgtcagtttttatatgccttctggagattcagatataggccattatgtttgtgcagaaggctactctttgtacatttccctaacccggaagtatcgtttggtccagtaattttatatatactatttttcattggtaatggagatgacatttttaaatgtcatatggcattataattttctgattaaaatattaaaagcttatatggaaactatggatgcactattatttgacattattgtaaaatacattacccaaatacctgttaatagacaaatgatgaagttatgtggaacaatattacataacactgacaaaaatccataaaacttgggcatttggaaagtgtaattataagtaacaaaaacagagtttacacacacacacacacacacacacacacacatgcctcttaatttgtaagatggtatgtttttttataactatattgtcattagcaacaagaaccttttttttaatttgcagcaagacatgtttataatttataaaaactgagaggaaagtacagcccaactctagtctctaggtcacctctgagactatggcatgagcttgttggctgttcctactcccaacagttgggggctgaagtcagccacaggcagagcccagccctttctctgtccagctggacagagcagctccatgcccaaatcctgcctgcacaccgtaccctgccatgactactcaggttagctgtgccccgtgtgggtgagcgaggaggagacggtacagcctgcagagtccgtagacaagggcatgactcagtctgcagtgctcaaagtactccctagacaaggacgcaggctgtggatgctgctcactggagccagtgcagccagggagagggggagcagcactcactctcaagtgtggggtccccggccttggggtgatactgactgctgtatgagagctaggacgcttcgaaagtcagtcgggaaagccttcctaagttagcagccggtgcactccccactctgccacaatacagaaagcctttgcttctgtcagaaaccttgcctcttttctggtgtggtttatgaaaactaagagtattcctcattgaaattctctcccttctttgttcatatcgtatcccttccaaagctcttccaactgggttgccgaggagtagttagatcactgggattcattcgactgggtcgtcctgcccggaacctgagtccccagatctagagggagcagtctgtgtattccatctgtctagaagtcacatgatgcctgttcagcccctgagctcccacccatttattgactcattccactggtgtttattaattatctactctatactgtcatgagcaaaaaaccagtgatgttaaacagaagccaggggctgtgagaaaatgacagaacctagtaaggagtcacccagggcatcatgtgcgtgtgtggagggagggtacaggcagagaggaaaccttaaagtgcagagtctctaatgaccagagttgaactgtctctgagggacagatgaagagcagatgtgctgtttgaatctataggtacgtgtccatagagagaggccttcagtcctgggtattcctcctccccctcctcctcttcctcctcctcctcctcctccccctggtgctccctttgaatccaggccattgcttacactgggcaggtgctctactagtgagctacaccattagctcggtagcttttaccacaaggaaggaaaccagggcaggctttggtctccacgtgggacaagtgggagagcacaggacatggccacacagcatttggcagcatctggcagcgagctgcagagtacatgggagagacagagagctcccttggtcctcagttctgagtcccaggcaaaggacgaaatgttgtgccattcctcggggaggtctctaacgtgtcttttccagttggacagctgcaggcgagccgagatagtcagatgctaggtcctcacctttgcttctgctctgccttcttcttcaaagcacgaagccaagatcaagtctctgacagactacatgcagaacatggaacagaagaggcggcagctggaagagtcccaggactccctcagcgaggaactggccaagctccgggcccagggtaaatactgactcctttgccggtgtcagatacttggcctgagccagtctggagctggctgaggtctgatgtttagttttgttcagctacagtgtttctgggaactgtagcataactgaaagaaacacatgttaccccaccctgtgtctgctgcctcccagctttcctctgtccactcagctgactgggccagcatcctctcctaaccccattggcctcttgctctgcaaagcttgtccctgggcttgtcagatatatctctggtgctgcttatctgttctgattgccttggaacaacctagttagtgattgtggctaaatcagtattattgaggagtctcactgccatcttctctggactggtcactctactgtgtcccaggggtgattgtgaaatgcaaattctgtcttatggcaaaccctatgggtcgtgcccttcctcgggattccgttcttggactaagtgctaggcttttgaacaagttcttctcttagctgtgtggtacctgatacacaggaaacacttaataaatccgagtaaacataagcaaatattgagtggccatcagaagtgcagaaacgaggtcagggtttaagaacattgcagtgtgtagaatgagagcagtcacacagattgaaggctgaaatgaagatcagttctttatagaacaatgtgataattgtaacagttcttcaggccatttgagcctcaaattttaagcatttattgcagagtttgattttatatttttaaagatgatgacgacgacgatgatgatgatgatgtgtgtgtaggtgcctgagggagccagaagagggtgttcagtgccctgtaggtggaattattggcatttgtgagctacctgatatggatgttgagacctaaactctgtcctctggaagaacgtcaagtgctcttaaatactaagccattttcccagtccctcatcacaaagctttagatcagaaaagcataaacaagaatgcagagaagaggagaaaagaaaaccatctaaaatatctaaaagttcagtagactttaataggttattagtcttcatgtctgagacagcacgtgtgtgtgtgtgtgtgtgtgtgtgtgtgtgtgcgtgtgtgtatgtgtgtgtggccatggttatgacacagtgttagggatacaatctttattgcagttactaaagataaatggatccttgtattcttagaaattaatatttaaaataaaatcactctgatgagtagtaggatggatgatgttattatttcattccttttattttcatttaaagctatttactggataaatacatgctgcatcaggtctaaaggcaaattaagaagaaagggccctgccatagctttgtaacattttattttgtggtaaggaatggactttggagtaaagcacgcctcccaatactggacaaagaaaaagcattttcctgtcttgcatatatttgctgcagtggggacactgaatagaaatataaacagaaaaggcctgaaataaagtaaaatagactagaggaatgatgagtcggatgtcaatgcccaaacgacatttgctccccaccccacacagctcactgcccttgcacacatgctcagggaaccccatgagggcacagagacaggagtgctggtcacagccctgcccacctggggccccctggtgaatccagaaagtgttagagtttgtttccctagttttcatctttagcttgtttccctgctccagattcttagaaaatcaacagctactcctgggaggtaaattaactccttgtggaatcttcccggtgacacgaatccagatgtcacctcaagctcacaggggctttataatctgcaccctcagggctggctcccagaggccaggtgggaagcgattctgggtctgcctgcttccaggcaaccccttcctttccctagggatgcaatccactctgcgtcccaagtactaacacaggccaaaggagaggtcagcccgagatgttgggtgtttgccaggctccccctactccatgccagcatttgcactgtgctgttatggttttgttttgctgaatttttgcttcagggtacgagccctgcaagttaaaactccagtcactttttactgtttgaaacagaaaaaatgcacgaagtcagtttccaagataaggaaaaggagcacctgacgaggctgcaggatgctgaggaggtgaaggtgagtgtgtgcacatctggaatgatctgtccccagacctgtgcatgtcagtcagacagggagaagaggacccatggctgggcccgatgtagtgacaagatgctgatgggactgcaggaagccagaagtgtctctgcatacacctacgctgcactaatgtctttgtgctccctgctcctgaaggggttaagtgacttgtctggagtcacccaggtagcaagaaagctgtgatctgactggcctgactgggaaaaccacgggtctcagatgagagggggtagaagggcaaaggcagactttctgtgcatcgttgggctggtttgcctctggggcccactcagttttgtgacagattcacgggttttgctgtacaaatgaagcaaggccgggggcttgggcacacgagccagaatcgcccttaattttggggtttaacatctgagggagatagatagggatccagggcttgtcactgagggggcagagcgccgactacttgacgccacatttctcctggcctggcttgcagaaagctttggagcagcagatggagagccaccgggaagcgcaccaaaagcagctgtccagacttcgcgatgagattgaggagaagcagagaatcattgatgagatccgggagtgagttggctggggggctcatgggatacgggcgggcacgggcaagccttgggtggcagacttaaaggacatggcttttggccagggcccctcgtctctgtgcttggactctgtgtgctgcctctgaggtctgttctcccatctggagcccagccccacccccgcccccaatgctctggtacagcaggtggcatgcaaagccagctgccccttcatatcaatccagccagttcaggggtgactcagcttggaagatacacacccaggagctggaaagactaaatgaatgtatgaagaaaaaaaaaaaaagcccaaacaaaaaaaccacaagactattcctcctccaggaattaacaaacactccagagaagctgtttggctttgttgcctcttcagcccaacagattatgcacctgtagccacctggtcacctgtgtgcacatctcaaagacctgtgccagtatgagtctgtgcgtgatagatggcaatatacccttcccgctgctatcaggatgacatcattgcaacttaactctggatgctgccttgtgaccacatcctgccttctcagagtccttggggagcccccctgctccacagtaccctttccttttctgtagcacaagtcccccggttacaaagcttgcttatggggggggatcttattctggggttcattatgctctttacatagtagatcttcttggcagtctctgaacccctttgcagaacagccttttaaatgctcccctaaaaagcatactactataaagaaaatatgtatactgaaatagaatttcacccactgcccctccctccccaactagggcaagaccctctccattacccctcccaccaccctcccaccatcaccactgcttctttctatagatgaagaattagatataggaagcaaggttgaattatttacttaaggtcacacggctaaataggaatcagactggagctaagcgtttaattctccaggctactgatccaaatcttttcagagtatgtgagctgcttgcaagagcatttgcatcttgaagaagaggaggagggaagcaggagtctagctggtgtgctagctctgtgcagcctgtctgaggacaggcctctgcctgctctgtccccaccccttctgcgccttcctattccaacaccccttgagcttctcctggacacaattctgattaatattcctcaagacattgttctgaaagagaaggaaagagagaaagggagatagcgagaacataatataagtcagtgcatgagttccttgtgggagctttctagacttgggctcttggtgcttctggcttccttcacacagtcttgtggtctcagcctctcggagggctttatgagcactggcgtgaggcagaagtggaatagaccctcctgtcttagaatttctgttgctggagaaaacaccatgaccaacagcaacttgtggaggaaaggatttatttcgagttaagcagttgacagttatcatccagggaagtgaggacaggaacttagggcagaggctctgcagggctgctgcttactgccttgctcctcatggcttgctcagcctgcgttcttacagcacccagtaccaccagccctgggatggcacctcttcggagagcttgttccttccatagcattcatcaataacaataaaatactgcagacttgccttcaggcagatcttgtgacagcagttcctcaattgagagccctccttcccaaatgacttcagctcatgtcagattgacataaatttgaccagcacagccagatgctgactttctgtctccacaaaaccgtactccaagggctgccccatgtcggctgccgtcctccatggaagacagcttccgacacttgtggggggatgctgttgaatggccaaatagttactgagtatacagctgttctctgggtgtgtatagcagcagagtgtatataacagggctcattctcttttctcttttccctccccctccctccnnnnnnnnnnnnnnnnnnnnccctccctcctctctatgttcaagcatcatcttttctccaatgtcattatatccccacagagcccttgcacacaaacaaactataaatacaaccgcaaagcctttgtttcatttcatgcttccgagctgctccccagaaattagttttcactcgggcagagaagaagctgtgaagttgttctctgatccctcaaaatcctcccgaattgttgcctttattgcccagaactaatggggctggaagagaaccagcgctttcggcggatgactcagaagttcaagctgacctggaatatattgctttttcctctcaatttcagtttgaatcagaaactgcaactggaacaggagaggctcagctctgattataacaagctgaaaatagaggaccaggagagagaagtgaaactggagaagctcctgtgagtgccttaaccctccctgactcgtcatcccctcccactccccagggccagccctagtggagccctggagactcctgctgttcaaagcagcagtggcttgcttgggcctttctctgcctagccttccttgctgaggtatgcctgaggtgcaaactgcatctgctccaattctggtgctgctgcctcagtggctcacgattcctttctgtctctcagattgctcaatgacaaaagggagcaagccagggaggacctcaagggactggaggagactgtggtgagtcactccccaacccagctcactcccagaggcctgatttgtttgtcacctaccgaactgtctaatctaaaattttatcttcacacaccctttcctgtagagcatttagactaagcactcggtggcagactgggatttgtggatttacttcttaacagaattaatccattggatacttagtcagttattagtgttgtaatcctgagatacttgaataagaattgagctccatcgtaaagcagtgtctgcactttgtgacgccactccactctgaacagatatttagcgagcatggaggcgggccctggtcctgatggctgatcagtacacactgtagagaggtcttgtcctctaggtgctgaggtgagcagaggggaagagcacacaggggcagtgacttgtggcagcaacagggacatcagtgtgcaactgggtgatgggggcgcggcgggttagaaggcaggcacatgaggatagtaccggagtaggtgccttgatgggggaggggcagaaagaagagcaggaggctctgcttgcctctgaaggggctccaattttgaaattactgttgggtttctttgctatgcctatagctgctggcttcccctggcagctttggttttggtggctgtgcagggcagcagcttggtcacacgtcacagctgtggcttatcacaaaccatcccaacagcttaacacagtgaaaatgtgtttaggcttgcacacgtttaaattcagcagtgccttctgatcccactcacgtgtcacgggagtctatgggacagagcccattcacgacaacctggagacccagactgtaggcagatggctactcccatctggagccgaggctgcatgccggctcctgggtcagtacaaagtgctcctcagagaaacgaggacacagcctttgggacaggggccagatgcctgtgctgacaggaggttggacctttcgagggtgatgtctatagggaaagcagacacaaagccatgaggtcacttcatctctatagtagagcaacgcagtgcataacggagtgttcttatgagagtgcagagaaatagtaaacactgaacgtttactagattcccgccatcctggctgtatgataattccagatgctctctgcttgtgccccgtgtgcaccccgacacccgtgcacccttgtttaccttctgtgtctctgctgtcctcacacaaagctggcacatgcagttgcacacacggcttgtcagcacgccacatactcacttttgtgatgtcctctgggcttggccacaggatctgattgttcatacggtgttcatacggtgtattcctatacacgcacacacagctgcatctcactaatgatttttttttattcaaaagcattctactcattttacataagttgttgtatacttcagactcatacttgcttgcctttctcatacctctcctcatacttacagacatgtaagaggcacagaggcccggtaagctcagacctatgcatgtacattcagccccagccacggctcacactcttacactgcactctcatgggccccaccccaccccaccgctcacacacaccatctctcaaggacactttctcacacaaacacaccacatatacacacagtgctctttttctgacatataatacatattctttcacatttctctctcacacactctccttcctatatacaactctttacacatactgtctcacacacacatacaatctcacacacattttcttttccacacactttctcacatacacgttatctctctcttacacatatgctttctctctctctctctcacacacacacacactttctcactttctctcactgagattctttttcgcacatagaatctctcacacacacaatctcatacactttttcacatttacaccataatgcgcgctctctctctcccccccctctctccctctcccctacataccccacgtctttccccactcacatcctgacttactcatattctcacatacctaccctttcttgttcctttccctgggagctggatggatacaagaccagtaggcagccccctttgctgtcttaggctctcgagtgtagcctctgtcacctactcagttattctccctccatccctcccacaagctcatttccttattttctcagtaatctggctgtgcctgcacacactcgttctcgcaggctgccccccacttacggacatgctcatccaccccccacacaaggacagagccactgatgtgctggctcctcttcctgtctccctcagacacccccccaaatccaggactagattgctgcagtgtgtgctgctttagacttgagcgtttgccctcagccttggattcctcccacgctgagctgtagatattcttcagagacaggctcttgctgtccttggctgtccattctgttctcaaggcctcctgggccagccttccctgcctcctgagcacggtggggaggagtaggacgctgcccacagactggactctgagaactgcactccagactggccatctatgctgttgtatgctgatggcaggacactgagcacttcctcctcatctcacctcgtgccacacggactgcctctcaggtgctagcctcactgtccaccatgataggaagtttacccttgaggtcctgcatggaagtcagtagcgtcttggtggaaagaggcctgagggaaattggaggttgtagaaataattatgaatgtgatggagggaaggtcattgctgcagggacccaagtgacagctgctgaaggacagcagcgtcagccaccttaaatgtgttgactgctcctgccaaacggttaaagatgagaggaaggagccgacgtaggactctcaggttgcatttgtgtcccaaggcaaggcctggcttgtggtcaggccttcttgcctcccttttgcatggtggtgcttttcatcagaaaatatcaactgtgatcacagggtgggcagaagtaagagatctgaggtggagggacagcatgcagggcatttgtgaacattaaggggtgctaggactgagctccctctggcagaggtgtggggcaggctggatcctggagcactgacctgcagccttggtccttgctgtgaggcggctcactcacagacgagactgtgtgcacattagtcataagaccaggcctgcttggcctcctgcagaaaccaatttaccccagccaaggatgcaattgacttcaggtgcttctcatttcagcacagaattggatctggtaataaggtcttaaattaacagagaaccttattccaaggaacttagtgtttctttaactctgggtcctgtttcaacctttttaatttaagcctgtgtaattttcatcccctgacatcaggtcgatttatacagatgaaaacattgaagattctctgtctcctcctcacttataaggaaataatttacatgaaactaatgcatgcttgtgtaaaaaaacatatcaagaatcaagagttcagttcccagcatgcacacagggcagctcatgaccacctgtaatttcacctccacatgatccaatgccctcttctcaaaccctccagcacctgcatttatgtatgcacataggcatgaatttcagaccaatcagagctacagaaaatagtatttccaactaaaatgtatatataaaaattatacatacttacatgtacatatgtatgtatgtatgtatacaaagacttgaatagaaggaaacatttagatcttctggttttgttaccaaagagcagcaggtttggttcaggcgcttgtctcctcactcatatagtcatagaagttcattcatagaaaataatccaaaatgaaggaggaagttgcagttgccggctcttgggatgtgagctcatattagccattgcactgaccacttaccgaggccagaaattgtcctaagagattctaggtcttcctgtttagtctcagtgccagtgagtcaaattctctttatcttcatctcaaaaatgaaaaaaggcacaggaagttccaggacttgcccagcgccaccaggtggagagtctgggaactgctcatccctgagttgctgatgtgagcaaacatacttgtggactggggcagtggtgggtgaagaatcatgggaagtcccagccagtgcagatcaatcatggctacctttggttttgcacgctggtatgaagtgtaatatttatatagggagtaaaccaaaccaaaccaaaaggagagcctattctggcaggtaacttcctaggaatgtttgtctggctccattgagagcagaatagaggagctggctgtgttctggcttacagctggtagtcagagttccccggtttctgcaccgtgcaagctgaagagtgggcaaggcacagatggtaccacggcagcaacagtatcaatggcagctgcagcatcaccggggcaggggggagggtaacgacatctcgagcaaacgcagcagcagttcagtccgtcaccccactgaccatgtgcaaaaatctcttccagtctagagaactccagacccttcataacctgcgcaaactcttcgtccaggatttgacaacccgggtgaaaaaggtgagtcctgtctgctatttctgaacaagttgaggagaaaagttggagcccatgaagcatcatctttggttgaaatatcccttgcttacattaaggctggttttgcttaaaaattaattgcctcatgccagaaaaaccttattaaaagaatgtgtttctggctaaaatcacttcagaatattttaccatctgaattcccttcttagcaaaaggaagttataatgctatccctggctggcctttatttaaaatgacatatatttttctggccccactgtgtgaaaatcactgctttgggccagaaaagtccggcattcttttcagaagacaacatggttccctagtgtacagaagagagatggacagagactcaggtttgtctatgcagtgtgtggggtgcgttagtattgagaactccagacccttcagaatgaacttgttttcctagccaccacagtaggttctggcatccctgcattgcagctgtggatctaggcttgggtgtgattgcggggctgaaaaggcttgggcataagtctgcaaggtctccgaatcacgtgatctcagagagtctccagattgctgactcaatagctcagctcagaactgagaagagtgaatgcagaagagacacgggcagcttaaaggaaggaattaaagcatgcacagatgttcagtaaaggcacacacgtctgggtgggagtacacccgtgtgtactcgtacacatgggtgtgtttgaaggagcaaaggaaacaaggtcagatatagttaaaagggaatgattggcagaagcaggtgtgagagggacagaactaacagcactggtgtgtgtcctgcttggtaaaaagaaagcactgatttttcccagagttcagagagagtcaagctggaagcatttgcaaggaatttcagcagagtggaaagaagccatatctgatggctagtgtcatcagggaggagggaggagaaggtggagcccggggagataagattcagccagttgtgcatagaatctactagggataagttcaaggaggtgctgaacagtgcagtgcatgcccaacaggaagcagtgtgcagttggcaagcaccgctgacgacagcactgtaataaccaaaataaattcaagactacccagtaccttcccccttcaaaggactttccaaactgtagtagcaggccaagcacagagccagataaaaagctggctgactaaataaacatagaaacatagttttaatggtcaaaattacttagcttctaaaacaagattaacaattcccctaccccgcctcacactaaagacagaaggacagacaaagtaagagtcaccctatacaaaccaaccaatgtctgaaaaggttattggctacaccaattaaaataagccaaactaccctggtgcctatatccggcccttacaaaggtataaaaagtgttctttctttgttctgggtctctcctccggcctgcgtgctgagaaggggttccccaacatgttggataggtaaaatcctcatgcgttgtgcaacaatggtggtctctgtggtctttgtgtgagtgagggtcttttgacaagctacaacagcatgactctagcaagttgaaatcttgctaatgcaaaaagcaaaggcagagactcctgggagattttcaaaacctgcacaaagactgggtgtcaatggttagtgcattgtatgaggagcacactctacaaagcacatattaccctggggcctgcaccaggcaggaggatgaggccaggatagatgtgatgtgctggaagtgcacctgatgccagcttaggagaccagtgaagaagagccctgcgccttgttgggaggagggtgctgtccagaggaaggtcaagaggtggagtcagaatcccctgactctgacttcattctatagaacttcctaaggatgacttagctttagatttctgctctgtgggcctctggcagctgcattggcatcacctggaaatttgcttaaatacataatataccacagagctgaggactcagagatggaggtgggctaagcactctgagttttagtaagtgccccgggctcctgattcgcaatcaagtttgagagttcctgctgggggctgagctgatggtagaaaccattactctgctgaagaagggtggtttcttctgctgttccaccagacaggcatgttttgctgtttttgaatgtcaggttgtgtttccacatgcatttcctaatttatctgtggcaccttgcttgtcaagagtatggagcggccgccagtttcatgatctgataaatcggaaggattttcccagcacctggctgctgtgatggggctgagcctgactcattcaggaactgcatagctttgggtgtttaagagacaagcagaagccgttaggctcccccagtggcacaatggctctggctgacaggcttggcaatttctcatctgatcttgatggctaagctgaactcgagccttatgcttattttcacactggatcttcttaataagttgtgagcctttttcttttgaaaagagaaatctttttatctgcaggggagaggaacatttcgttagagagaaatgcgtgtgcagcatacaaaagcagatctgaaggcattcttattccagcatcctaaaataaggcctcgcgacacttcagtggaaagcagggaaatttatcgggaagtcccctgattggagactttgacaactgctcttcattttcactttcagactgtcctttgggtgggggggtgttgaggatttttctttttcagaagtaaaaatgtatcttaaacactgggtaggtgactggggaggggagggggaagtgggtcataccactgactgtcatgtgtggatacagagtgtggagctggacagcgacgatggagggggcagcgctgctcagaagcagaagatctccttcctggagaacaacctggaacagcttaccaaggtgcacaagcaggtgagtgagctcggcaccctggcccggcctctgctctctcccggcacagctttggctggttgcctgcaacacagggagaagagttctcatgttggatgtctgctcgtggtcaaagaaaacgtgtgctggaaaaaaaaatgcagtcttcaaaaatccctggatcttggcaggaacagtattcctggctactaaggaggtggtgtggggggtgaccagtcaagcttcagtactgaagaccagtctgggcaccatagtgagatcctgtctcagagtgataagaagatgctagatctagggggagttagggtgaggagtgaggggtggatgtgatcaaaatacattgtatatgttctaaaagaattaataaacaaaaacaggaaaaaaaagcccatgcctgtagcctcagtaacttcctctatatatgaaaaacaccctttggctaacaagatagctcagtacataatcatgtgctgcatgactgatgatctgagtttggtcccaagaaatccacagagtagagaaagaaaactgacttctgcaagatgtcctctgacctctgcacatgtgcccacacgtacacataggaggcaagactatatacccatatattcccatgtatgtctacccttggatactgactggccttgtgctctcccatggcatctcttagacttctctgtagagcagaagtctccatagagtgcatctgctgaccactctggttctggtccctcagtttgcatctaaggagactttacttcctttcacaggtggtggtgtggtttgaatgagaatggcccctgtggtctcatttgaatgcctagtcacctgggaggctcactatttggaaggattagaaggcctctttgcgtataggtatggccttattggaggaagtatgtcattgggagtggactttgaggcttcaaaaatcccattcttggcctaagctttcatctgctgcctgtgggtcaggatgtagaactctcagttccttcttcagcaccacgtctgcctgcatactgtcatgctccccatcatgatgataatggattgacatctaaagctgtaagcaagccgcagtcagtcactttctttgatgagttgcagtagccatggtgtctcttcactgcagtagaacagtgactaaggcaggtgggacccagagactggaaccagcatcttctgagctctgttgtcctaatcctacctcagccatcttgggtgtcccttagaatcattgttctgacgtctgtccagtgtgacagagaggaatgagtatgtccagtaaaccagtgatttaggtaagccatttgcccctcctttctataaatgccagcatgtctgggactcttccctctttagggtttggtatggggtacaaacggtctaattcttttggctacatgtcacttctcttgacatgctagatctgtttccatagggctggtgatggcattttccccagagagaagatggcagatcaatatagtgaaatcattcaagcaaattgataatgagaaatacagaagcaaagactgccaggcatcttgaaatctggctctgcaactcattattttattcatgaattcaaggaatatttattaaaagccaagtcttccaggcatggagctactgctggcataagcaaaataggtcagaacagccgtagctcgctttgataaagctttttctgatttttgatcctttccctgatccatctggattccaacaattgtaattgtagtttaagtgcaaaaccctgggtactggctgtaaccaggcttgtggctactttgtgggttcttttttctttcaccctttcagccccctaatactagatgggagagaagaaaggatagaggggaaagggggtgttgttatcttagactacttactgctggttaggggcatcaagttccttggaaattttactcttcattgtcaggacatctaatttcttcttgttttttagttgcacatgactacataacaaattgtaaccaagaacatccaacaaaaaaaccaacaaccccacacacttcttggggccctagcatttatatatcctctgaaaagttcccagaattccaaacatcacatacttgtggaactatctgccactggcaaaatcactcccctgctagagtacaaggcaaaccataatcagctgctgtgatgcagcctcacacatatccccccacacctggggttgaaacgaaagcatagtcttataatacttataatactttttttgggggggttggtttttcgagacagggtttctctgtgtagccctggctgtcctggaactcactctgtagaccaggctggcctcaaactcagaaatccacctgcctctgcctcccgagtgctgggattaaaggcgtgcgccaccacacccggcgactttttttttttttaagaaaccaaaattctcagtgcccttaaatactaagccgactttccagctcacctttaaaccaaaatattacacttctggtccttaaagatttgtggccatctcatgatgcaaaatgcgtttagttaacctccagggatccactgagtcttaccaactccaacagtgtttgaaagcccaagtttggagtttgccctgagactcaaggtaatattttaactgtgagcacctgcctgggaacaacacaaccaacaaaatggtacgtgtgtttctaacatgcagtggctcagagtcaacatttctaaaagaagaaacaagggaaaagcatgaaaagattggactaaatcaagttagaaactcagcagggcaaacaccaaaccctactgctccatttccagcatcttgggtttgtgatagcatcatctatgttccagcaggcttgtttggccccgcccctcacactctgttgccatggatacctgtgggctctctcttgggctggctgtactcagtgcctgcagagctatggaagcttaggcttcaccttcactgctttatcactcataagttccgtaatgcacattgctctttggaaactggttgcaagtttctctgacacctcccctctgctttgtatgttacatgcctttaaaattagtatcctgtaaatgatacaaagttctgctatccactcaaaatgtagccttgcccatggaccccagctacaatgttctttgtgtgtcttccaggctgagcctgaagaaacacttccctatgtggccccatatgagcagtgtgcccgagaagctgtcttggttcaagtactctatttcaaaggaaagttttccaaccatgtttgcgggtatggtgaggatctttccctaaaggcaacttttcttctttcccatttccagtgtttgaagtttctccttaacggctttaatccctttaacaattacagccaccttgtttgtaccagcgctaacctctgcagctcctttccttgccagacttcaacattttagacctttccactccttgtcactgtaaatctaagaacaaagaacaataatcatgcaacagcctgaatcttacactctcttgaaatgtccttctcaaattaacatgtccataacttttgaacttagctctgcttaagatttcaaggcagagaatacagatcactattgttggagtccagtggggcaaggctacattttgagtggatacaatacacagagaatacagctcgatttttttttgtttgtttcttttttgccattcatgttataacatgggtattctttaggttggttcacaacagagtctataatgctcatgtcacttcatgagcctggccatcactgtcctcctttctgttggcattctccaaactcccacgagaataatccactaagctgtgcgtatggccccagagggccccttaaacctgcaggtctacggcaggcctcttccacgtcctcacataaactgtcccaggagcccagcaggcttctcacagagatgccttcctactctgggttcctgcttctgggtttgtaactgttttcatttctttggccaaatacctgacaaaaaggaggtcacgggagaaaggcctgagggcatggcttgagggcagagaccctgaagatgggaaaagaatggtggaaattggctagtggctgtgctgtaggaacctgttcatatttggacatttcaggaagcagagaagatgaagagcactaatgttcatccagctttcttcttttcccctttccttcaacctgggaccccagcctctgggatgactctttccacattcaggatggagcatggagagagtctctccctccattaaactactttggaaatgtcctcagagacatataacttaccttgtatgtgcttctaaattgggttgtgttgacaatgacagtgaactattgcgaagttcaagtgaagcgtcaatactgtttagtgggagcagtttctaagtgactgtctcactatggtcctttcattttatgaaggcaacacccaagacttggagtggctcagctcctaccaccaagtcagatggcaggaatggtagcattgacattggagtcctccattacctagggtcctaagtaaaaaggagcaaacagttccctcctgtttcttgcgagcctcaggatatgtctgagctaggttttaacccaacgccagtacagactgtgctctgcaaggtctgcagaggactctgaaatgtgcccatttcctgacttggaatttctcagctcacaagtacatcctagagtaataaattcctcacggcctcttcccttcccagacacactcaaacaagaatacacctgccctgtggctcgccatggcttctactttaatgcatcccccttattactgctcctgtgagctggagttatatggaccatcaaagacaacctagtagggtgatggtctggctgctcgtcaggtttgtctcttcttccatgtccttgtcctgccagggagtagcacagccttgctcaaacctggcttctttgcccctctgctgcagctggtccgggacaatgcagatttgcgctgtgaactccccaagctggagaagaggcttcgtgctaccgcagaacgcgtcaaggccttggagagtgcgctgaaagaggccaaggagaatgccatgagggaccgaaaacgctaccagcaggaagtagatcgcatcaaggaggctgtgcgagccaagaacatggccaggagggcacattcggctcagatcggtatgtgtgtaccaaggggtgagagtgacatgaacttatgtgggatttcactcacctgaaaggctaggatagatccagtgggacttggaattcccggcgacctggtgttcatcctggaaaagcatgagattcagacaccactgtcctcctgagtatagggtgctcttcagaaccgtgcgctgagcctcagaagccagctgtgctggagcttttggctgtaagcagaggcacactcttggaaatagtataatttatgaatatctcgcagcaggaccatgaagaataccatctgtctgcttcagggaaatcctctggcttggaaataactgcaaagagtcaggccagcaacactgagtactgttgctgcgagctgaatggtgggctgaagttcaagccccaaggcctatggagctgggcgctttcctcaaataggaatagtggctgtagatgctctatcacagatgccaagctaaagccagagggataaaaggacttacaggtgttgtctagagttatttttaattgaagcatccttaataacttgcaacattatttcccatcagatattgttttgtagctatattgtgagacagccactttgtgtttccaccttaaaaatcccttagattagtgatacattgaatttattcggtttcttaccctttgagaaaattgtggcctcttttcctagaaagctcatcacaggtagaattcttgtgaaatctatagggaactatggatctactgcagataaaaaccaaaatcctttgcttctaacatttatttatttatttatttatttatttaaaattttcacccttaaaaataagatgattagaggctagaaagatggctcagcagttaagagcactggctgttcttccagaggacccaagttcaattcccagcacccacatggcagcttgcagctgtctgtaactcctgttccaggggatctgacacacattggccagatatacatgcaggcaaaacaccaatgtacataaaatacaaataaataaattattcaagaaaaaaaagaatctttgttttttaaaaagaaaaaataataggatgattaatatataagttctctctctccctgaattatgtggggtgtccttagtttatttttcagaggccagacctgctatgcccaggaaggtctgggggtaagtaagtggtgcaatgttgataaacccatgactggtcgtcaccaatgatgttcttctctctcctttctctgggatatagccaagcccatccgcccaggccattacccagcatcatctccgacagctgtccatgccgtccgaggaggaggaggtggctcttcaaactctactcactaccagaaataaagcagagtgagtcctgcagcctggggtattttctctttgcagcagccccggggcctacctgggggcattgccctcttgacactctgaaaccctaccctggcctttagccatattctctaatagagatatgttcatctctgttccaggaagagggctgggatccaggtaagagaaatctgggcctagctttgccagcccatatagccaaaggatcctctagtcacagggctggtgcaactctgagccaggcatggcctaatcacctctcaggttgatgagtgcttcatctagggtttggactgtgggacttccctccgcagctgaatctacaaagcgagacagaagtaaggggtggctttaagtctcaggaatgggatacaatgagcgggttatgagtcatatttttatcattattgtgagcctcgataaatgggggtttgaagaatgtgtagtttatatttaagtggggctagaccactttttctttgagacagcgagtggtctgtgagccccagttcctaccacttggatgttcattattgctctgacagtaaaagagtgatatgcttttgggagagaaacaggaagaggtacgcctgtccctagtagctgaatacagaaagattcccagtcaggctggcagtggatagtagggggctcagaaaaccgcagacttggagtgtgtagatggaaagggatgatcacaaagtgactcctgggctctgagccctcactagggaggctagctgacagagcaggggagcatcaatcaaggcatgccttggtgatccagagcaactgatttagccagtgcttttagaatcgcatttgaagtgaatggtccagggcagaatgacggcattactaaggcccagctgcaggcttcaggaagggtgcttctgtgtagctttacataaacagccaggaattagccaaggtctggccaggtgagtgggaaccagagggcaggcctaggccgtctgcactgggccaacacactgggagtatcactgtatctcagtgagttggactgtaagtcacccattcaagtccaaaacgtgcttctagtctgaaataaaatcaaattggatattactgaattgtttttgattgcatgttgtcaggaccaaggacaaaatctgaaaggtggctattgggggctgtttaggaaaaaaaaaaaagcctcaaattcttgtgtgggctggaggcagagggcaggggtggggtgtgcacttagcatgtaagggaactgggttcagtacaatgcaacagtaataaaggtaccagcttaggtaggtaaaggacaacaggccaggctactagcggagtggggcctacctggacttctctgtttttaaccaagaatggccagtggttttgatatccagcaaaaaatataatacctacttctctgtagtaagcagggctcatatacaatgatagtttctcatgggcaggaagtgcaagggctgggtatagttagtaaggtctgtagagaccacagaatctcagactattagactctgtcctctgtgggtgcctcctttccttggcgttgcctcatggcctccagaatgacttctgctagaccttcagctccgtgtcttctttgcaggagttgtatcccaagaagaagccagggtgaggcaaaggcagctctcctggccacagcagcctccctcagagtacccatgcaaaactgaagtctaaatgcctggatcagaggcatgtggccacataggagactagaaaaggcagctttatctgggtacattggcgccccagaagggagttaggttttatattgttgtgagcataatacttgcagtggtaacctaatgggagaaagatcatttctgactcctggtttagaagcctcagtgtcacagaggggaaggtggtagaagaagcttagttcctggagacaggagcactatacgtcatgtagggccaggatgcagagaaggcggcaggaagaagggatagggagaggtttcaaggactgcacctcctaacagttcactaccaagtgtttatcaagcacagactacgggagagggatttagactgcaacaagagtcatgtttttaggagaataagaatggatggtggggtggatacttagcagtctgggcaacatgcagtgtgtaggttgtcatttgataaaagcacattgtgagctctgaccttccaacaagttcttagtaaatacactgtcccagggtttccagactatgttttaaatccctcctcatggaattcagtaaaactctgccaaacctacacaagtccgggttgacctgggacttgctatgtagcccagacttaccttgaactcacaacaggctgcctgcctgagcctcctgagtgttggagtcacaggtgtgagctaccacagtagatttaaaactcgacattttgtgtaaggttgatcatttgtcactggtatgacctcttatactggagactgaaaagtcacaacttctctgacccagaacttcagagggggtgacctagatgtctatctaatgccaagcattaagtaagctcccatatcacagcaacagtatgttgtccttaagagctccaccagaggttttgagtttctgtactgtgccatcatttacgaaaggaagtttccctctatgaccaacttctgagagcaacagtgatccactggcacagatatttagaaggcagcttgacagccacatcacatatctttaataaaaccatgatagctgttttccactgtggcctgtgaacatccccagcctcaaatttttgttgtctcttacagtaccagaagcaaattctcccctgtagagtggtttaagtctagttggaaagcagttggtcgtaccccaatcatctgtgccgctgttgtacctgtagtcacatcttgcttggcactttgatagcatggcatgcagggtccagaaggactgttggtgacaatttctcccccaacagcctgcacagcacctctgcattatggaaaccagacagcgagggaggaagcctcagctcagtcccaacgcatgcactgtttgccagtcaggtctcaccatttagttctggcatggagccagccacagtggccagtttccctgtttggggtgggatggggtggggaggtggaattctctgtagccgccgacaactagagagttagcccagtgctgtcactgagatttttcattgtgattatgtaacaataatttggcttctaggagtgttgtctcctgctcatgcaggatgccttcctgtgtgctcagcagctgccttaactgttctcgcacgtgcttttatacatctgtaagacactcaagagttggtgttctataacgaagcctttttacagaagtaggcagatcccttgaaaagaccattggcatccatttcaagtagtgccaccagtcttaagtggctaaaggcatactagtaaagggactgtaagaagatctaatacagtacaaaaagatctcttcacatttacaaattatttcttcaaaagtgcaacattagaaactgggcatggtggtgtgcatttccaatcccggcactcaggaggcagaggcagaggcaggcaagatctctgcaaatttgatgccagtttggtctacaaagtgagttctaggaccgccagggcagtttcacaaagaaactctgtcttaaaaagcaaacaaacatgataccgtgttagtatgtggtatggcctttgtgaactactgctcaggcttttagaagcccagtagcacagcatttggctaacacaaatcttgcttttgttgctggcccgtgcagtgcccttctctgttttgcctcctttctcattatctttgttgactttgctgttgtgttttatgaacccagtttatgtgttggctgtgttcagatctcagagcctctcttacatcataagggtcaccaaagccccctgctcttcctggggtccccattaagtcagtctcttttttaaacaggcccaccagacccaagctaattctcttattgacaggcaccttttatcatcttctggtccctcatattcatgaggacctcacctgatgaaaaccttgagtgtgaatggtccctatgagccagtccaacagacattggtttccgtcatgttgacaattctggttcccagcttttgtcccaagaaacttagcttagctgcttagctgcttctttgccacaggactcggattgctcccatctgcacgcatgccccacagccttacaggccaggccgtgacaggcccttcttatggcctgtgtagaactctttcccagttcaggaagctgagaggcagatagttcctggttatcatggccttgcaggggtttctctgtgtagctgtgactgccctggaactcagagatccacctgcctcagcctcctgggtgctgggattaaaggcatgcatcatcagcaccgggtggcatgggccatgttaaaggatcccatgtacatgctgagccatgggttttccctttctctgtattaatggttagacctaagggttgttttgttttgttttgtttttaaatcacttttaccttgtcctcttctccctcattagctgacttcttacatgggctccatctttgtggatcccacaaagtgcctgtgttgtattcttgtacccgtccataagaggtggcaaggcaatacctctgtctcatttaaaatagggcaaatataaaggcaagtgattactacttgttcttttcctgtttttatcttggtaaaccaatgagattcattagggttacttacaggaacaaggatgactcgaagacagctgcctcactgaatgcccactcctgctgggaccctggtcctctctgcatgatttgtaggtagctcaaagacagctgcctcactgaaagcgagtctcctttgtagtccttactacttacttaacattgctggggtaggaggaatgcttatgtatctggtcagtttcagggacttcctgagacttgtgggttgcttacttccatagtcttaagaatggagcttttaaattttgaggaaattgctccacagcaggtgagcaagagtctaaagctcagcagagtccagagtcagaggcctagagagtgaagacccacagattgtgtttacagtctgatgttttagagtccagggtagagggaagagtggaaggtggactggcctgaaaactgacaagtaggtcatggaaaggaggtggcacgagggtaagatctgaataagagggtgtaaggttccagggagacagagactgggtagttggtgaaagccagatggtggtgaacttgggcagctttaggcagtctgtgtggagctggatggcgagtggctgctgtgctgatgatagtgatagtgaggaatgagacagcagctgtgagttacatttgatggaagccagagatgtggaggatgtaggttgacataggtgtctatctcaaaaagcagatgatattgttgctagttatcaactggtggtatccatccagctaaggtggcagaggtggaggtgcagatgcagcaggaaggtaggtggggtaggcagaggtcaaactgctcagcactgggcctccctttttttccaagtaagaagcatagattatcagcagtgagggaggggagaagggctgtaggcctgagaagagagacagtgtgaaacggtcctctcaggcagcatggagtgtttgtctgaggctccacactgagtgtagacacccagttaaatatttatccagctctctggttctgagggccctggagatagctccttttcttgacaatgcattggcaacccaaatgtggacttattccaatatatccaccagatggcgctgtaagggcattgttgaattctcattaagcagcacttcaacagacttcaacaacacatttgtctgtaatgtgtgccctgagccccacccgagtgtgtgtgtgtgtgtgtgtgtgtgtgtgtgtgtgtgtgtgtgtgcgcgcgtgcatgtgtgtgcatgcatgtgtgtgcgtgcatgtatgtgtgtaggggatatttatcgagctacagctatatagaggtgggtgaaatctatctcccatatttcccttatatttaacttacattttcttaaacatgactggtaaaagaatatttctaagaaatataattctcagaggtccccaacgttcgttgaacttattttattataatacttaaatatttataagttcaaaataatatacgttccctgttcttacatatttaacacagccataaagtcaaaacaaattttaaaatgacattaaaacaagtcagaaatccaaaccacttaactgtatcataatttaacaaaagatgaattgagttttcatcgaaaataaacagaaacgtgcagtgtgactgtgtgcttccgctgtgagtctgacgtgccctcgcttgcatgtgccttgactggaccaaggtgtcacactccttctgttagaaccacgccatgcctcttcttgtgtctggagtgcatcacgttccttttgagtggctatatatatatatatatatatatatatatacaaataaatgtttttttctgctctgcttttatgtttgagacacaggaaagcactcgagcagccccttccatagcctgacaggaccccctggttagcctgccttttccagaggagcttaggggtcatgctatgaccctctgcctctgctccatatgacattccagggactatcattgaaggatacctgtcctatatagattctacttcctcaggatccctaatgtgaataaaataaataactatgaattattagtgtaaatccttacatgctgggtaacgggatgcaaagagatgtacaataaagctgtacccatgctcactgctgtctgctgcctcagtagttatcctgaaatcctgactgctgggctgcctggccagtgcacctctgttccagcacagaccttggccctgccccgatggagccatagacatagaatgcacacactgctttctagactcctcacagtaaactgggctcgtgcaagggagactccagatattcagcagggagaggaaagtcagtatttctaatgcaggcctctcttgcatttttccttggttcccagtgctcccacccttcatcatcttcatacacttgaagctggagccagaaacttctggccagttatggtatgactgtgtcttcctttgatcagaagaagttccaacctcctcagaacccccaacttctctactgcttcccttcctccatccaggcagaatggcgtttcctctctaagcacttggctactccgacaccaaagcccttcctttcaggactttgtctttgcactgagcgtcccaaaaggccgctcactcactctgcccttgtctgtctcactctcctgtcttttcatctgtgactttttgtcttaatcacctgaatcccgtttgtcttgctccactgttagggtgactcttcattgtctccccttgtgacacctagtcacaagcaaattatcttgcgtatccccaagatgctcacacagctacttgttcccagtggaaatggatcatactgtgcgggagggcagaccagatgtggctgtcagcttagcccctgagactgtgacactgagtcttattgatggcatgcagggatcctccagacaggtgcagcccacctcttgaaccaccataccattcatggtgctgctctaaaaccctagccattggtaactggatgattgcacggttcatcattcaaggagctcactacaggcagaaacagtgactggtttccgaccgaggtggtgctgggtctctttggtctgagcctggttcttaccctctggccaagtcactttgtctttgtgcccctgtgtggtcagcagctacttaacaggtctgtggaggaccaagtatgtcagtgtgtaattaaggtatagggactgtgtgcctagaccaggcatttgcaagcttcataactagagaaaaagtgaagatttttagggtaaaagttcaggtttcacctgcagccctggtaccctaggctagaccaccttcccggtataccaggcaaagagatggtaatgattaaagtcagagatagatttattcagtgttgccacactaggaaagggaacaaataaggtcccactgactccaagtctgtctcagggtgcttggcataagttgtacatttacacacagggagaactgggtctggaggaaagaggtgtatgcagagatgagcaggtcctgggcaagatgtggtctggtttgtgtcagttctggttctggagggagatccacagaggcccttattgctggcggggccagtgtttcccaggagatggtcacttctatttcagagtatagccatcaagaccctcatggataattgccttcaggtagcaaaagggggtccacggatgcagtgcttcagggtagcaagttagggggtaagagagttatcatgagggttttcctcttcctgaaactccatttggacaatggcatcgctgtgcctttagtcttgaaaggggatgagctaggttagaccgagctctgtgagcagctaacgtgccaaactgaagaggtatgtggaggatgcaaaagaaagcaggaaggcacaaaagacccagacaccatgttttcgtccgactttccagttacctcgtgggtccacaggagtcagtggttagtggacgaagcagcctctgttcctgtttctctgctgtttctgcacatgctcacaccacctaaccaggcttcttattctgtgttccaaacagaagggccaaaccaaggtgggcctgagaccaggaacttggagcttctgtgtgcccgttcttgaagttttgactttggataccttgtgtatccttcgagaggatcagtggtatcagaggctttagtgtctatttgtcacatgtatcatacaatttaaaaactaaagcattaaatgaatgattcacttacgtaagttaccagaagtgaacattttttttaataaaaagttaaatttttaattttgtgtgtatctgtgtgtgggaatgtacacatgagtacagaggccagaagaggatttaaatctcttggatctggaataacagatgtgtgagtgatgggtgagtgactagtgagtgatgggtgagtgactagtgagtgacgggtgagtgacgggtgagtgatgggtgagtgaactggctgaggagggtgctgggaactgaactctggtcttctgcaagaacaatagtggttaacaatggttaaccactgaaccatctctctagcccctttactttataagcaattgatttttatttagttatgtgtctgcatgtctttatgttggtatgtgcatatgagtgcaggcataactagcatttttaaggaaagattcgtttttttaaaaaaaaaccctcagctaattggcattattttacattttcgtagacctctttgtctcctttaatggatagcagctacttctcgggtctgcttgtgcatctgtttctctgcatggccttgcctggagtatatgaagacaacagctacccttatcacttcagagaagattcttggctgtttcgagaaaggattcaagggatacaagggtccttatgtaggagtctgacaggacaatatggaaggcattaaaggaaacccagacaagaacttagccaaacttgacctttagagtactaatcttatagctgttgtgaggtcaaaaggaaagtagtgtgtctgtagggaccaggacagagggacctgaggtgggcactgctggtggcctggagactaccacccagaactcagaaggcgacgcggtggcaccaggaagaccttgcttcagtagtctgggttatgcacttctcctggtcaaaaatgcggaacggttcctccgtggcagattgtatcgccacgataagcaaaggcaactggtaattcttataaatggggattgaactgtagaaaggcgcagggaaagat

SEQ ID NO: 708 - DNA, 2871 bp, Mus musculus
atggcggatccagccgaatgcagcatcaaagtgatgtgccggttccggcccctcaacgaagcggagatcctccgcggggacaaattcatccccaaattcaaaggcgaggagacggtggtgatcgggcaagggaagccgtatgtctttgaccgagtgctgccgcccaacacaacccaggagcaggtctacaatgcctgtgcaaagcagattgtcaaagatgtccttgagggttataatggaacaatttttgcatatgggcagacttcatcaggaaaaactcataccatggaggggaagttacatgatcctcagcttatgggtatcattccaaggattgcacatgatatttttgatcacatctattccatggacgagaacctggagtttcatatcaaggtttcctattttgagatctacttggacaaaataagggacttgcttgatgtgtccaagaccaacttggcagttcatgaagacaaaaacagagtcccctatgtaaaggggtgcaccgagaggtttgtgtcaagcccggaggaggtcatggatgtgatcgatgagggcaaagcaaaccgacacgtggctgtgacaaacatgaacgaacacagctctaggagtcacagtatcttcctgattaacattaagcaagagaatgtggagactgaaaaaaaactcagcgggaagctgtatttggttgatttggctgggagtgaaaaggtcagcaaaaccggtgccgagggagctgttcttgatgaagctaaaaatatcaacaagtctttgtctgctcttggaaatgtgatttctgccttggcagaagggacaaaaacacatgtaccgtaccgggacagcaagatgactcggattctccaggactctctgggtgggaactgtaggaccaccattgtcatttgctgttctccttcagtcttcaatgaagccgagaccaagtccacgctgatgtttggacagagagcaaagaccatcaagaatacagtctctgtgaacttggaactaacagcagaagagtggaagaagaaatatgaaaaagagaaagagaagaacaaggccttgaagagtgtcctccagcatctggagatggagctgaacaggtggaggaacggggaagctgtacccgaggacgaacagatcagcgccaaggaccagaagagcctagagccctgtgacaacacacccatcatagacaacatcacgcctgttgtggacggcatctctgccgagaaggagaagtatgacgaggagatcaccagtttgtaccgacagctcgatgataaggatgatgaaattaaccagcagagccagctggctgaaaagctgaagcaacagatgttggatcaggatgagctcctggcttccacgagaagggactatgagaagatccaggaggagctgacacgcctccagatcgaaaatgaggcagctaaagacgaagtgaaagaagtcctccaggccctggaggagctggctgtcaattacgaccagaagtcacaagaagtggaggacaagaccagggccaacgagcaactgactgatgagctggcccagaaaacgacgacactgacaaccacccagcgagagctgagtcagctgcaagagcttagtaaccaccagaaaaagagggccacagagatcctgaacctgcttctcaaggacctgggggagataggcggaattattggcaccaacgatgtgaagactctggcagatgtgaacggggtcattgaggaggagttcaccatggcacgcctgtacattagcaagatgaagtcggaggtcaagtctctcgtgaaccgcagcaagcagctggagagtgcccagatggactctaacaggaagatgaacgccagtgagcgcgagctggcagcgtgccagttgcttatctcacagcacgaagccaagatcaagtctctgacagactacatgcagaacatggaacagaagaggcggcagctggaagagtcccaggactccctcagcgaggaactggccaagctccgggcccaggaaaaaatgcacgaagtcagtttccaagataaggaaaaggagcacctgacgaggctgcaggatgctgaggaggtgaagaaagctttggagcagcagatggagagccaccgggaagcgcaccaaaagcagctgtccagacttcgcgatgagattgaggagaagcagagaatcattgatgagatccgggatttgaatcagaaactgcaactggaacaggagaggctcagctctgattataacaagctgaaaatagaggaccaggagagagaagtgaaactggagaagctcctattgctcaatgacaaaagggagcaagccagggaggacctcaagggactggaggagactgtgtctagagaactccagacccttcataacctgcgcaaactcttcgtccaggatttgacaacccgggtgaaaaagagtgtggagctggacagcgacgatggagggggcagcgctgctcagaagcagaagatctccttcctggagaacaacctggaacagcttaccaaggtgcacaagcagctggtccgggacaatgcagatttgcgctgtgaactccccaagctggagaagaggcttcgtgctaccgcagaacgcgtcaaggccttggagagtgcgctgaaagaggccaaggagaatgccatgagggaccgaaaacgctaccagcaggaagtagatcgcatcaaggaggctgtgcgagccaagaacatggccaggagggcacattcggctcagatcgccaagcccatccgcccaggccattacccagcatcatctccgacagctgtccatgccgtccgaggaggaggaggtggctcttcaaactctactcactaccagaaataa

SEQ ID NO: 709 - protein, 952 aa, Mus musculus
MADPAECSIKVMCRFRPLNEAEILRGDKFIPKFKGEETVVIGQGKPYVFDRVLPPNTTQEQVYNACAKQIVKDVLEGYNGTIFAYGQTSSGKTHTMEGKLHDPQLMGIIPRIAHDIFDHIYSMDENLEFHIKVSYFEIYLDKIRDLLDVSKTNLAVHEDKNRVPYVKGCTERFVSSPEEVMDVIDEGKANRHVAVTNMNEHSSRSHSIFLINIKQENVETEKKLSGKLYLVDLAGSEKVSKTGAEGAVLDEAKNINKSLSALGNVISAEGTKTHVPYRDSKMTRILQDSLGGNCRTTIVICCSPSVFNEAETKSTLMFGQRAKTIKNTVSVNLELTAEEWKKKYEKEKEKNKALKSVLQHLEMELNRWRNGEAVPEDEQISAKDQKSLEPCDNTPIIDNITPVVDGISAEKEKYDEEITSLYRQLDDKDDEINQQSQLAEKLKQQMLDQDELLASTRRDYEKIQEELTRLQIENEAAKDEVKEVLQALEELAVNYDQKSQEVEDKTRANEQLTDELAQKTTTLTTTQRELSQLQELSNHQKKRATEILNLLLKDLGEIGGIIGTNDVKTLADVNGVIEEEFTMARLYISKMKSEVKSLVNRSKQLESAQMDSNRKMNASELAACQLLISQHEAKIKSLTDYMQNMEQKRRQLEESQDSLSEELAKLRAQEKMHEVSFQDKEKEHLTRLQDAEEVKKALEQQMESHREAHQKQLSRLRDEIEEKQRIIDEIRDLNQKLQLEQERLSSDYNKLKIEDQEREVKLEKLLLLNDKREQAREDLKGLEETVSRELQTLHNLRKLFVQDLTTRVKKSVELDSDDGGGSAAQKQKISFLENNLEQLTKVHKQLVRDNADLRCELPKLEKRLRATAERVKALESALKEAKENAMRDRKRYQQEVDRIKEAVRAKNMARRAHSAQIAKPIRPGHYPASSPTAVHAVRGGGGGSSNSTHYQK

SEQ ID NO: 710 - DNA, 121167 bp, Homo sapiens
  misc_feature (1)...(121167): n = A,T,C or G
tttaaaagttattgagtccattagtggttcaaatggtggaacttcaagtcaggaagcaggggcaggggctggcagaaggaagtgttgggagagtttgttcttcaaattccacatgtgtgtggccacccagctcttccaatacctaagcgttgaaaaatatggtaccctgtcctccaactaaaattagaaatcttttaaaagatgcaatgcttgtgtgtcaactacactcaaaatcactttttaaagatttttggcttataaaattgtggctgaattcagcaacaaaaagtttttaaagaaaaaattctatgtgtgtatatatgttggagtcagggtcttgctctgtggcccaggccttagtgcagtggcatgatcgtagttcactgaagcctcaaattattgggctcacatgatcctctcaccacagcctcctgactagctaggactaacaggtgtgcaccaccacaactggctaatttttaaaaaatattttatagagttggggtctttctgtgttgcctaggctggtctcaaactcctggcctcaagtgatcttcccactacgggctcccaaagtactgggattacaggtatgagctgttgcacctggcctgtatatatattttagtgcttcaagtacttcatctgccagttgggcaacccaccattgctactgtgggtcaaatgtcccttctcctgcatgacaactgagatgatgtaccctgggatgcatgagccttgtgtagcccaagttccagatggtccatctagatgtagttgactattaaagacctatttggagtttgcatccagcagctctcatttatagtgctagtgcactatgtttgaatgggagtggcatgttaaatacccattgtgatatagacatcctgaacttaatgactattgctagttttggttaatgtaattatactcatttgtggaacattttccttgtaatttatgggagttattttatccataatatgtagaagcaagccattgcactctaggttatatggcatcatgttctaaacccaaatgtgtggaattcttagaaaatctatagttgagggaacagttacaagatgcaatatggtgttatgggtagaaggcttggctgggaaccagaaattctggatcccagtctcagctcaaagttttgccttccacatggccatgggaagttattctccattcccagaaagtgaagttgatattcttgtctgacccccaaaatcatgaggaacaaatggaactgaggggccttaacttattataaaagtaaaattgctgctcaatacatgggataattataattatgtaagctgtttctgaagagtgaaaaaaagttaacaaatgttaattctattggcagtaaatatttgcagtgtttttcagaagcctctctatgcatcatacttagccaagtgaaggtctggggaaagcttttgtttttgattttttaactaaagggaagagaactttacatgtgtcaccacgtgttcccatgttggcagcgccatcatgagactcagcgtaactgggagaggtttgtcgagcggcagtttgaccggatggtactgcactgtgccaggaagccccaccagggcggtgtaccccagagagaaggctcagtgctatccttgttatcttccatttggcgcaagagatcctccattctaccttctgtgaaatggctttttcacctcccatccagtgaagaaggtttgttttttttttcttcagacttgacttggcagaaaacttgatctgctgaaataaccatggcagcaatttctgctccttcctctgagtgcagagaacccggagctctctcctgtttacagcttaccttctctcatgctataggtcaaggcagaagccattctgacgggaaatcacagcattccttaccgctcattattgtgatagcttgttagagccagaactattcaacctttgactttacagagaggaagaggcttagaaaatataggtaaattgatcaaggtctcaaagcaggtgaggggccagtttctggactagaaccagttgcctgacttttcctcctaccccctgtaggtaagggtacacagcaatcaaaggcgaaagagcttgggggtgggagagaaaggagttcactgtattttgatctgaaatgaaaatcacatacacataagaaccttatttttgaggcacaggttccattattctctttaacagaagtaacacttctgtcttctttatgcctgttagccaggcaatgattctgaatttcttcattatcactcgggcagtttgccttctcagaatgttcttttgtagctgtctgtgatcttgacagtgtctgtgtgtccacacagtgggaattttggcagaaaggaaagaattctagcctggtttcccgcaggaaggcttacaagattcattcttgtgtgttgcctttgttccttctcaatacgtgaagtggttggcattgccttggcaactccattagaagccagtggctgctttgtggacatttgtttcattgcagattctcctgggagcagccttggctttggccggaactggcaccagctgctttccatgccttggggcatggagccagtgtggggagggggagggcaatgtccaggggcagctctggcttagcacttatactcccagttacagcgtcatcccatgtagactgggcaggcagtggagtggagaggagaatggggagctggagtagaggcttctgctgactggagatatcagcatggccttagggtctccctgtgaggctgccattgcaaatgagtagaccctggagagggtataatggtgatggaaaagagctggtggtcattgccaggtatgggatgttttgccccaatgtgcaaagtggggtttttcctgccttggcaatttgcaggccagcttcagataaatgggaaggtaggtaatggggtaaagaggtaaaggggtgtagaaagacatagtgacttcaggactgctaaaatcttggtggggagtaagaatggtgggaaatacgtgaagtttctgacacactggagaaatacagtgtgcgtctcctgtatcgtacaccatttgagagtggcaccctcctctagcatccctggggcccatctggcaggtattagtcatcattatgatcaacagacatctattgagcacctgccctgcaccattaaggtgctctgctaggccagggccttcaagagcctttgatgcttctagaattgtgtcagttagaaactgataattccctgggtggatgtggccccgtgggaccattgcttggcaagtgaccagcaagcatccttttatgaaggaaaaggtgtaccccctttccaggatagtgtcccaaagccccagcttgttgaattttagcaaggatttcaatttccactcaatttgttggctgagcaccaaccaaatgtgatggcttcatatttgacagtgaaaccaccagtccagatcttttaggacctactgaatgaaagaactttgggagcaaaatgtcttgaattttgccttacttggggctcccccagaagcagaccctgaggcaaggatggaagtgcaggtttctttgggagatgatcctaggaaacactgatgaagagtgaagtgaggcagggaagcgaaggacccatatagagtgcgccatcacgtgagttcccactaggggtaatgggagcctcatcccactggggaggtctgggtgccagtttggaatacatgcctcagggtcacccctgcactaccacccctgggcatgggagctaaagtattgaccccccaactcttaatagccattgactaagaactgctggggttggtacccacaacatccctttggcctgttgcgggtgaccaagagggctccagcagccagaaaagccttcaggtagagagatgcaggagctgaccatgagaagttagactagccaggcagagagatgcaggagctgactgtgggaggttagactagcttacatggaagtggtggagagtgagaggatagtcaggcccctgacagcatctgctgcaggtctgccatttgtattttcacagaagtttccagagtctccaaagctgtaacagtaaagctggtgagtgtacaagtgcctgtaccagacatggctccttgccttttgtgaatagactttatgaatgaacattgaaattttgtttatttttaaagagtgcagaggatggccttgaaacagggtaaatttttctggggctcttggaaattaaatggcccctgtgctctgtggagctgagctcaggagtcacaggcctggggacctggaggggcccaagatgtgattcagcacttaggtgtcgtgaggataataggatgtcaagttcctgagctggtacattgtgaatgaccgtcactttttcatttcacttcatttaggggataactgcttggtaagtttagtgtaatgcaaatgcctgatgtaggttggtcaccaactttttttttttttaaaaacagaatgacactgaccacatcttgagcaaaactctttgttcattggactaattaattttgtatttgaaaataatttggaattgattgggaggaaagcagggggaaaaaaggaccagaaattcaggcttattgtttccttgacgtttggagagagcaagtgattttaaagtggaacttctagagcactggatagggaggcaggaggtctggatgcgaggcacacatctgctgcctacctagctggctgcacgcatgccatctaccctctcctgatctttctttatttataaaacatgctgatgggttgaaatgacctggaaggaccttttggctctgaaaaattatacaattttaaaaataacttcaactttccatagcaagccttgcatctgtctttccctagcctctgattggcctttgcccatttttaattccttctgttgaaaggaatgcttgccattgcatgccctctgctttttttaattttttatttttttccccaatcttgccttcttcccatatcttcagtttttctttcctcaacggtttcatgtcagcactaccttcatggttaacactttcttgactgccacaggctacagtagggatctctgtcttttgttacctcataatcactttgcttcagtctttcatattagtcttagcatgtgttattgcggatgtctcctgcttttctggcaaatcataagctttttaggaaaccagtactccgtaaaggaagaacccttgaagtaagggcctggcagttatttcccctaagtaatagagcagataatatggcttggccttagttttccagtttgtaaaatggggataataatacctagctcatagagttcttatgagaattaaatgggctagagtataaaagggcatgggtcatcgtggttggtgatggtgttggtgacagtgttaaggtgacagcacaggctgaaagaacttgtcatttctgtactttcaggaatgaaatcatataagtgcctggaacacagagttacttattgttctccatagtcagttcctcttctgaatacagtactcctcagtgtcagaaggtaattccacagagtgagtttaaatctctctgtgaaaattttagcctttgcttgtttctttcttgataaagagagcagaaaaatcattcaaatcattggcagccttatgctacaattcgtcgtcagtcttagagcttgttattggattacttcttaatgatctcttcttggggataattaatttcactttccttaacatccctcctggtgcccatcttcaaaacgtttatgtgaatcttttgctttctgttgtctcccagagtaatattccttccaggctgggaaacagttattgggtaatgggtcaaatgtattaataggcaggccatatggttcccagacaccttgcattcaacaatttgatagagttctggtggtatgattttttaaaaatttaactataaaagtgtaagaaccatctgctgttattttttgtatgtgatcctggtaaattattaattttagttatactgctcctatgtaattagcactgttccacatgcaggcttcaaggcaaagcttgtatactttattttcagtagtaatgtgtgtggaatgtgtgtgtctcatccagattcccttcataaattgaaacaggtttgcctacatggggttaggacttgggatttatatggcttctgttttagctggtaaaatgctataattgtagtggttaattagattgattgataattagtcacatactaactactatggagcaaactaattcaggtaatgtaatagagagtgatacctgggtggggttggggctcctaggaccatgaaaactttcagggaaggagaaatttgaattgagttctaaagagtagtgataaggagacaggtaaatgaatatctgcagtgagataattctaagggaaaggaagagttaagagcaaaggctgtgaactggggaataagcatcatacagagaaaagtccgtggggccacactgtagtgagatggaggatgatgcaggcagctgagggcaaagagggtctaatctaagaataataggagcctttggaaggaattaggcaaggaattggtatctgatttacagttttaggaagctcattttagctgctaagtggaaatttgatagttaggagcgagaattaaggaagggagaccagtcaggaggtgatagctgttgtgtagaagagactaatggagaaatgatggactaagtttgcatggtatagatggtgagaagtgatagggtttgggatatagtttggatatggaatctatgggacatattgaatggttcttagttttcagtctgagtaactaggtgattggtggtatagttcttactcagatatggagggcttgatggctcttttttggtcagttaaatttgagatggctcatggacacctaaatggaaatgtctagaggacatgtgaatctggatgttagaagagagatgaaggctgaaatattcatttaaattacatgtaactcaagagtgtagacagaaaggaggcagaggtctgggtcttgaatacaccaccatttagaagtttgaaagaaacgccagcaaaggacattgatggaggtagccagagaggttggagagagccatgtgctgcatagacacctggaagggactcgtgtctccagaaggagtgactggtgacctcatcattaggtttcaagtgttagtacccagaacctgcattaaatgtcatttgaaaagtgtattctgtagctgtaaactcagtgatgactagagcaagttgggcccagtgcatgcctggagaaacctttagccatggtggaataaaaaatgggcaatcttgcctccttgggggctactggggaagggtctttgttcaagtctcaatcaggatttgtgagattttcataccattactaaagcagcaaagagtaattagtgattttttaaaatggcaattatcaattatatatacagctggtacagctatgccccaagtcagttctttgaaaatattcaataactaaattctgatcaatctcttccgagactttaaggttgacctaaaataaaagcctataactaactcagtgcaagacaggacacataaaaatatttacatttttaactacataacgtgttaatcctgacaagataggtctcataacaaatcactttctaaattttatcttttcttagtatcaatcataatgacttgaaggcaacttctgtttgggagttaactttaggttatgaagaatcgctgtattatctgtttgtcatttgataaattatgttatttaaatgaggaatagagatttcttgctctctacttctcttaaagtgaaggcataatgcattctaataaacattttaaacagaagggcaaaactgaggagtcctttcttttttgtaccatgtgctataatttaacaggtcattttgtctgctgtattaagtgtattttctctaaaacccaaagcaggatcaagctgtaaacaagacgctttactttggtgattctcattgtttgtataaataggggatttgttttaaattaagcaaagctacatttttgttccagaaagttcaattgataacaaatacccagacaaactctgcaaatatttactcttaccttttaccttactgacatttagttgaattttacaaatagataaagcttaataagcatgtagtaggctgatagttggcaatagactgtggtgaggaatagtctattggttattcaaccaaatccttgattcactaactgaaggaaacttactgcaaacaaaacatcagaaaatgttctatttctataattttagcagaatgactctggttctgctgctttgcatcaaaacaaaattttatagtaactgaaaattccctatttctctaagaccaaatggaagtagctcctttacctggctggtgctatccagttttcaaagagtaaagcttaagggctaggattttatctccagttcagctctacccaagtaataaataagtagaacattaagccattctgacagctgtgtacttactttgtgtgaaggttataggatgtaacaagccttgctcttggatccctcatgagcaattatcttttcgaggagtcccactgtccttgggtggttcctggtgtccagagccacacataggaggggcacagtgggagaaaaggaggctcttggctctgctctctcctccctctcatcttctgccctcccctctgctatgtggggaacatgaagatgaagggcctcctgagtgagtccggctgtggaagagggtgagcatgattgcctcctgcctgggcggtggtggtagagaagaggtgccctcaggatgggttctcctagggaaggggctgtgtctgtcccacccaccacttccccagcactcagcactgtgcctggcacctaaatgcccagtaactccttattaagcatacagtgattgggcgtcagggcacatataatgcacggtggagtttcttcccttacctctactagttatttccttgaaacacacacatttgagcatcaaaccaaatcccaagaccacacacctggggaaatctcttgatttactctacagaagggctctctttgtcttggaagcctcaacccagttaaaacatcacttgtgcatgagaaagaaaacacaggaattcttttggacacaaagcaataatatctttctaataagagcagctacttaaatctgtttgtcccatcttcccattggctaacatttaagcacatcaccttggctaactgtgccctgcatgaattggctcctgattttcttgccctccagttccttgaacaaaccaggccctttgctgtctgctgggcttctgcctaggatgcgcttctacagctcttcaggagcctccatcttcccgatcctgtaaagatacacttaagtggtccttcttcaccaggctttccttgccctctctagcattccctctgtcccactgttttaaacctaggcattttgcgttttcctatgtgtttgctttcttgcttattagctatctgctcaacttaattgaatgattcacaagagcaagactgttttgtgattttttttttcagcatctagcccagtgccaggctctgtgtaagtgctcagtaaatatttgtttgaatgaatgaatgagtctcaacctacccttcatttaaaaagtggttcaatttaaatttttttaaaatctcagattctcaacatacagtgcacatatacacaatgcatgtgtggtttatgctgtaaaaattccctgctcttggtaatgaactgccttaaagaacagggttggtgacttagtgcctatggcctagctactaatgtttgcgattttttattcctaaacatctaatgtgttttttccacctttttcttccctttgtctttcttttttagcaagggaagccatatgtcttcgacagagtgctacctcccaacacgacccaagagcaggtttacaatgcatgtgcgaagcaaattgtcaaaggtaagtgctatttctttatttcctcctgggccattcagagtaattgaaagcattaagtgatatttgcagcctaggaatcaatgtgccttgactgtaagcagaggcctgctaattggaaacactgaattctatagcctcggttctagccctgatttgctatgttgtcaggcaaattatttaatctctctattctcccttttcaaggacatgtctttatttcttttgccaccttttttattttgtcacccaaaagcttaaaagcaaggtaagctgtgttcacactatttctgtaataattttaaaacactgggctgcaggtatggaacctcctttttcctttgaaggagaaaatatatattcctgatgctccagttgtacatctttggttgatttattctgtgtgtctgtctcccttttactaatatctctcagcaagaagccttaaatatggaaaatttttgccatttagaaattttctacagtgtcataaaatcacattaccgtgttggttattgagctggtcttgccattcagcattccttaattatgctttctcctaacccattttcaaccatcccacccagatcctgacatttattcctccaaacaggtagcctcaagcctacatttacatcttagagatcagtccttttctctaggactggcattggccctggaggattcatgtcaaaatagcagcagggagatgaagcaatttgcacattgctctaccttgtcctttcaaatcaggggcaggttgaagcttgcattggcaggcttgccatctggacagagctggggggcatctcctgctactttgcttttcatcatcaaatcatttccttcaaatgtgaatgctgtggcaattgtgctttcaaatgtcttgatgctgccccctgtataggcagctctggatttaataagcaagaagtaaaaacaaaactaaaaaaacctaccatgtcactttggatctgcttgtttttagaagctgactaacctaagtatttgaaattcatgaaaatcagctctgggtacatctgttcgtttaattctgaccctggacacctgtgtgggagatgcatgtcagcatgtaatgttccttgctgaggtggatggttattcacattcttgctgcagacatcaattaattttgaaggtcttcacagtgagatttttatagaaacccaatgagaaaaaaaatatgactgaattcgagctctttctgaattaatagtatggacctatatcgggtggtaatttttatcttctctctgcttttactcttctgcttctctttctatctaaacatgttttctctgtttttgcagtatatctttcttggtttgctcctactcagccctgctccctattattcgactcattcatatattttttattaaagtaagattaatcacatatgtgccaaaatttctttttctctcccccttcattatcacaaacaaatagtatttaccacatgctgtgctaaacatgagggccatttaaatacatcctgtcctctctaagctgacataattagaaatggatgcactctgttaaaaaaaaatcctgtgattaacaacctgtagtaatactctttgagtctttattcactaaagaagtttgggcctctttcaatgttcggatttctctacagtatgaaatgtcagaaatgggcaggtcttgtgaagatatggcctaactctggataacttgagacccaatatgtagtgagctataaagaaaaccatctagcagaataaaatcaggcgctgacatgatatgactaacagacatttctagggtaccataaatatgtatgatcatacatacatgccttattctcccttaaaaaggaattgatgaaggtctgattggatttcacaaatatccactgaggctagtgtgagaagtggccatgtatttcagaatcagtaagctaaaacatagaggtacaagaaagaactccttggaacagatgatcaagtatagctgaggtatctcttgccatgagtaaccctatttaaatcaagattgggaggcggtgctgtggagccctttttttctagaggctaataattaaatcagatgatttccgaagagcaccatagtccccgtgattcctgataatgggtggaccaaggagcattcctttcaagtccatctaaactcttaatgatttggagcatctgggaggctccatttaactcgatggctttattctctctctggtttttcattccctaccacttcactgggttaaaaaaaatatattttaaatgtttgtttgtggagtcctggcatctctcatgctcccatctttgtctggtgtttgtttttcaaaattttgcttgaaaaagcatgtagaattctcctccatttcttctcaaagaggttgtagggtttctgactaccagcacagtaaatgggaaggctcctttggacgcctaggaattaaacaccatggtaactggatgctattattgaagtactgtaactatgtcccagcctacagaagccacaccaatcatttgccttccaaattaactagatacagatgatccagatgctagagaaggggaaatttcttgttttccagttctgattcctttaaaattcattcattcagttgtttcttttaatcattcatttctgtaagtagtaataagtacttaccgtggggtaagcagtgctgggactggagtcgccatgctatgtaagactgtctgcaaggagctttgagtacagggaaagagacagatgtgtacataatcatcacacacataggcattatgtactttagaaagggtgtatgcaaaatgccacgggaacacagaagaatgtcacttgtattgattttgattgggagagggagtggagaattaaagaaggtttctctgaaaggttgggtcctgaggactatagaatataggagggttgtacaagcagaggggatttcaaaagtaaaagcataaacacacaaattctgcttggacaacttggagcggcacagggtgcagagtggcattatgggagatgaggctgggacatttaggctggagcaatttgatggcaatggatggactttatcctgcagacaatgtggacccaatgaagagtgttaagcttaggatgacattatcagatctgttttgttattatcttatatatgactctgaagaaaaaaaatatttttagctgtgacttatcaggcactgtctatatacttgacatatgttgttgcattttaaatcataacaactttctgaagggtgagcattattttcctcattgtacagaagaggaatttgaggctcagagaagtgaagtaacttggccaggttggttcgggggccatggactgggactcaagcctgggcttgtcagactgactgactgatattcttctgtactcccctgcccccctttcctggtgggcacacagctagcatttgatgacaattattttatgagtggtccctgttctgtcaggccatatggactattatctaagcattgcaaaagacagggctaggaatggtgtgggaggagggtagagaagaggggacagggatggtggctcctacaccttgtgatggccctggtggcctgccagtgatgaggtgcgtttccattctgaagatgcagcatgcccttgcctgggcacagggactgccctttaggctggccagccggcatgcgggctggcctcaggtagtcagcaggaccgcctcatcatcctctgattatggcctacctgagtggtttggtgactggtgaggatggcctgtcagccaccatcaccagaaaccctacaggcccccatttcccctggagagtcggtaggaagccccatgcctccgtaggactactgatgggtaggtatgatcacatcctcccccaattctaatctgaagatggcactaactcttttgctttagcaagacctggattcagaactgagcaaatgggaggcaaggagcattttaagtatctactgctatccttcctcctcccctgggagatgagaaggctctgggcacctgcagtggaagctccttctggggttcatgcggctgcgggatggaagagtgctgtggccccggggtgcggcgggctatgctgtaccagtggaggtcacatcacaccaggcactaacacaaagaaactttctgtctgcggagcgtggctggcatgtggaaacattgtttctgcagagactctaaaacaaatgcattccgtgggcccaggagcgggcactggacgtgatgaaagtgccttttgtgggcgcttctgtgggagtcggatggaggttggcgtggcccccgcagtgcggagcgcggcctggcctttcctgctacggctccccctctgcctgtggtcgcggtggccatagaaacgcgctgggctcctgctccacttcctctctctgccttccctcaccagcaaatcaaaacatagactgagcaaacaaacaacaaacagaaaagaagcccccaaaacctggagtttcgaagaaaatagagaacactggcttcaaagggccttttcgtttaaattaccttctagtgcagcagggagccgatagagggcgacgtcggctcccttcgaccttgatcgctggagagaggttctgcagcagtgaatgaactgtaacgtgattgtaaatactttcagtactttcagggccgtgattgtaaatactttcagggccgagtggagtttgttctggtggggttttatgtgttctccttttcttacaaaaaaagaaggagaaaaaaaatagtgttcagtgacgaaatggcagcaagaaacagattctccaagtacagtcttgcacgctcctcagctccttagtccaaaacaagtgaagccacggacgagctctggttttcaggtgcttgacccagtccttactggcaggagtttcatgagcagcgatggagtaagagttagtgggattgtgccttctgtttagtgatggacccagaggcgtggatgagacccgggaggcctcgggtgtggcctaattcaggaggaagttgagctctgagctgtttccttgggtgtggccggttgctcagtaccacctccctggggcctcctgcgtgggaacatcggcccttgcagggtggctagcagaggtcaggatggctggacccctggccctggcaacttcggtgctgttctaacacctaggccggtgggttccagagtgtttcatacacagaggcttaagacaaggaaagccctttcagggtgtgtgtgtgtgtgtgtgtgtgtgtataggggggatggttaatttctaataaatggtaatttcgaataaatggaaactgtgatattgtgatgtagccagcattccaataggctggagttttttgtgttatgaatatggcatttttaaagtttgacctaagggtgggacctttttcctttgggtccctcaaagcatatcatattcatgttagtgtagaggtgctctgtctgctctggcctaaggaatcttttcttggagtaagttggcatttttgtggaaactgaagcttgaacctccaaaccttacactgactacttcaagtttttgcttcccactgttagcaggggagccattagccgaaatctgatatgtatgaacattctctctccctcctcttgctccccctcctctctctccctgtccctcctctcccaccaacccccaatatagcttgatacaaactcttgagggctgctagaattaaaaaaaaatcctgccacttaatttttcttttcttaccttcctaaaataacatattgcttttttgttcttatcccagttcacacttcaacaacctcagatcagtcaaatgtttattaaaatttttttaaaaaacataacaaatcagaattgatatagaaaaaaaattcaaaaaagcaaacctatcaaagcaaaacaaaaacaaaccagcatcataaaattcagagaaccccctctaccatgctcccaaaagaaaaactctatttagagcctgaagtagatggagctgattgcctggcttggttttttacatgaccctgaataggacacctcagtgtggggtccttctccctgcctctacagcttgtgcaaatgaagacttcctccccttattcggaatggaggatcaaggatattaatgatgcattgttcctcttccagtgatatttgtgaggatgaaggaggaaagcaggagagaaatgagtgctaaatatattttaatcacctctgctgctttgaaagaattcccacagataatcttcagctcttcagcaaaaagcagcctccaccctcgagcctccccttgtccctgtgtgatgtggcaccgacctgcagtgtggaggggtttgcacagtgctctcattgtgtaattaaaagaaatttcctgatgctgatgggcctgggctggcttgttagcactatcagtgcaaacacagagacattaaatttaagtgagggcccggctagtttctgggctgattggattgtcatcctgaggctctgtttatagagtggggcccttttcctcccccacctctggactcaaggagctcttgtggggctttcaggagaaacctccccaaggagctagcctgggccagcgtttaaactgacccagattaaatcttcaggaaagaaattctgttcttcatctcactccagaaacagggcataagaataatgttttctttttcccccaactgatctcaagagatcaacttatagaagaaaactcaaatatccttctactaaaaaaaagttttctgctcgatgtctctatcttccttttgatgtcattgggagaaagtgtgtctgcctccttcttcattaatgtattctgtgaaatgtgagtccatttctttccatttgtagaacaacagaattttctacttaaaattcacatggagttgaaatatatcatttgtatgaaaaatgagatgggccatttggaaaatgtaattttaaaatatgcaacctacaccagcatatgatcaaagtaatgagttaattttaatttctttttcttgttcacagatgtccttgaaggttataacgggacgatttttgcgtatgggcagacttcatcaggaaaaacccacaccatggaggtaagattacaatgtgctctaatgcgaatctctgagatgactgaatggaactgacgtttccagcaaaacttgaggtgcatgtggctttctttactgggaaatagagacggttatgtttggccaattaattatgtctttgagaagttttaaaatagcagcaaaaaataaagtctcaggaattcagtattttaaaaagtactttattgataactttgtgacagtaacaatacattctattcagaaacaatcattgattagctaagcagtagtgtgaacatcattctggacttcagcctcattctaactgggaaagcctgttgggaaaatcatttaccctgatgaaggcccccggggaggttcgtctcttagaataaataaaaaactgtaggtcagagatttttaaaagttggcttgtgggccacgttcagcccacagacatatttttgtttggactgcacggtatttttttttttaatagtaagcaatgttaaaaattggatgatttcacacaattcaaattttccatcttaggttgaatattctgaagatctggcagcactgggtgaatttcaccataatataaaattcaagcttcactgttcacttcattgtcctgttcacctttttgttaacatttctagtgcagggaacagctgctgtcacctaggagaagtttggtaaaatatttgttagtatttgtgaaaatggtacctgtggtactggctctggccaccccacgtacatggggctggactctccattgtactcacacccagcccacttcatgcacactggggtgaagacgaacttatatttggcatccttccttattgacttacatacctgctccctgaaggcacttcagggtatgaccccagctccagttgttggctgtggaattttgtggcttcagtctgttttccaaacaaggcaggtctgcagacaaaattgaacctctttgcctcctcttttccttttttttttttctttaaatcaccaaatcctatagggccttcagagcctgataattcttctaaaggtgaggcccacttgataggtaaggagaggtggtaagcgtggttattataagaaactgcacagaggaagtttggggaattcagcagcagggtaagatgaatccttaatccttccagcttagtgtttttcatttacgatgccctcctgggaatagcactgagacggctgctgcagaatcggtttagcttatgaatcattcctattgaagaggagatttcaaaggcacgaggctaaaatcctcagggctctgatgttctgctcatactgatttcaagtgtggggtacagtgccggggatctcatttctgcggtgttgactctctttcacctgttttgctgaagacaaagtggttcagagactgcacagattaaaggaagcatgaggtttatttatcacttctttctgactaagcaggtctttcccctgacacctgagtggcatcagcccatcttctcctcctctcacactctactgcagaacgtcttggaaacgccaccctgctatcctcacgctcctgtcccggcccctcgcctttccctctcttactaggcccccgactcttgaccttgagactatagaaaagttgcagttctacatttcctgtgtcccacctagtccagtacctgtagacaaaaactccctcctaggtcagatgacacttgaaagagagatacggtgtctagtgaggaattcaatcagtctagaggtttttttgtttgtttgttttgttttattaccaaactatatataatgccaaacaacaacaacaacaacaacaaaaacaaaagcaacctgcattatttaaaatcccccaaaatctcttggaatgcttacaatagtgaccttttaagctttgggattagaaaatataaggtacttgctaaatgccagaaatttaagctgtaagacatcaagagagagaatgctccccagtgtaaaatcttatttccggagaagagatggatgtagggtgatggcaaagagctatgcccgccctttaaaactaatatgggaggccaggcgtggtggcttacacctgtaatcccagcacataggtcaggagttcgagaccagcctggctaacatggcgaaaccccatctctactaaaaatacaaaaaaattagccaggcgtggtggcgcacatttgtagtctcagctacccaggaggctgatgcaggagaattgtttgaactgtggaggcgaaggttgcagtgagccaagattacaccactgcgctccagcctgggtgacagaacaagactccgtctcaaaaaaaatagtaataataaataataaaattaaaaaccaaaaccaaaaacaaaaactaatagaagagatattttgctagaggctctcaagccctctgtgtcttacagtgtaaacttcacaatgcctgaccagtgaggactcatgggggacctgaaaggaactgggttctggacaggtttcacctccggttgcctcttcatctttgtcagttttaaaaggtcagttgtaatgagttgctttcctttattgtgacttttgcagatcacatacttgtgcctacagttagaaatagttgatgtggatgggagttttttcctagtgccacccaccccctcacttaatcgagttctttctgtagggtaattatagattggagaaaaggtaggggatattttcagaggaagacagagggaaggaggagccctaagctgaagtcatagatactgcgagagaccaagaaatccaggatcctggaatgcaattaagtcaaaaaagccctacagggtctgcattctctgaaaggaggattttatgtattcaaattacacattgtgatcttccaaaggctttcggaaggggatgttaactccctgagtgtccctgagtggaaagagaggtcacattttaaagatgtttttcactttaatccccctatttttggtctgacatccagtggtgattccattaccttgtattgaggggaacaaacagacaagcctacataaaattggaaatattagcttctcaagatggagcatttaaggtaggttttcagtaaatatatgactcactggacagtgttaatgctaagctcggtggacaccaccacacagaaggtcctgggcttgtgcagcccatacccagggttggcgctggggaggacacagggggttccagctccagctgaggaaaaagagactgttcttttgttactgtgagtgatgctgggaagggnnnnnnnnnnnnnnnnnnnnttgtgtgttgctttcaatacttctggaagtcttcattaggagttgctgtcagatcctaaggcatcttttctaaaatcttcaggggtggcaaattctggaccttaaaaatggatttggtaatatccaaatagcagaagaatttacctatccctatccccacccacttaggtgaaatgagtaaagtagaaaagcggggaaagaagaatataagacgatcttaaacatggatttaggtattagaaacagctaaaaattatttggaacaatttggcctgggaaccacagatttttaaaagaagttgatgaaatgtattttcttgattgatctgttaaatgatactgaaagtgttgccagaataaggttcttagaaattttggaaaattttggaaatcagttctagaggtgatttcattaaacaagattgccttacttggaactccaggctcaggtcagtttgtaaatactcaaaacccaaacccatatattctcgttccttctcctgctcccttttcctcctcctcctcaccccacactagccacatagactctgattttgtttccttgagtggcagctggaggcaataatgtggggcctcagaacttggcagaacaagtgctcccctgctggataaacaggccaacacaatgagtttttccaccaacttctggtctgttggcaagtcaggtagatgcccaagggagctggcaggcacacgtgggtgcttcctgctccaccgggttctgtctgaggaacccagagatggttctccctctctctcatgtgtctcccagcatgctttaactgcccgtgtttgtattttcgcccactaggggaagctgcatgacccccagctcatggggatcatcccacgaattgcccatgatatctttgaccatatctactccatggatgagaacctggagtttcacataaaggtacgtattactgattggtccccagagaagacactgggccccagataacgtttcttatacctcctcctttcaagaagatataaaagatgatcctactaatttaaatgacattcttgtggtaagcagagccctctttattagtgacctaggctaacaggtgtctggagggtttgcttgaaatatccacataatgaaagcaaaagccttctttaggaggaaatcatcttgattgttgcccaaattctaccctttatcctctggatttctgtgggtatgactgaaatgtgtttgtgtttgggttagggcagcattttccaaagtgtgttctgtggaacacagtcccttgtgttattaatggtgggctagcagggaaaagggctgtaaggccaaatgagctgggaaaatgctttcttgaacagtgttaagtttatcacaggtttcaatatgctctgcaaaggggacatgcattagattacatttcccagcttatttgaatgtagacacatttctcctcctaagagtatcacagacttgtgttttgagcagagtgtcacagagcagaactctgagaaatgttgggaagaggaattctcttcctttttatcttcccccttgtattttgtttttgttttaaaccaaaacttgttatatgacttaaattggcattaaaagagagatttctactctcttactgtagctgttaaataatcaaatttgatagtagggtatattcattggaacacctcttttgcaagtggctgaaaggcacttgtttaagcaaatagaggatattgtttataagatacagaatctgacagtgggcattttgtggaggatgaagtgtggagggcaggaaatctaagccctgtttttctttttaaactttttaaacaattgagatattgttcacataccgcaaaattcatccttttaaagtgtatagtttgatggtttttaatatattcccaaaagtgtacaatgatgatccttatcctaattcttgagcatatcgtcacctccaaaagaaaccccaaacctgttacagtccctgcttttctgcccccttgcttgacttctttctcttgttctggagcatctttctctctttttggtgggagaaggggttggcaacatggcagctgctgctccaccattcccttatttccaactctaaattcccttgggcagggactcattggcccagcctacataggtgccccccttgcccgatgagctgtgtccaggatgcacatgctgtctgggggcccccactgtggctggggagggtgaaggggcagttctaagaagcctcgctaagcagatctgctaagagatttcccttcaggctgggatcttagtgcaccaggcccatctgttcagagatgaggaaacggaagtttaaagatgcagggttaggctgggcacagtggctcagacctgtaatcccagcactttgggaggttgaggcgggcagattgcctgaggtcaggagttcacgaccagcctggccaacatggtgaaaccctgtctcaactaaaaaaaaaaaatacaaaaaaagtagccaggcatggtggtgtgtgcctataatcccagctactcaggaggctgaggcacgagaatcacttgaacctgggaggcagaggttgcagtgagctgagatcactccaccacactctagcctgggcgacagagagagattctgtcttaaaaaaaaaaaaaaaaaagacgcagagttacaaggcccaacttaaacaccaagttattgataaaactaagaatagaccctaggtctgaccaaccgcacatgcgataccttttcaattatattaaacttctccccttactactgtatacctttcgtaaatgacataaaaagaaggcaccaactgtttgcccaactataaattacatctagcaaatcacttttccttaggattccttttgttggctaaagcctgcttctccttcttgccaaggttctttatatctaaggatacagaagcttgttgctttgatgggatcaagatttagaagcttagtgcttctttagggctgtttgcatttaaatagcttaaactactgcagggttcttatgtgataatcctggaataagatgttaaaccaattactgccctcaaaatagggtcttgtgttagaatcttattaagataaaaacagccctagcatgaagttaggggaggagaggaacaacactcttaagtctctagggctgaattttacagtctggatttctgtgttgcatttgtacttatgcttacttgttttataaataataagtgggcaaattagttgctgactactttgtattctgaaccggatagtgagaggctaaatcaagaaaaagaggactgactaaggcaatatcgaaaatctgctccttaaatgagtcccacagaggttttaaactttatttctgaacgtcctatttcttaatgccaaacaatgcctatttatttttcttccgcctagtctcacaaagtattttaaatgacaaaacaacaaaatcaccaccctcgcacacacaccaaaagcagaaattaatgaaatcagaatcctgtttctacttacattaaatgtgaatatgattctaattgccagatttgccagtatctagtttgtgacttttttttagatgtaattaattttctctgtaatctatggaaataaggccatatgtttaagatctcaaaaataatagacaagtcttaatgaacatcagacaattctgaaataaatagaatgcgctgaaccagggtggagttggctgcaggaaggactgggttagagatgtccaggattggaggtcagacagacccataaggatgtggggagtgtggcagcatgaaagattagagaaagctgtaggcgtgagtctttcaaatgtcacataagtgtgtccatgagagatgggcctcagggacagggaagtctgacaggtgttcaagtaggcagatgttgctagggatacaggcagccaggagagatgcccagcagtggattccagggctcaagctaggaccccacatctcagagtagctgggatggttccagtcaggtagttccagaccgaggcacattaaggataatggatcagggctgagtcagagctgggaccagtgctgggttagagtctttgcttccccttgactggtccagagctgggatgtagggatgaggttttacctgagtagtcacatcccagctttacaactttacaactgttttcctttctgcccactcccttgtttagatttcaaaagcacttatgaacatagggcagataagtttattgggtaggcagacagcagatgtaaacagagtacagaatcctagagggggatttttgacatcgtaaagccctatggctttcatgtgacagatggtacaattgaggcctagggtcttggttatgtgtgaattgagtccctaagaccacatatttagttaaagcaggtctcagacatcagccagcataagaatcgcctgggcaactgagaaccagattcctagttccttttatctgggattcggattcagcaggactgtagtagggttcagggttctgcagttcaaacaggttcttaggtgatgctgatgaaggtggtgctgtggctgagccttgagactaatgggaaggcctccttttcttctcacagtctaaccatcttttatcaagtcccattttgttcagatctttcctggatgcaccagagctggccaccattaccagctcttgctcagttacctttctgagctcttgtagttctaaacacactgcccttgccctctcctggcttcttgcatgtgaacatttgggctaagtctccttcatgatactgtcagtatcatgcaataaggtgaggcctactgagtgttttctaagcgtgcttggtgctcatctaacttaaagcctagagtcctcctgtaagtgtctagcacatgatgttaagaacacttgaatgacaaccaaagggagctgtgatgtgtgtaggtggagagtggtccacacttagggaagcgtagagcaagcgggaagtaggggaatcccagtagagctggccagattttaagtcttcactttgaacccctcttcttactcttcttagccatgcatgatgaaagctttcataagtactaataatggcatttttgaaatacactgcggcatgtctattccaagctcaatttgtttttaactaggtttcctattttgagatctacttggacaaaataagggacttacttgatggtaagtaacctcagtgcttgtcctttatttgttctgtaacgaaagtccggggaggttgaaatggtttatcacacttctgcttaaggaattaatgaaaatttatagagatactctgttgccttcagggtatatgtttattctcagccaaggcttaaacttgcatattgcaaagagattagatttgactgtctttgtaacaaacttccatttttcctccaatatagagtctttaacttttattttcttctttgcctgctgtcattctcatctttttagtatccaagaccaacttggctgttcatgaagataaaaacagagtcccgtatgtaaaggtatgaggaagatttgattggtgatgcaattaatttctctccagtctctgtcataataattattacataagatgtgcagaatattatctgtaaagagcatataggcatttattcaggctccttatatttaatattcatctggttttaaaaattgacatttactttcttcaattgtatctttcctttatgacattattatttaatattgttcacatttaaagagattttgatattgagtgcaactgtttttactttgcagtaacgcctattatagcattatctgtggaacatcaaagtagctaatattggtggccatgatcataaataaataaagatagaaggcaaagcaaaacttcatccatttcttcttctctcattgattttcttctttgattttctgtcttcttaaagtgttgctgttcagtatgaatatgtactcaaaaacctaggaaaatttgacagttctttttttggtttacgtctatatttcctagggcttgctcagacttctctttaatgtagaattcaagccctgggcaaggaggaaaagttgttggatcgatatttcagcctttctatttatctgcacctctagaagataaacaggaaaatgtttcagcctttcaaaatattgttgcttttcaactctttcagtggtgaacctgaactgattctcttccaggggtgcactgagcggtttgtgtcgagccctgaggaagtcatggatgtaatagatgaaggcaaagcaaaccgacacgtggctgtgacaagtaagcatggtgggggtgtttcctcccctgcagcttgggagacagatatctgcccaccaaccgaggggggtggggaattaggtacaaatgaaagaatgcatgggaaggtgattaaagagcagtgctcggacacagacgccagggtatgtgtgctatgagtatgtctaggcagtcatgggaaagggtgccttctgctgtccacaggactctgaggtcttggagatattgggtgagacttactggaccctgataacagcctaagcctgaacattaggaaaaataaacaaccagccaaccaaagggagggaaagagtaagctcatcagtttatttattttgatcatgttattgttcaggttaaaaaaaagttccaaaccaacaaattctataatatgttgcagtcacacacatggaaataaaccatgttggatttctgccttctgtaaaaaagaaaaagaaagggaagaaggaagtcagaaagcagagccaggagctttagggaaagccttccgatatgttactagcagacacattcagatcggctcattggctctgcagttccttcctcagtatgttcattgcatctcagggaagcagtgcatatgggatttgggcagcagaggatccgtgaaaaaagacagttgtctatcttattaagagggatgtggacaaatgacagtgagttcatatgaacagaagctgagagaactaagggtttatagcttgcatgagggaaaaaaatctggaggagggtgtgtggacaatgtaatatatcttaccgtgttgaaggtgctgacactaagaaagagggtcagcttgttctgttccatctcaatacttagaatacccatgattgttggagctctagggaggcagatttcgacccctgtgaggagaactctccaacccttatagctgccccaagtgctgcctgctacctagagaggtagtgagttcactgttatgttgtaaaagagattcaggcattggtttcctgactggtctaggctctttaagtctcttctacccaagactctctgattctgtggtccagaactgtaattctcaacattttctctatctgagcaatgtatcagatgatatacatgtatatagcaactttcataggtgagcctattcctggatgaaatgttggtcaagctccacttctttttctcttgcttaaaacatgcacacatacctgaaagaatgtaagacagatattcttatagtagtagcatctctcatttacgttattcactctgtttctgaagctgtttttaatcacaaattatttatggcatacctgataatccattttgatgccttggtttggaactgctaatctaaaaaaaaattgctattattcttatcattctggtaaggtttttctttattattgcaataaaatatacttaatatgaaatttgccatcttaaccattttaaagtgtgcatttatgtgatgttaagtaccttcacaatgtgtgcaatgtcaccaccttccatctctagaactttatcttctccaaccaaaactctgtacccaataaacaccaattctttattctcctcttgctcaacctactttatctctatgaatttgactgctctaggtacctcatgtaagtggaatcataaagtgtttgtccttttgtgacttatttcacttagcataatgtcttcaagtttcatccatgtggtagcaagtgtccttcctttttaaggctgaacaatattccattgtatgtatatacaacatttaaaaaattcgtttaaccattaatggacgcttgggtggcttccacattttggcagttgtgaataatgctgttatgaacataggtgtgcaaacatctatttgagtccttgatttcaattcttttgagtatatatgcagaagtggaattttcggatctcatggtaattctactttcaatttcttgaggaaccgctactatttgctattattacgattttctatagcagctgtaccattttctattcctaacagcagtacatcagagtttccatttctctatatccttgccacttgttattgttattatttttataatagccatccaaatggtgtgaagtgctgtttcattgtggttttgatttgcatttccctaatgattagtgatgttcagcatcttttcatgtgcttataggccatttgtatatcttctttgaggaatgtctattcaaggtctgtatttattttttaatcaggttaatttgttgttgttgacttggagttctctatgtattctggacatcaatcccttattagatatatgatttataaaattttcttctattccatggattgcttttttacactattgatagtgtcttttgatataaaagtttttaattttgatgaagtgtctatttttattttgttgcttgtgctttgggtgtcatatccaagaaattattgccaagtccaatgtcatgaagcttttctcctgtgttttcttctaagagttttatagttttagtttttatatgtaggtatttgatccttttggagtaaatttttgcatgtactctaaggtaagggcccaacattaatatattttttgcatgtagctatccagtttttccaacactatttgttgaaaagactgttctttccacattaaatggtcttgacactcttgttgaaaattattcaaccatatatgtgaggatttatttctgggccctttattctcttctgttgatttatatgtctgtctttatgtcaataccacactgttttgattcctgtagctttgtagtaacttttattttttatttttccataggctattggggtacaggtggtatttggttacatgagtaagttctttagtgctaatttgtgaggttttggtgcacctatcacccgaactgtatgcactgcaccctatttgtagtctcttatccctcaccctactcccacccttcccctcaagtccccaaagtccattatattgttgaagtgtgagaccttcaactctgttcttatttttcaagattgtttaggctatttggtatcccttgagatttcatataaattttaggatggatttttctgcttctataaaatatgtcattgaaattttgatagagattgccatgaatctgtagattgctttgggtaatactgacagcttaatgatattaagtctttcaatcaatccctttatttgtgtcttctttcatatctttcagtcatgttttgtagtttccagtgtacaagtctttctcttctttggttaagtttattcctaagtagtttattctttttttgctattataaataaggttgttttcttaattttttgggttgttcattgttagtatatagaaatgcaactgattttttacatgttgattttgtatcctacagctttgctgaattaattattagttctaacagttttttaaaaatgaatctttagggctttttacatataatctggtaagatggttttgagaaatgattgctggtgaaggctgaatgggatggttgctggggtctctgtctgcttggcagacaaagacgaggatttgcaaggatttttatttccagtaccccatcttaatgaagcatatttaatttttgaaaccttctttgctgttagcataggttgtagaagtgtatgtcttaatccttccttaggaaagtcttaatccttgcttaagaaagcttatgatattactgataaggcaaggcttatgcacatgactaagatagactacatcatgtattaatcatgatgaagtctgaggaatttaaagtgaggcaggggaggaggtagtgaattcttcaaggggaaagtcatgctggagtaggaatttagaggatggggcttcaggtagagctagaaaatctgatatcttaaactgttgactaagatttttagattaacttctttgctccttgaagacatttaaaatcttgtatttctagaatgagcattgtttttcagaagaaacaggggtctcagataatttttagaattgactggacttacttcaatgaaatggatctattaggcatgacttgttatgctttttaaatgagaggattgctacctaaacctacatgttctttgtagagcagtaaactattttccttttcagacatgaatgaacacagctctagaagtcacagtatcttcctgataaatattaaacaagagaatgtagagactgaaaaaaaactcagtgggaaactttatttggttgatttggctgggagcgaaaaggtaatttgttctttatttgtattatctataattttccccttttatttgcttcattgtgcaatggtataatttttatgcttttctattttcctgctttaaagagcttttaaagtttctgaggctctgccaaggtgttattacatttaaccctttgtccctgctttcttttctggtcctgaggtctcctattggtgtcacaggcaggtgctttgcatgccaactctgatttatccctgatgggcccttatgatgatatgaggcaacagttggtttgacttagcctgtggcagaggcagctgcacacatgtgggagggatatgaacttctgagaaaagagaaaatcccatgttgtacccgactctaataggccaggaacgagctttgccattggaatgtggcagtcctgcctctgcaggtttgttttgctgatagaaggtctggaacctggggcgctccctgcattccctggttctcccagcagtaggcatgggctgacggtgtcccatgtggaaggccttggctctctcatgaagtgtggcctgtaatcagcctcagcggcaagcctttactgttctctggttttgtccggattctcttttgtcgtctacaccctgacccatgccctcccaggccctggctggggctgtactccagagcaataggcttcccagaatctccagtctcacttccatagcaccagtggaggcttctgctgccacaccctgtctggaggcactgacctccctcgagcaacatcatagagcaaggccatgtgcacaatgccctctggcctccatcatcactgacatcatgctgattgtccccatgaaggccagccttgaagcttggtcagtctccctaactgtatgattgatccccacttattgcactacatcactgagttcccgtatgccaagttatggccacttacatccacgtgagtaatggttacttggattgtcctctagtatgcatttgtaaaacctgagcagaaagtcatccgggtatttctagttgggaatctaaaattttactagtatggggccgggtgcagtggctcacgcctgtaatcccagcactttgggaggccgaggtgggcggatcatgaggtcaggagatcgagaccatcctggctaacatggtgaaaccgtgtctcaactaaaaattaaaaaaaaaaaaaaaaattagccaggcatggtggcgggcacctgtagtcccagctactcgggaggctgaggcaggagaatggcgtgaacccgggaggcggagcttgcagtgagccgagatcgtgccactgcactccagcctgggtgacagagggagactctgtctcaaaaaaaaaaaaaaaaatttactagtacgggcttgtaactttagttaaacagacgtacaacagatggaaataatggaggattattgttatttagagcctaaatacacctgaaaactgcttaatactgacagactggagtggaggcctgcctctgcacagtgtcagtggttattgctaatgatatttatgaggtgtttgaaatcatgtccttcacgtagtttcttttgctcacacacacctgttttcctttgccctagatgtgtccatatgactgtgtcagtgtgatcttgtagaaaagaactctgggctttagttcccgtctcccctgaatggtgttcttcccttaggctggcagtttgacatttctggggctcagtttcctgtctgtcgaaggagggtgatagatggtacctgccttgtatatttcatggagttaagatgctcaaataagaaagcatcttaaaataacagtgcttaaaataacatagactgctactatttgtgacccatcagctacatgatttctctatgtgtaagcaggggtaccacacaaacaagtccaagggagttgagaatctattctatttggaaagaaacctccccctggacatgaattcatttctgtcatcaggagtttctcctttatatgtgattcgaatttgcgtagttgaacattgcttccccacttcctttcttgagagagcagctgctccccctgcatcgtttgtccagtcagcagagacatgaatcatgttgagttcccttttttctagcatctgtaaactgccctctacctagaataaatgctgtcaagatgaaattaccagcaataacgcagcaaaggagaaactatgcatggtccctctggctgcagaggaaaaaagacaaatttacgatgcagtatacatttgacttttcatttctctcccaagttttttgctttttggatatttttcattttttccttgctatgagaataagtagggaaggaacggactctagataaccaaccctaccgcctctagtcatctgcctgaacttggagcccgtaacttacatttttccaatatgcccattcattgtggctcaggacaatattttctcttcatgcttccctctgggctcccttcggcatggggactgcggctcagtctcccagggcccgagctacccatggtgacagcacttctggagcctggtttccctggatggatggcccctggggaagcatctgcagctccaccatttgaggtatttcagctattccactaaaacccaattgagaggaaaatgatggcaggagagaccaaatccccagcctcatacacgaaggatggttttttatcactgtgggtcttctctacttttatttttccttgctttccaggaggctgtccccctttgccctcgtgtgaatttgaaatttctactttgtgcttctgccgtcctgtgctgctcactgctttcttttctctctggtaggtcagcaaaactggtgccgagggagctgttcttgacgaagctaaaaatatcaataagtctttgtctgctcttggaaatgtgatctctgctttggcagaagggacagtaagtgatcctgcccccatctattaagtaatattatgagaaaccaccttttggggcctcatagtccctttgccacacaccccaaaggctggtttgtttttctgtttggaagaggacagagggaatcctggctatggatgcctgcttgctgggagttcccatctactaaaaagtatgaatggtgatgctaatttcctatgacataggtcaaagaatgggcattctaaactttggcaagatccaaagacccagccacaaattcttgttttactcggtttctaagctcagtgtcttcatccctgacttgcttgcctctgtgtttttctcagaatgggctgtcaaaaccaatactttttcttttcctaaatagaaaacacatgtgccataccgggacagcaagatgactcggattcttcaggactctttgggtgggaactgcagaaccaccatcgtcatttgctgttctccttctgtcttcaatgaggctgagaccaagtccacactgatgttcggacagaggtacgtgtggtctctcaggacccatcctctgtgctaggtcttgggtcttaagagtgaatggcaaggctgggtgcaatggctcacacctgtaatcccagcactttgggaggccaaggcgggtggattgcctgaggtcaggagtttgagaccagcctggcccacatggtgaaaccctgtctctactaaaaatacaaaaattagccggccgtggtggcatgcgcctgtggtcccagctacttgggaggctgagtcaggagaattgcttgaactcaggaggtggaggttgcagtgagccaagatcataccactgcactccagcctgggcgacagagcgagactgtctcaaaaaaaaaaaaaaagaatagtgagtggcaaggggctattgtcagagaatcacaaagtaagggacaaacagccttttactaaattacatctagcaggtgatatgtaaacttgaggcatcacttattgaagccaaagcaataattatattttaaaataatgggcaagaacatgccagtcaaatgtatggtgtttaaaacaaaacggaacaaccaaactcatttcagatgtgaattggaaatgcattggggtgttacttttgttcttcatggcactggagtctaccttttaggttcatattatttcaagtgtgtaaatctcaagattgataactgcctttagctccggtatttgcgatccattgcacagttgctgataaaacacccagaaaattaggtgaatgcagaagagaggtataaaaggaaaagaaggggaaggaatctttaccagcactggaggtaggaggtctggactgtatgctgagaagagatgcagatgacagcttcctacttttaaaaattcccacatgagacttcctagatccctgggaggtgtccataggtgggcagcaggtacgactccataatcgtaaagcaagagttacatgtgtgggtttggttcatatctttttttcttgtcactttcttttttacctaccccctcccactgtccaaggcctgacctccttcaggcatgtttcctcagttccagtgtttaggttctatccttcagccctcgtgcctcagtgttcattcccagagtgcttgcggttctgtggattgggcgatctgaacatcttcagtgctcagcgagctctgatgttggatgagggctcagagggctgaggttggatgtggattctgctgccttcggtttgtttaattctgaacaatcatgtgatctttagacaagtcaccagtgctctgtgggctttaactagctcatttgtacatggatgcacagagcacttccctgccttctccctgggagtgtgtgttgtgtggttatgcctaaggaatagtttaagatgagagaaaggacagatgggggtgggcattctgtctgggaaattgttatggcttgtttaaactgcattaagccccagtcatttcctgagccctcaacagaacatagaattacacagccgtggcacctgtgggatgtctaaataaataataattatattgaaatgttgtagacctaatatatcttttaaactggatttgggtcctttacttcctcccaaatcgcttccttgattagttaaatgcttaggccaagggggttgcagtaggataacacctactttcctcaagggtctcagaaacccacaaaccagcatctgcttatggaaaacaagatcgcatcctgcccagtgtcttaaacttgagctttaacaatttcctctgaagacatgtttgagcaaaccagctctaagtgcatttataaaggaaacatctcttcaaaaaaaatccttaccagcaaagcaaaaatattctggctcttctcaagccagagtcaccgtggggcattggctatctttgcaaggcccagtcaccttggggcattgctgttatcaggaggtatttgcagctgtctacaggaagcattttgaatatcagttagtgtctaatatatgtcaggtgtgtcaaaattatagcacttctgacagcaattatctcacctttgtacagggtatgaaatcaaggcttaggtgcaaagccattggataccatacctgagaccacacagccagtaagtgactaaacatgtaggatgtcctaggatgcagtgtctgagcacagccctttgggtcagtaagcccagtgttgaagctaattctgctattgacccattctcttgtttacctctcccctctgagccccagtcttctctcccacagagagatatataataatgcctactttcaagaatattgggaggattatatgagttgcttcagtttttacctagcacaagggctggcatgagtccaggtaaaaaagtccgtgaccgatggcaggctatcggtgattgcaagttctgcttttccttcgtcttaaataatctcacagtattgcggcttgaaaaggtcatagtagtagatgggactagactgaatataatgcactgtaagggacagcactgtcatataagggagaggattaaataaagtagaattagaattacattttgggaatgaacaaataaaaaatgctgcaggtaatttgggcttccaggaagtaaaaagtaatataaattatgttttcaaatgaaataggtcggtctacattcttttatcagagtcatctagattctgctctctgtgacagcagggactgagtttgtcacagacattagtttctcatcaaccactgcacaactagttcacagtaggtggtcaataaataaatgcttatcaaatgaatgaacagatgaatctaaagcttattgtgtaaggttacttggaaagttagggcagttgctgaacattgatgccattacgtccagaagtttggttgggtttggatctggtttgctttccaaactattattggaaatgtgtgaggtttcgttcctttccctttatccccaagttagttaatggattatttaaggatgctgagctattctatggggccaatacctgctgtattgttaaatatactcattgaacccaattatacagcagacacaagactgaacatcggattagacatggtatgtgatagctaatgagattaagcactttgaactcagaaaagactgccgggcacatcccaaattcattgtaatgagtgttcattatattcttactgcagaggtggccaaaccttagggcagcatgaggttcctccgttattcctttgtggttctttcaaggacgtgaagagagtacacgtttgttctgcttgactgtactgatgttctgaataacacagtgtagtatgtgtttcgaagcagttcaatctgcagatccctgaaggcactctaccaagagtcctgttagcattcttcaggattataggttagatactggaatttaaagggaaaaatttaccatgtctatttctatttttgttttttaaattatacttttaagttctgggatacatgggcagaacatgcaggtttgttatataggtatacatgtgctatggtggtttgctgcacccatcaacccgtcacctacattaggtatttctcctaatgctatccctcccctagccccccaccccccgacaggccccgatatgtgatccatccatgtgttctcattgtttaactcccacttatgagtgagaacatgcggtgtttggttttctgttcctgtgttagtttactgagaatgatggtttccagcattctggttcttccattcagtcggggttgtttcctttagtttcctgaatgcccagcatcgtgccattaaagaagtaagtgctgtctcctgtgttctcaaagagcttttaatctagctgaggaggcagcacttgaattacgaggcagtagaaagtcaaaaagccagactcaaattagagcacttttattgattcttttcttctggcttccagaattctattttgtagtctttaattactcttctcaactacttttacagcgctatttgaaaaagatatttatgttttagaagtgtgaactcaaatcacccaattgtgttggaagcctatttaatgtaccttgatttggggtggtaataaagggaaagaggccctctgagggggcagaccaatgtggttaggaagacctgaatcggcacatctttggcactgggagttttgattgatccagcatgaataatttgaggctttgtttgtatgttgaatgtggaaggagaattgatatcttagggaaagtaataatcttttttcttttcctgatgtgcacttaaaaaagtcgtgtcatcattttaattgtgtcatctgccagtttagtggtagctagattaggcagagcctgaatagtgtgcatatgaaatttatgtcaccagaacatgagaacacattacctacgagagtagaatgagcattttggccaaggcagacacttggctacactttgacatgaaagaaaaaaaggcttaaatcattcctgttggggggcctgttgctgaaacaccagtagggttaatttttgcccttggagggaagaaatactgtgggtgacatacatttaactagatgccaagtccttatccatgtcatttctgaatgtttctcaggagactagaactttttaaagacacaaaattttcatttctccctcctgccctccctccttccctcacaagcagggaaatggcctcaccagaagctgggaaggtgctttggagcagtggtcctttcagaagaaggtttgggtgttttagatgggaactaggtctcagagcagattggaaggttagtttctgattagttttatatgtcagcttggctaggccatagtgcccagttacttaatcaaatacaaatcgaggcgttgctgtgaaggtactttgtagaatatgcttagcacttacaatcagctgactttaagcaaggcagattactctcaataataagggcgagcatcatccactcagttaaaggccttaagagctaaaatggaggtttcatggagaagacaaaaattgtgcttcaggatggtaacatcaactccagcctcagtttgcagctgtcagcctgccttatggctttcaaacttgccagcccccatagtcatgtgagtcagtttcttaagtaaataaaagagtgaggtatatcatatatatgtatgtatgtatatatagtaggattttatatatacaataggatatataatatattatctatatttatctatcatctgtctttatctttctcctattggttctgtttctctggagagctctgatagtgaagaatgctatactctctatcctctcctgctcccacagtgggagaatctccgtttctgtctctcacacaccattcacagtgcagaatcacacatgacagatttattctgtgtgctgaaggtgtgaggttgtctagagctccttattcaaatgccagcactatcctgaacacctggtgagaaaagaaggatgctgaaataaaaggtatgaaggtaccaagaacaaatatctttgtggttattccagggaagccaaagtaaacagaagaaacgccaaaggtaggcactcctcgtgtcatttagaactgactgtggccaggaaatatgagtgtaggaaaccactgggaaagcaggtggggatgagactcatcagaatgcagtggttctaggtcttctccccactcaaggagggcttcgttcaagtgccaacttacgagggtgccttcagtgtcatcacatgtgggtgcttaacctcggtggtggagatgggtagcatcagcagtcttggaagctggccatgtgcttctgaaatgtaaactgcaaattcagtgatggaaggattgagtggtgctgggaagaaaataacagaatgctcgacaatggggaggtagtttcctctttccattctttagtagaatatatctaagagaatctttactgacttaactgtctctgtagcagtatctagatggaagatgtactgtggcctctgatctttgtccactaggcttggtctgcctttcctaagggtggttaacattcattagctttgaggtctttaaaaaatttggtcctggttccctccctgtggggagaagagattttatacctggggcatgccctagatcatatatcattaaagtagtgcttgacttgannnnnnnnnnnnnnnnnnnnnnnnnnnnnnnnnnnnnnnnnnnnnnnnnnnnnnnnnnnnnnnnnnnnnnnnnnnnnnnnnnnnnnnnnnnnnnnnnnnnnnnnnnnnnnnnnnnnnnnnnnnnnnnnnnnnnnnnnnnnnnnnnnnnnnnnnnnnnnnnnnnnnnnnnnnnnnnnnnnnnnnnnnnnnnnnnnnnnnnnnnnnnnnnnnnnnnnnnnnnnnnnnnnnnnnnnnnnnnnnnnnnnnnnnnnnnnnnnnnnnnnnnnnnnnnnnnnnnnnnnnnnnnnnnnnnnnnnnnnnntggattaatcaaatagtatcacagccagtttcacctttaaagaggatgagtgagcagtcagtaagtggctagaataaggcttctatgggtcattgacttgtttctctatatcaaagagataatgtcctggaaccataaggctggttggtatcacaattgctgtatatagcttctgctagacaaaatcacaaaacctgccttaagagcacttcttaatttctgctgtcttcttgattttgtgtctccctgtaagctacctgaagttcttttggaaacaaggctgaacaataaatgcacacgtgtgggcctgtgcccaagttccggatcatgttcactggcagcctcacgccctagatccaaaccacaacaagacagcagaacactgtgtaaccgcattgatggcaactagctagatattaacaaaggaggaaactgatttttttttctttttttcctctgaaatcagttaaagctaattaagggaaagtgaattttgaatgtccaaatagaaagaagctagtgatcattaggctccttcattctctaaatttgccaaagttgatggtaaaaagaaaaagaaattgtagatattctatatccttttactcttagtctcttgggagaatgagagactgagaccctctttatttcactttgcaagattgtttttaacatcctagataggagaatgtttgttctagtaaaaaaaaaaacaaaaaaaaaaaaaacaataaacctcagggcacaaaaattcagtatctctcttagtaaccctagtttattctgcatctggaaattcttgtatctgacttgatttctttctccatcagtttgtttttcttaactcaatttttattgaatataatatagtaaaatacataaacttaagtgcataactaatttttttttataaatatatatacacatgtgaccaccacccaggatcttggaagcctctctctttgaccctctcagtcaacaccgaactctcaagggtaattgtcaccctaacttccatcaacatagattgttattgcctgtctttgaattatttgaaaatgaaatcacccagtactgttttgtatctggcttctttcatacagcgttttatctgtgaacttcatctacattgttaggtgtagtagtagttcatttttcacagttatatagtattctattgtatgaatatggcttataggtatccattctattgttgatggatatttggattattttcatgttggggtgattataaataaagttactatgacattggttgtcatgcctttgggtgaatatatgtcctcatttctgttaggtgggagcaggtcataaggtgtgaaatattctactttagtagatactactaaagatttttccaaaacgacagtaataattcacactctctccagtagtagttgactgttatagtcattgctcattctcagcaacagttggcattatcagttttaaattttttagccattctattgggtgtgggaaggtatctcattgtagttttaatttgcattccctgaaggctaatgatgttaaacaccttttcaggaggtgttttattggcacttcttttataaagtgcctgttccaagtctttgcccagttttttcttattgatttaaagcagttattttgggtaagtcctttgtcaggtatatgtattttatatatcttctcccaccttgtaacttgccttttaactgtcttaatggtggcttctaatgaagacaagtttttaattttaatgaagtcaaatttattttttcttttatgttctatttaagaaatctttggccaggcatggtggctcatgcctgcaatcccagcactttgggaggttgaggtaggcggatcaccagaggtcaggattttgagaccagcctggccaacatggtgaaaccctgtctctactaaaaatacaaaaaaattagctgggcgtggtggcgggcgcctgtagtcccagctactcgggaggctgaggcaggagaatcacttgaacccgggaggcagaggttgcagtgagccgagattgtgccactgcactccagcctgggcaacagagtgagactctgtctcaaaaaaaaaaaaactttgcctaccccaaggtcttgaagatactgtcctatattttctgtggaagctttattgttttacttttcacatttatgtctgggatctctctggaacagaattttttacatggtattgggggtgaggaataaagttccacttcccctcagtgccatgtattgaaaggactgccctttccactcttctctatggacacttttgtcataagtcagatgactgtcatctgagtgcctgtttctggacaatttattctgtttttattccaagatttctgacaatttgatcagttttactttataagaaagtgatgatgttcaatcctctaactttgatcttcagaactgtccttgctattcttttttttttcatttctattataaatttcagaatcagcttgccaatttctatacacatacacaaaccccttagggtttttttgggggaaggtggggattactttaattctctagagcaattttaggagaattaacatctttctctctcagtgtaagctgattttttcatattctacctttagtggatgtgaaggccccgcttgccccatttgggctgaatgaagtctcgggctccagtgtgagacacagattcccactgttatttgagttccaaatggaagttgggttgcgcatctttagctactcctctggatcttttctgcaccatctctgtcctgctttgtgacttaggagggtgactggtttgggctcatgcaatgggctccttttcctctggcttccagttatgttacacccgtggggaaggaacacaggcaggcgatcagaaggagagaagagcgtgaggtccgggtatttatttcctggcttcttccctgccagatcattttgggttggctgtgtccctaccaatggctgtgacaattcatacctaccaggcaatcttttccttctagccttctctctctggctccccttcagcttaagggtagtaatggctccccagtccctaatgtgggtaccacattaacccttgttatttcccaacacctttccaaacctttgttaagcactcttcaaatcatgcaatttgagcaggtggtctgtttccttccaggaccccgattactacagaagtggggatttcctaggcaattgttaaaagtattttgagaatgaggaccagttacaccaatggtgataaccttgctgagtctgctcacaaaatatgcctctggctaaacctgcctgagtatagcatagaggctttagctttctctttctggtatcatgtgaagttatcaagggactctttatgatttaaaaagtaagattagtagccttgaagtgtgcccttaagtgtccataagcattttagccatgagttatttttcactttttgccttactaagttgataatggatgcttgtaatgtttgtgcttgcatctgagaagcatccacagtactgcctgaggatgtcaggaggagaggtgagagtgtcaaacaggaccagactttaaagtagtaataaaattgctgttatttgaaaaattagactcaaagcacttctagggattgcagcctcaagctacagtgaacaagagagagttatcctaattcttaaatggagtcttacattgaagttgttaaactcctcttttgacagttgggttatttagttgtctgctttagcaatgaatttttggaatgacatctgtagtgctggtgaggactgctgaatttcttgcactgaaatagaaatcaggatgtcatttgctgacaacggtaattaacccgaatcacaaatcagattgtgctggcaaatatgacggtgtaagaactgttggaagttcaaaatgaaaaagtcaatagcaaataaaacaggatatcacatattttttaatgaagctttaccttcttgaaagtaagcctaagtggagtttcctttttaattggacaaggccacttaggtgttcgtttctgtgcatgctgagctgagtcatggcttttgtttttggtatcacttggtgcagctactgatttgctctccacagttgcccctttgggttactctccaggtacatccctgtggcatctcaaccccccaggccatgtgccccagagatcgcatcatctcttatactggaagtggcaaaatggtggccattaggcatgtttgtttgtcccacacattgtttttataaatagtttaaaactgggagacacaaattaaagaaaaaacagtttctgatttttcttggaaaataggatgatctgaatactgtggggcctcctcaccgcatggtgatgacgggctgtgatggggggggcgggtgtgtgctcagcagggagccatggtgtcctctggccagccttactcagctgtgggacccacctgacctatgaggcatgtgttgatgtgataaatacatcaggggtggttttgggtaccacaggtgaggaagagaaataattgattctattatttctgtctgtgtatcattggtataagaaactgcagtctccaagaggacagagacctcgtctatctgtcttggtgtaccccaaattcataaatgttaattgaactgaaaagaacctcaacttaggcaggtaaatctggtgatggtatgcagggggcttaaaggagggtactgaacatttgaaaaaggctgtaaccataaggatggctgagaacacagactaagacagtggcagagggaagagagaaagaggaaaccctgagacaattcgaataaatgttcattagatttagagaccagtgggatgtgaaggagaaaaggaaaggatgagcttgaggcctcaagggttagtggtgccgttagtccaattaggaggatggttggtgaaagccacaggatcccttctgcttccctatttccagtcttttgacatgaggaatcttgggcttaatcatattggtttagctaatggtaataattagctgaattgtccccttatgtttttaatcccagagctaagaccatcaagaatacagtctctgtgaacctagaactgacagcagaagaatggaagaagaaatatgaaaaagagaaagagaaaaacaagactttgaagaatgttatccagcatctggagatggagctaaacaggtggaggaatggtaaggaaaagtaaggaggaagagtgaggcatgagtgtgtgctttttttatttttattttttttgagacagagtctctctctgtcactcaggctggagtgcagtggcgtgatcttggctcaccgcaacctctgcctccagggttcaagccattctcctggctcagcctcccgagtagctgggattacaggcgtgcaccaccacacctggctaatttttgtaatttttttttttttttttagtagagatgaggttttaccatgttggccaggctggtcttgaactcctgacctcaagtgatccacccaccttggcctcccaaagtgctgggattataaacgtgagccaccgtgcctggccgtgtgtgtgctttctttttcttgtgactgttggcatcctgggagacacttgggaaagttggggcaatggtgcagcttgattcctcctggcaacaacctgtatgaacaagcagatgttttcttagtccctaacacaggcaccatccccatcccatcacttggctagcatgcattgttagtgtggaccagtgattatctgcaaggctgccttaatctgcttccaatgagatgcactctatctaatattgtaataacttgctggtacccctatttgtaggttagaggaaagtgcctgagacttagtggctcagactgcttttgacttaaatgaaaaatgtcattctctcctatgtgagttttattactggtttggggttaaaagtctacctctggcaaatacttgcattttttggctgaactcatcttcatgccagaaatatagggctctcaaaggagccctgtgctaaaatggagtcttaaaggcttggttcgtgactcgttttccttcttccccaaaacattttctttggtttgttctactgggagaaaatatctcagagagctgacatgcagtgggtgggtgggttgtgggtgaggtgttaagaggggtttccagatctaagtgcagacagattattttagtgattttagcattgtgacgtaggttagaaggtagaaggctttttttttttttctttttaactaaaataaggcaggttggtgtgtgtgtaggggaatggcggatagttggaagttgttcttcaggtcctctgctgctgtgttcagtattttaggtgctgcagctgtacctcagctttgggtaagggtaggagcccgggggctgttgtgcaggattgggaggtaatgctgactgtaactgcagcagattgtcttgtgattacacgtttgccactgctttttgctagtaagggtggggtgtcaatgagctattgtttaatagaaaaacaattacgtggcaaacgagaattcaagacaggtttcaaaaatgacctagtagtctaaataacatgattcttttatttttgaaagattttctagcagcacacgtgtttggaaagctactagaataattgaataattcagcacctgaggctggtggatgattctttgcaatttggcaggaatgggagagtcgggagcagtagttggcaaggtggggagtagccatatgaagttttatttcgggaatcctccaggtcagttctctgttgggtgaccaggacattcagtaaagccttttggtaaaggattgggggtgctggctttagaaacattacagggtgggcaatgaaccttttttcccccatcattttgcatctcttgccaaactttaaccttgcagttctccatccctcatcaaatgccatcctctgggatctgcccattgccttgtttgcctgactcaccatcatgcttagcatcttttgggcactcagtcctgtttttggcctctttacttggacatcattttaactgtcactcttcgaacaccttgcgaatctccttagaaatgtactgttttctcccagctctttgggtggccgaggtgggcagatcacctgaggtcgggagttcgagacccgcctggccaacatggagaaaccctgtctctactaaaaatacaaaattagctaggtgtggtggcgcatgcctgtaatcccagctactcagtaggctgaggcaggagaatcgcttgaaccctggaggcggaggttgcagtgagccgagaacccaccattgtactccagcctgggcaaaaagagcaaaactccatctcaaaaaaaaaaaaaagagaaagaaatgtgctgttttctgtgccctcttgggtgagatcctacatgagcctttaagttacataatttggggaaaataatgtatgatgatatactctggcacagagtagacctccaataaatgtatgggaagcaaacatatgcttaatgcaggtgctggagattaaagggtgggcagtcagatgtggtctcttccctcaggacggtctgagcggggaggaaggtaaatgccagtcctcaccaataaatgtatgatggtagtccacgctgcataccaagaagtgaaagcacaggtgccaagagttatacaacagggggccctgaccttgactgagaagccagtgaagggttccttgaatatgcaatgtagagattagtatctgtgagaagcgcagttagccaggcaaaatagggggcatgaggtgaggtgggggctccgagaatggaggacataggccagcagggagcactggcctgagatgggctcgagggataggcggggctctcctgtcttcaggattttggtcaagggtgttaagctgcaagtcataccttcgcatttttgaagatccattggctgtattggagagtggactgcaggtcggagaggagggctgggagctggggtggtcttccagggatgagatgatggtattgaagtgacagggtagtaggaagggagagaaatggatgaacctgagagatatttaggaggagaaattagccgggtgtggtgaggggttggctatgggagagggaggtttcaatgacaactgtgttttctggcttgccgagttggatggagggtgagaccattctctaagactggggatgctggaggagaaccaggggtgagggaggagggagtttagggtccccgtggaacatccaggggaacattattcagataagaagttaggtctgagggtctggagctcagaggatctgcttgagttggagtcatcagtcttttggtagtaattgaaggcataggtaggtgtgagggccctttggactacagagaaagaagagaagacagagagagtctgagaggcccccagcaaccccattgccacgtcaccactggttgtgatgggagaagggaattggagggattccgcagaactctcctttcctccccagctaacatttgtatttaaaggtgatttttctaggggcaaagttcttaaaggtagagaactgactttagtgatgtaagtttcaggcgagaaggagagtagtgaggggcagtgaggaggtggggagaggtcctttgtcccatggagggggcagagctacctcaaacagtaactctgtgtctcatgctatgtgccagtggacgttacagggacaacagaccaggccaggctttttgttacattctgaggctgggcatttaatcctcaagtagctcttgtgaccatgaatgacaggtctgaaaacgtccccaagtggatcagtctctggtaaagctgcgatctgaactgagtgggcctgactctaaagttcattctctttctactgtctgcacagcctgctcatcaagttagcagaatgatttgtgggcagggccagttagatgagtgtaataaatatcacgccaaaaaaaggggcactggaagcccttccatggtctccccacgtgtcagtcctaattcttcagagcagaagataatgagggcatagctggtgataatgagggcatggctggtgtgtgtaaacgtgagagctgggcttttgagatgtggactgaaaaagcagaagtgcccttcactaaaaccagagtggcaggatattgccaactttcctttgaaacttgacacgcacattggttctaaacttacagaaggtggctacttagctcccctcaacatttcctgggtattgatatttccacatgggcagtctccacgagttaaagaggccttgtcaattgtgtgcagtctcctgggaaaaagatttctttctttgcatggtatttataatttaagagtttggctgctatacttcagctgctggagagcaaggaaggggtatnnnnnnnnnnnnnnnnnnnntgggctgatgtatttgaagagagcaaggagcagaatggtacaatggggtgatgggggaagagccaggcagagcccagtgctgcaaagcccggtagcacatacatgtgtaacgtaccttgaagcaaatgaatggcctgatctggtttctgttttggctgctctgtggtgatgtggtgcctgggaggcaaagaagctgggaaagaagcggtttttctcttctaggtactttaaagctctataatatatgctcaggtgaaatttggctggtattttcagggacttcactgcttttgtgccatactggcctcatcatgtagataacatcacggattcattccatcttattattctgtaagagtgatgtctaatttttttaaaaaagaatcagctttaaaaaatgcaaagtctcatagaaagtaactcttttctattttaagcaagcattcagaatacacacacatgcttgtgctttttcctacttgctgttacatagaatgaagtaacaatacaaaggagtaggaaatcaactacagatcaggtgcaggcagataatggagataactgaaaagaggtaagtttgatccagctggcagtgttgggactgtgccacaggacagggcatgccctgccttatgtcattcaaaattggtgaaatactgcactattacatgcctagaggttgctctcgccctcccccacacctccacctgtaccaattttcaaccctttgtagcttgatgcatgctatagattgaatgttttgtgcccatccaaattcatatgttgaaatcttaacccctaaggtggtgatagtaggaggtggggcctttgggaggtgattgggttctgaggatggactctcatgaatggcattagtgtcctgtgagttctgagagagcttccttccctctggtctccactatgtaagactataatgagatgccatctgcaaaccccgaagagggcccttaccaagtgccaagatcatgttggcactctgatacttggacttctagcctccagaactgtaagtaataaattctttataagccacccagtctatggtactttcttatagcagctccaggtaagacaggggccacttcagaatgcaggcctagcagttttctcctctgggcactgttgaaccttgattctcagaaggcggcttgtggctcatatcacatatactacactaagctttaattcctttctgacattgccatggaggcaggataactccgggcatgtgcatgtggctaaggagagccacccactggcctggttccgttccccagggtgctagttaggatccttggattgcaaacgacaggaattgacactgcctggctaaagcaaaaagagaatgtgttagaaggatacgaatgattcgcagactccaaagcagaggcaacaggctccgacaagtgtaggctggggctgcttcagggatacaggcagcagagacaggcaggtctcttaagtggccacacctggaattaatgctttttcccttctgtatgtgattatgttggagaagcagaggcccaggatagaagtgggaatactgtgcttgctggtgtgccttggctggggaagggcagggcactttgatacattgtctgatgaagactgcatgcagtttagggggctaattccttaaaaggaagttgaggtgctattttctaagaatgggtgtcgagtggctgaaaagcaacaaatgttcaccacaatctactagtgacatcttgtgggccgatatcgatggctggtctttcttcgaatctggaggctctgttggctctttagcctcacggagatttgttcagcctgcttgcttaaggaacagataggatggagtggggcagttgccagaaaatggaattttttttaaagctctattgctttgttgctcatatgtgcgggagagactcgaacaatcctatatatggagatagagttaaatagttggattcagagtgaattacagctccagctcatgctaacctcctcccaatccatcaggaaaactcttgacaggaggatggggagggcggggtgaagtctggatgcatggcttcctgttgctgccaggtcagtcttcacacatgctgtcttctgatactttgaattttgcacttgaaaaataattttttacagtgatttaagtcagaaaaaggaggacctgaaaatccaggtgtcagaacaaggaaatgacctgacaaactggtgtatctgcagattttcttctcttgaataattgcctataagattaaaaaacagtggatatagatttaccttatctgctgaagtcatgcaaagaaatgatttcatcacaggctgagaaagtgtggaaaaatcggcagtctctaacgcagatttgttcatccagttcaaaacctgtgaggccagcagacatggttcagtaactagctaaatctgtagcctctagtctgatttggggctttgtggaactttgggaccaccacaattggaacacaatttgctcttttagcattaaatcttcgaagatgctggctcccttcttagatccatgattataatggactctcagaaattagcatttcattggagcgatctaatttactaggccctctgcttgcttttgagaacacaaccaaactctgtaatagaaataccgtctgtctactaagagaatgttgtggcctgttcaggtggtcatgaatgtaaggaggatgcagagtcccaggtgaccagtttattagaaaatcgctctagaagggattagaggatgttttaagctgcttacagtgtttttaggaatgagggtgaaagatgctatttgcatgcaaaataatctcataaaagaatgattttttttttttaacatcacatttatataatgacatcttgtagccagctgctctcacccatctggcaacttaaagatttccttttagtttctttgatacagaaattacctaccattaggtctgccactgggcctatttaattggaattaaaagaaagcacctcgtttgccagatctgctgtggttcctggcggaagctgtgagtaaccagcaaatctctgctctggagttactgagagaatgcaattacctttctgtgttctcctgaggctttaggaactcaacttatgaaaaggataactagcttgttgctatttcatgtgtgaagttttaatgaattactggcagtctaatggttttctttctttaaaaaaaaacccaaaaacctattttagaaattttaatagccctaatgagaatttttgattagtgtgtcattctcatctgttgccgttgatggatttctattttttgtagaaatgttatttacgccctctgggagtttttattttataattagaatgctctgtaagccttataggtatgcttcagtgaatgctcctatgtaaacacaaatctttttagtccttaaaggtaattacatctgacgatagtaaatgccaggatgcttatttaaagaaggggaaggtttccagtgtgtgtgtgtgtgtgtgtgtgtgtgtgtgtgtgtgtgtatgtgtgnnnnnnnnnnnnnnnnnnnnnnnnnnnnnnnnnnnnnnnnnnnnnnnnnnnnnnnnnnnnnnnnnnnnnnnnnnnnnnnnnnnnnnnnnnnnnnnnnnnnnnnnnnnnnnnnnnnnnnnnnnnnnnnnnnnnnnnnnnnnnnnnnnnnnnnnnnnnnnnnnnnnnnnnnnnnnnnnnnnnnnnnnnnnnnnnnnnnnnnnnnnnnnnnnnnnnnnnnnnnnnnnnnnnnnnnnnnnnnnnnnnnnnnnnnnnnnnnnnnnnnnnnnnnnnnnnnnnnnnnnnnnnnnnnnnntgtcaggtcttgcctagtgttgggaaatttacaatcccccagacgtgtttgtgagctggacagtgtagttaccaggacgctttctggaagtcattttctcggtcctttgaagagtagtggtgttggaaaacctgcccttggttcctctctgggcaggagctgggctgctttagttcctgcgtgttgcggctttgttcttctccgttgaaatggctgctgtaaaaaataatccttactgcctgacctttagaatataaactgaaaagagctggttgtttagatgtagctttgtaggagacatgttaatgctttgattgagagaattgttcaagagaaaccacaaagtctgctgtaggtttcaaatactgttttaataataataaaaataaacctgaaatggacttgcatggctataccatgttttatttttggaactgagctccagccataaaattatcgtaaagatctcagaaacacaaatcacagaataagtaaaaataataatttatctgccaagcctacaaagttgcaaatttgtcagggagaggaggggataagaggtggactttgaacaatattgccttttgtgctttttacatatactatcttcatttatctttagaacaaccctgtgataaaggcattgttatttcttctcccttacagaaaggaaaccaagagggtaagcaggagatgggcttgtgattaatgagacctgttaaaaggtacaatgtggctttagcatcctgccatagcactggagatgagagagtcccttgactactttcacagtgccttacagcagcattggctagcttgttgaatctctgccatctgggacaacccttctacttggtgacgctatcattccttaatgggagaagagggcagctttaggggaagtcaggcctgtgactttggttagaacaggtcacttgctgctaaggttatagaagtctatccccggcccctgcccactcagctgaatcaaaacacacactgggcagctccttagcttaccctagcctcatgataccattgcctctttggccatttgaaaccaaagaacacagggaatatatctcttccagatgtttttgtatcttacctctttacttggagtgagttggcctgtggataatatgaccatgttctggttggtgtctggtctggtacagctaagaatttcatctttgtcatgcgtaagctgaaagattaaattcatactgtactggattgccctgttcccaaatttcagaagctagagctcaaaaattagagatacagtcacaatccaagaagaggaaggatatttaccaaagtgttagtggtgaatttctctggggaaggaacagaattagaagggaggggtgaaggaggactttcaagttttagttgtatactccacattgcttgagttgtttatgttaagaatgtatcctgaattattgtgtgattagaaaatctgtctgtctgtctgtctgtctgtctatctatctatctatctatctatctatctatctatctatctatgtctatctatctctaatatgtttaagaaaaaaaaagaacatggtacagcttttatagcccatggatttagcagactgtagagaatatagatcctttaattggatgaaatccagtctgcacactaaggttgttgatggatattttaagccaggaattggaactgaatgaaatattgatttggttcaggttctgttcaaaggctactctgatattctggttttgtttaaggtcaataattttagaaaaaacgcttaagtatagcagtcttgttggaaaaggaaaaagggttggctcaattttgtattcagcaaggtaatagtttattctatgttttgcttcaagttgctgcttcaaacggaactgtgatacaaaagtgaaagcattgggtgttaattttacttaacacggaggccccatgtagtattttgtggttatgcagtgagataatggagtcataagcagcagaactaaactatcacagtgttttgtttatattgagataaatgtgtacagtgttcaggtgggttccttgaagcatgatatatattgttaatgaagccacagattgaaatctcagttactctattatttatttttatttatttatttatttattgagacaaagtcttgctcttggcacccaggctggagtgcaatggcgcgatctcggctcattgcaaccttcgcctctcgggttcaagcgactcttgttcctcagcctcccaaatagctgggattacaggtgtgcaccaccacacccagccaatttttgtacaaatactaagttttgtatttttagtagagatggtatttcaccatgttagccaggctggtctcgaattcctggcctcaagttatctgctcgtcttggcctgagccactgtgccctgccttctatcatgtatttttgaaaaactctctgactcaaggcagttttcctgggcaatttttacaaaatggattttgtgggctgggaactggggtgaggcttggaatactgcagacactcttactactgactgtagcaagatgattgtggtgttgatggtaaacattgtgatggaaaagtatgttgggtttggttttgctttccaggaagatatttgggagactcagtggggccagtagttttcttagaatcctttttatgcactttatgtctttgatgttcttgttggagatagccattggccagcttgcaagctgtaccatttctatcaatttgattgacaaatttggcaattcttcctttgaaggccccaacaaatgctactctgcaaactgagaagttgtaggtaggatctctgcaagatagtctagattggctgcttttctttcctaagactacctgatatcacagtaggttattctatttgaactttccagcagagccaattaattctggcttcctggaggagacagtggtattgaaatgtgagcttttgcagctctagtcttggatccagggctaccctgtcttctgacctcagatttggagattcttgaattcagaggatctgagccttagagtgttctatcaaacaatgccagtgtgtttctttatttggctgtttctattaatgaaacagtgacataattaattcataattaggatgccttagaggtctgtttcctttttaatcaatcactagagagaatatgactctagtaaagccccaggatattcctcaactaaagcaaaatgaatgtaaagaatttaggcatctctgcaagttggagtagcttggaaccagtttacttcagggatgcatcttgagaggggaggttttacatagttctcttttttcttagactagttttggccaattaactaagacctttcttgtcaaatagaaggaacacaaactctacccacactacagccctttattgtgtcttctgtgtatttttcaccaggactgattatttttggtactcttcctggagggttgcatactcaatttctttaatccccaactctgctcggctatgttttgcaggagaagctgtgcctgaggatgaacagatcagtgccaaggaccagaagaacctggagccttgtgataacacccccatcatagacaatattgctcctgttgttgctggcatctctacagaggagaaagagaagtacgatgaggagatctccagtctctacagacaactggatgacaaggtctgtggccagagattcatagttctcattctgctacaaagatgaaagatggcaggtcccagctccctatggggctgatgtagggctacagcccgatctttgtttctggtttcctaatacctaccctagcactttgatggtgcagattcagggagtttgattcatgtggaatagaaatgttaaagggaacttgactgaaaaagcagtgtgttggcctagatagacaggcgggtgctatttagagtcttgtcttctagaaattggactgggctgattactgcatgaaaggtggggtgtgtgagtgtctatgatctttaagtctccctttcttctctgggcctatccttcacctcttggaaactccagcagtagcctcagctaggggcaagggttgtgactcccagaattcaagcatgtactttaatcatataaccataaggccctgggatgagaaatcgatagcagtgtggtctgatggcttcacctaattggtgaagctcttttcacgggtatattcttgaatgaagtagtttgtacatgctaattggggatgtccaattttatgacaagcttttgggactcaaatagtcatgtaaatgcacaagttggcatagaggaaaagaggccttggagaacactgggagaatcaattaaaggttgggttaggaatcccagaggcatgagaattgaattgatgttttatatgatcttggcatgttgcccttggaatattctaaatcctttcagttgatttcatcagggttgctgatatttttagcctgatttaatcttttctattgtggttcagctcagagtgcttagggacacctctggcttgtatgaagcagctttgttatgttaaccttgccattaatcttacaggcttctctctttgaggtaaagctcagagactggtatgacctttgcaagctgaatgtgactggttgccttaaggaagctagttctgcttgtttgtgattccaagagcttgcactataaccaaagctttattctggggtcatcctactcttctgaaaacacatttaataaaatattcgcacccacgagatgggttacttgccctttaggctccacgcataccgttatcttccatttctatctatgtattttatgcaaaacaaagagaaaaaggagatcaatagtaagttaacagtatatgcaatttcttgatttctccaaggaattgctattgtttaaacagtaaagaagattagaccatatgcattttttttcctcattttagaaccaatgggctcatttttagtaatcgcagagaatcctgggtgagagggtgagaagctgtttctgtgctcagttctctatgaatagacgcctgcatggcggaatcgggatcatttaccttggcagcacagggaactttcattgatccaagagagagactttagagtctcaaatcagacatacgaaatgtagtgattaggacagagagatgaaaatgccatgtccaaagcattcagttggtagctgaagagctggcttgagagtctccgtctcctgatggtcagcctaggccattttgttatgtcattttcctacagcatgtgctttgaagattctgtaaggcccgctgttggaggctagtatttgtggtccctcacatgatgatgctgagagacgtgggagaggactgagcctagaagcctcagccttagggggcaccagagctaatggtttgccctcagtgacccttcccaaagactgcctgattatgtcttaccaactgtcattcttaggggtcctcctctgaaatgttctaggaggcacttccatgtttctgttgatgtaggtggtttgacgcttgaagaatacatgaggtgggatatggcaccttcttagtctactgaaaggtagaacaggaggtatttaggtttgggtgaggcactagcccagggtggttatgtgacttacccaagtgtatatcacatataggtggcagagctaggatgaagttacatatcttctgactcccaccccagtgctcatctcattttgccctcagccctttaaatgaggacctggtcaacctcagtgaatctatttagggtgtggagggagaaagaccacacggtttcctcccagctgtcccttctgttcctccgtgctgccccgccagggctccaagcacaggtactctcccaaggctatgctgtgtgatgggagagcatgcactgtggactcagacctgtaacaatgacactgagacctgggcagacctgtgacaataatgctgagtcctgggctggcgcctggccctgctgaaggtgctttttctcatctgtatcatggggcttatatctgttaattcaaaaggctgtggtgaggattaaaagtttctagtacattgcaggtgcccagtaaatattagcttccttctttctcctgggctgggctgggctctgcttacttccctgtgtggtgtggaaggggtggtgccaagggggccaccagcagagacacaatgtgaacaagttggcgctggcactccttgtctcttagtctctgtccctctacagtactgctctgctcttggagatcctgacacgaaccaagcttaagtagaaatgaaagttgattatttttatgcagattaccattgcaataaaaacatttttatacttaaaggtgaacagtgacctgttgacaactgaggttgaccagtttctcatttataagggtgtgcatattattttgttttatttatttatttatttatttatttatttatttattttttgagatggagtctcgctctgtcactcaggctggagtccagtggtgcgacctcagtgcactgcaacctctgcctcctgggttcaagcaattctcctgcctcagcctcctgagtagctgggactacaggcgcacaccaccacgcctggctaatttttgtatttttagtagagatggggcttcaccatcttggccaggatggtcttgatttcctgacctcgtgatccacctgcctcggcctcccaaagtgctgggatttcaggcctgagccaccacgcctggccgcatgttattttttttttaatttttgagatggggtcttgttctgttgcgcagactagagtgcagtggtgaaatcacaactcactgcagcttcaaccttccaggctcaagccatccacctgcctcagcctcctgagtagctggtactacaggcacataccaccacactcagctaatttttttttttgtatgttttgtagagacggagatttgccatgttgctcaggctggtctcggactcctgggctcaagtgatcaagctgccttggcctcccaaagtgctgggattataggcgtgagccactgtaactggccttatgttatttcatgtataagaaaattcaagtataaaatactttctgaaaagtgctttaaaatctgttatccatggacaagatctttagaaccggcatcagagtgagcgtgcttatgcatgttctaagagatgcagttgaatgtgtagatataagcacaccttattattctggaggttttgaaagactttaaaaaaaatcacagtagagctcattaattccttagataagttgccttaataaagggtaaatatagtttgggaaatgtctctgatacaagtgatccacgtcttctgtagtatcatccttgttcttcatccttcccaggtggggccaggggcccttggtttttcactgtaccttaaaaatcactgcatcccagcttgtcatctgttgggaggaagcctgcatcttcaggctttgaaatgagcacagcgtaaggacagagttcactccatttctctcctcttgtggtttatatcacttgtagtgcttgtccatttgtcccaggagaagagatggtggctctccgatggtaaattctttgaatcctttatgctaagttgtctaatatttaagtgctcaggaacataaacacaaaatcgttactggtaactgacgtgctaagtttataaagtagaagagaaaatatatctacaaaatagtcttctagttgtagaagtgccagtttttggaggtttcattctggtataatttccctaatatgatttgtgcaggaaaatagaaccattaaagaaacattggtgtaaagggttcagtagaaacaggatctctttaagtagaaaagcaaagccaaatgatggtctacataaaggacaaggagattcagatcctgtatggctgattttagaattttctttctccatggaaagcattagtttgtgacattaaattaacatgattcaaatgtatgcatagatatcaccaaacaggctggggaatatcccgtggaacattgaggttctgtgacccaggcccttaagtttgggttagatttcacccctggaaaaggcaaaaggcacagtacagggtgtgtttttctgggctgctgatgaaaacacctagacaggacctggcacgaagaagtgcccaaggatgctcaattgaatctgactctgtttggtgtttagaccctagaagccaggttgtcatcttcacaggctatgtttcaaattttatttgaagtcgtgaaaataatgcagtgaagactgtgttttttatgtagttaggcatcatctgcctgctgctttgcctgcactgggggtggactgagtctaaggggaggtggggagaggtgggcagcgaatacccttgcttttgtggcagcaacacctagtggcagaaaaagagtgagaagagcgaatttgcctttcccacttcagtgacagcccagaaagtaagcatgaatgcttctgtccctcagctgccctgaggtttttttttttttttttttttttttttttaactgttaagaaaattaacttccaatcgagagggaggtcttccaatgccaaatctccagttcatttttctctggtctgagaggtttgaagtggaaacattggctctccctgccgatctggtggcagcactcctgcttactgatgcatttgacaagatttgggataataacatatgacagtgcagctaggtagaaattcactcctttattttttgaattaggaatttcactgttagcatctttgaattgggagggatatctctaacgtccctttcagttcccaaaccgtagatctctgatttctcaatgagcaggaattgggttgaatgtgcaggatattatatttccagaatagtcagctgtttcatctgctgagaaaggtgggtgaggaggtattttaactgaatgagatctcggaatctgtctgttttctgtgcagtaacaccacactattccttccttcttatcagcaagcttatggtagctgcctgtcactgggagactgggatatcaaaaatgacataactaaccaaaaaaacaaacatgatgtttcgtttcaggatgatgaaattaaccagcagagccagctggctgaaaagctgaagcaacagatgttggatcaggatgaggtaaagaatgcaatatatttttttttccacaaagttcttctattactctttgttgttgatgtttgttccaggaatttaattggcatagaagcttttcataattacagaatcatgtggaaatttcttggtagatgtcccttcactgcctcttacaagctgattatcactgaatttagaaaataaatgtctgactttcaaaaacccctgatgttttgagattgagtagccagtggctacagttcgttctggaagggcagagacctttggttgggtgatcaagcaaggatgatccttttttatttttatttttttgagacagggtctctctgttgtccaggctggaatgcagtggtgcaatcatggctcactgcaacctccagagctcaaatgatcttcccgcctaagactctcaagtagctaagactacaagaatgtgccaccatacctagctaattttttaatattttgagacagagtttctctatgttggtcagggtgatcttgaactcccggcctctggcttggctcctgccttggctcccaaagcactgggattacaggtgtgagccactgcacctggccttgggcaaggatgattctgcctcctaatacccagcaatgctgtgacctgttgtttgagtcctacttcagttttgcaatcagcttgctcagatctttgatatacaccatgttctcctgctgtcctgtagggatacacaaacaaaaacaaaactagaaggtagaggaggggaaggcaaagagaacggggcccgagtactgcgtcagcatgtttgatacactaaaaaggaggcaaattgttttcagtctctccccaaaggcattcagttcttcagcaagtgtttttactacattgtgtgttgccaagtattttacaaacaagaacctaagcaaaggatagccagccaacttatcaaacatgcacaattaataattcccttgctgaggaccgtttaagtgttgttttcttttgtgctttaagttgctttctgcttcgttgctgaaatgctatggattggatcccactgtgcaatgacagcaggtgcctgggtttctgtcctcaatcccaggcctctgtaggcataaaggactctgtaaccatttccttcctctttgttccctttcatctctttaggacaatgattacctcccctgcccaaacacttcccttggtagggagataatctacacttttgtaatcaggtgaaccatatttcgttgatctctctctcttagctatagtcgaggccttccatttgcttgagtttcctgccctctacctcccattctactccagtttcacccacattggcacagctgcctgggataaactttacttcttgttactgttaaaactccttaacatttttctttttctatactatcaaggcagtatctgttcaatataggaaaatcaacttaggaacaaagataatgagagcgtcggcaagcccagacattcgcttttaactaaagatactgtttggggtacatccttctatatcttcatgatggatgttaaaaaaaaggtgactgaccactgttgtatactgttttagttgattgtgaagtcaaccagtttacaatgtgaaatcctgataacacttaaaaattatgtaagtgttattccttgtcatttccttggaaacgactctcagatcctttgcttatttatttatttatttatttatttatttatttatttattatttagacgaagtcttgctctgctgcccaggctggagtgcagtggcatcatctcggctcactacaacctctgcctcccaggttcaagctattctcctgcctcagcttcccaagtagctgggattataggtgtgcaccaccacacccagctattttttttttgtatttttagtagagatggggttttgccatattggccaggctgtttgtgaactcttgacctcaggtaatccacctgcctcggcctctcaaagtgctgagattacaggcatgagccactgcgcctggccccatcctttgcttaaaatatggaatagctataaaatgcagtgattttttgatgtgtaattctttctttgagttaagggtatacagctttaaactaacaacaacaacaacaaaacatacaaaacaaaacacatgcacacaaaacagatttttgcaataagaacatatctgtctttttcttttatttttttatcgtctggaccatacagtggggtttcccatcatcctgaactttttcaacttgttttcttatatctggtttttaaattacttacttttggatacagcatagaacataaacatttgaacattagattcacaagttccatgccatctcatttccccagcttttagcttccacaagaagagactatgagaagatacaggaggagctgacacgtctccagattgaaaatgaggcagccaaggatgaggtgaaagaagttctccaggccctggaggagctggctgtcaattatgaccagaaatcacaggaagtggaggataagacccgggccaatgagcagctgacagacgagctggcccagaaaacggttggagcatttgtgtctagggggtgggacttccttggctgccgttcctgtactcatattgatattcattgacagacatggtataaggaggcagtggctgaatagttattcagtgttagatgcattctctgaggtccctccaacaattgaaatacttcgtgcaagtgacttttgttcactcttcctggaactgcatatcatgactgttttatatccagagaattaataacattagtggggatgctttgtgggaatagtcaaaagagtgcagactttggagccagaaaagtcttagttacaagtctgacttcataactcttagaccttagctgagacagttaagctttgtgagtattcattcccttatctgtaaaaatggtgacgatcatatgctgcttgcatggtgtgaggattagtgacagtttatgtaaagcacttagcacagatctgtgcatatgctacgatatcaatacatacatctcaaagcattgctactggcaagagcagggtcccatagaaggtatggacttcactcttcttgcttataccctcctgaatgaattccattccctcccgtcagctttttgtcctagctgttaccttcaggagcctggaactaagctgcccttgtttgtttgtttgctgttctaagccagtgcttcagcctgcacattcccttatttccagattctccaaatgaaagatgccataggttctgcagtgagctagcggtagcaggagcagtgaatgtttggcatggcggggtgggatgtgtccttttctacctggaaaatgggtggtggagaagctgactggctctaacctgctatccttagcacctctgcccaatggcctggtgtcctgggcttgtgcccagcctgctttgtggaaagcatccagtttaaaaagaagtagcagatggcgcaggagagtgctggtctgctgactgtgaggctgacaggaaatgctcctcgcggcatacattcagctccatggaggaagacttttctagcagcttcccaagatggggactactgcctctgaggattttaaaaacaagatgacataagcagttggcaatgccaaacaaaataaaacaaactcattcagaagtcacttaggaaagggggcgacttagattttctctgcttagtgttttctatgagattcttttaattagtccttcatgttacttgcttcttaaaacaatgaaacatttttcataatacagtttttaatttgccatgaaaccaaagtattactagattggtttagaagactattattagacagattgtttaaaaatgctctagctgcatatgggagaattgtataaatagataactgttttactgatgttaaacgttagttaagaatacataccttttggcaagatacatgaggatgaaaaagagatgggtttattaaagtttgacaagaaaatagagcttctgctatatagtaagaaaccaactattgaacgtaacctaattttgaaaaaaggtgaagggtgtttaattcagcttcactctgaaaattggaagacttttttttttgaagttgttttctaaacttattaatgttcttctgggccatctattctagacccatctgtctttatcaatttaggtgggaatatggaggtggcccagggagcaggtttgtttaggagtgaaggtggggacccttgcaggtaagtttagaccctgaaatgaaacagataggactgacatagaatatctggtaagtaggaagatgcaattacatgttataaatttaaggacttcctttttggcttaacttatttccctgacttggaaattgtcatctgatatgtagacatataatgtatcaggccatgtgatacaacttgttgataaagagttccccttcttatccaagaatgcagtgctatgcgagagtttgccttaaaaggattcttaggttgaagtcatgtaaaagaaatccattctacatgatggtgttattctttgtaatgtggagtgtatgaaattgatgggcaaccctttgaatttgttgttgaaatttgtttttcagactacattgacaaccacacagagagagctgagccagctacaagagcttagcaaccaccagaagaaaagggcaactgagatcctgaatttgctgttgaaagatctgggggagataggtggaattattggcaccaatgatgtgaaaactgtaagccagcccttcttttatcctctctacctgctcctgtcaagttagtagggtctgtgctttactcttttaagcattcaatgcttagcactgtgctttgcatctgccatgtgctggttagtgtttgaatgaatgaaaaaagggctaattgaatgactgagtgaattgtttgttggggtgaggaggaggagaaaaaaaattatctttcaaatctaggcagtgtcttcaaatgttggttggctttgtgtaaattggtttatttctcaaattggtttatttctcaacttatttcctaatgttgcagaagtttggaattaaatagcttaagcaacagttctagtctcagaattgtgtttttccttttctgaaagaacccagtgaagtgaaaattctccaagtcagtgtgaaagtgataggattctaacagtggcttaagaaataaaaccacatttaattattcacaatatgagaagtctaaaatcttgccactcagggtgtgatctgcctcacctgggagcttattggaactacagcctttcaggccccacctcagacctattgaatcaaaatctgcactttaacaagattctccaggtgattctttatgcttattaaagtttgagaagcaaattttgttttggtgccatggctcaacaatgtcaagttctcaggctttttctctgtttcctttctcctgtcctcagcttgtttccttttcataatccagaggattatgcctcatggtagcaaaatagctgctgtagtaccaatcatcacatcctcactcaaccacatccaaggcaggatgggctgaaaaggccaacttctttaatccaggagggaaacatatcccagaagtccccaggagacatatccttacacttcattggccagaactggatcacatgaccactccacatttctgggaaagcaaaggggactgggattactataattggcatagaccaatcatgatgaatcccttggggttgtacatattggtgctcttggttatttgtttatttatttatttatttattttgagacaaacttttgctttgtcacccaggctggagtgcagtggcgcaatctcagctcactgcaacctctgcctcctgggttcaaccaattcatgtgcctcagtctgccgagtagctgggattacaggcatgtgccaccaggccctgctaatttttttattattattatttttttaagtggagatggggtttctccatattggccaggctggtctcgaattcctggcctcaagtgattcgcctgcctctgcctcccaaagtgctgggaatacaggcgtgagccaccacacctggccattggtgctgttgacagcgagaaagtaagagatgtggggataataggggtggtataaagttgtccagaaactaggaatagaaggaagagatagagttaaaaatggtatcagcccagaacaggtaacaatttgctggaatatagaaaggctattgttgttattaaccaaaaagacagggtagagacatttttaaaacaaaacaaaaagctttattgaggtataatttacataaagctgcacatatttaaagtatacagtctgagaaattttgacgtatgtgtacagtcatgaaaccatcagcaccgttaagataatgaatgtccccatctcccccaaaagtatgtgggggcagtttctggtctctctattttgtttcatggatcaaatcttcctgccaataccacaatgttttgatcaccatagctttataataatacagcatcttatacaaaggagtcattgatgaatatatgttgattttgttgagctggggaatggtattacattgcttaccttacatgtcacaattccctgaaaccaaattctttgaatttagccattttatctttaaaaggctgaattctacatcagtctgcttagtggggacactcaggtcgtgagctgggattgttaaatactggaaaatgctcccaagatcaggcttccttttgtagactatttctgggaaatgttgaaagccgtttttggatggtgtaacaggtcccagcttagagtacatgaccgctcgtaaatgtaaccattctttcatggaacctttattgtaactgattatttcataaatccttgtgaatgaatctaattctagcacagacttctcagatactatagagttaatcttattaagcttcaatttggtgattttatatttgaagatttaattttttgaaccatacattggtgttgagcaataaaattcgatgtgaggtgattaaatggcctcacaatatgaaggtggagttgatatatgggaagttgatgcttgctgctgataacgataaaggaagaaggtatttttatgctaagttctaaaatagagctgatgaaaatgctaatgaaatcaggagtgtctgggtgcttcagtattgaaaaaagagtctttacctttgggaatctgaactatgattgagattgagattgtttttaaatactcaattggatatttttgagattatttttggattccagacattggatgtcctagttaatttcattgatagccatcatttctatcattctggtttttttcatataattatgagttcatcattagggtgataagagctaagggagtagttgtatgactttggatgagtgactgtacttctttgggcttcatttttctaatttataaaatgacaagataagctcagacagtatcaaaaattgtcggctcagaaattacttgacttctgcacatttgttttagatttatccttataggtacaggtacttttcttattggtcatgactatgaattgatatagtaattcttttgatataggaaaatgaacagatcaagggaatttgtttcagtggttttgtatttttattcctaaaatgccatttaattttcacaaggtccctcctggtagggctctgggatgggggaaaaatatgactattggagccttccccagtccacagttctagaatatgacagctctgaaaagccagaaaacagaaaaacccatatatccccagctcaatcatgtcttgaaacatttccagagtccagtcattttgtttcatcaacaaaacaagatgagtccagcatataacaagatgagcccaatgttaactttatcgaagtttatgagtgagccttctcttcctttcatgtactggtggcactgaactgtcaacagaagtatgatgaggtccatacatttggaaaggagagctttatttttcataatgggttgcagcctgcagggtggccactcttacaggttgggaagtgtagcctttggccagaagccagaaagaagcactttgaggatgggaagaatgacagggacttatgtttttcacagggtggccaaataaacttattcaacaggttacaggaggagctatgaagattcatgaaaggagtggcatgtgcatgtgnnnnnnnnnnnnnnnnnnnnnnnnnnnnnnnnnnnnnnnnnnnnnnnnnnnnnnnnnnnnnnnnnnnnnnnnnnnnnnnnnnnnnnnnnnnnnnnnnnnnnnnnnnnnnnnnnnnnnnnnnnnnnnnnnnnnnnnnnnnnnnnnnnnnnnnnnnnnnnnnnnnnnnnnnnnnnnnnnnnnnnnnnnnnnnnnnnnctttggttggtggttgtgttgaaattgcaaaagagaggggcaggggcaggctgtggttatcagcagtgaagcagtggagtgaatatttcaaaagggctggcttctgtttaacccttggggaagaaagcctaatgctgattggcgagggagggtgtatgaccaggcgtttccaacttcccaatctgtcctgggctggaactcggtatttaacatttctctggggtctccttggccacgagggggtctgttcagtcattcggggggttaggattttatttgtatttcttggggcctaccttaccttgctaccttcaaaggaatttagccagaacctgaatagaagttgaggtagagtaaatgaactgaattggactggctgccttattttcttttggcccacactgacttctttttgtcccattctaacttttatgactttaaatgtgaacatgcaccttacttaccttgggtgtggcctaggaatggcagtagttcatcatcgtgcacagccactccatgcttgagagatgggggtagggaggtggagaggtagggatgactccctgtataggcaggtagaagcagcaggccacatcttccatagatttcatgacggtgtggtcttttctcctgggttggtcattgatactggatcccatggtctagtatgtactactgggggcattatcagactctgggacagttataaataaaatttcagcagcaaactgattttttttttttttaaataacagtgtcctgaaattactggaaacttttgaacatgaaaccactaaatatatgaactttgtagtggtaagaaacctcacagttaaaacccctttgttaggggtattgtttttatccatcaggcacaaactcaaaatctccttttagatctccaaggacaggaactggcttcagaagttatagctctggtttgggagaagaaatgtctagctcttattttggaggaagcccatctttatacatatctatatttttactcttcctcaatttacatgggatctaggcataaaagacaaagtgtcctactttgacagacctggaaaagaagaggaattcattctcttcccagggtgccagagcttctggctcagcagcgttttcctaccaggagctggtgtaggctgtgaattccatgtggaagagatgggttttactttgtctttctgcagaggctggacaagatgtaagatacacctggtcaggctcaggaaggtgtttctcatccttctcctacactggactaaagacagtggcagaacacactcaacttaaagattgcatgcttttctcacccagtgtctccatgccattagaatagaaaaggaatatagtgaggagtggttttggtaggcagatctttggcagtcggaagtaaaatgggtttaacaaggacctccatgaaggtagagtcagaaatagatacttgtcaattttcttgctgttgacatacattctgcagtattgttgacactggagtcacttgacatgtactattgttgaacttttttaatttttaatttttatttcagtaggtttttggaggacaggtggtgtttggttacatggataagttctttagtggtgatttctgagattttggtgcacccatcacctaagcagtgtacactgtacccagtgtgtgctcttttatccctcaccccacttcccaccctttcttccaagtccccaaagtccattgtatcattcgtatgcctttgtgtcctcatagctagctcccacttatgagtgagaatatacgatgtttggttttccattcttgagttattaatacttcacttagaataatagtctccaattccacccaggttgctccgaatgccactattccattcctttttatggctgggtagtattccatgattttacacacacacacacacacacacacacacacaccacattttctttatctactcattgactgatgggcatttgggctggttccatatttttgcaattgcaaattgtgctgccgtaaacatgcacgtctttttcatgtaatgacatcttttctttgggtagatacccagtagtgggattgctggattgagtggcatatctacttttagttctttaaagaatctccacactgttttccatagtggttgtactagtttacgttcccaccagcagtgtaaaagcattccctgttcatcacttccatgccaacatctatttttttttattttttttattatggccattcttgcagaagcaaggtggtttcacattgtggttttgatttgcatttcactgataattaatgatgttgagccttttctatatgtgtgttggctatttatattgttgttgaattcttatggtaaggttgatgccaaactacaggcactcagcagtttctagtgtacttcatatttgctaccaaatttcagggctgatacctggttccatttttttagccctcaaatgtttactgaacagatagtgatatgatgagtgaatgacatcaataacgacataggtgggcactcagagtgtactgtggaacatcaaaaaaccacggttggagtcattgtctttcaaccagtggaagcctgtgtttctgcgctggattctggacagggctctttgttttctcttaaggtgctaggctgcactctggtggctaaacaaaatatgcacacagttacttgctcatttggtcaattgctcttaaagaccatgtttgcatttcagcggatgggtttctatcccaagtagcttgcttcaacttttgtttcaagtagagctttgaaacttagaaactaaatatagatcatgcgggaatgctggctgtcagaatcttcttttctaaggtggatttagactgttgttctcagatgatcttaaataatgagctagattactgtctgtttggaaggaacaggtgtgaaaaggcaaaggaaaatagactggtagtagtaatgaaaagttatgctgagaaaccttcatcaagaagccctttggtaattcatagtacattcttatttattcgattttctgtttaattgaggactacatagaaacacctttttatttcaatccttgtttatagaaacatattcaaggcattacactacttgtctacctgaataagcacactatagagaacattaatgaagttttgatttgagtttttataggaattcagcatcacctttcggagcattgggtgtcgctgctgttacagagatgtaaggtgtaagacattgaatggaatacctttttgaagttatctccttttaaaaatcttcagtgtttcttcttatgctgtcatttctctttctaaaaattgatggtaatgaaaaacctagttaattgaggattatatttagtagggggtttcaactgaaagtttcacctgaggtgtaggagaacttggggttgaatgtttagtactttccgcttgtcctttaattaggattctgaaccagaaatccatggacaccttggggatccaggggcaggtttccagggagtccgtgaacctatggaaattgtgggcaacatttgagtgtgtccccttctttgctcagttggcagatgtgaatggagtcattgaggaggagtttaccatggcccgcctgtacatcagcaagatgaagtcagaggtcaagtccctggtgaaccgcagcaaacagctcgagagcgcccagatggactccaacaggaagatgaatgccagcgagcgggagctggcagcctgccagctgctcatctcccaggtgggcccttcccttccccatcattgcactcttgttgtcttgagatctgctccctccatgcccttgctggtgctgatggtgcaccttaggcttagttgagggactgctttgtgtaagcttggcctccccaggtgatggcagcccaggtctattcctagggctacattttgttgtgtgaaatagatgaattctgttgagtccgttccctttttcgaggatatatctatctacccatccatagatggatggctagctagctaatgaatgtaaaagattgggtggaatctctaaaactcctgtaagtaaggcaatattccctcatcttttaatctctaccataggtccactttaatatggaaaaacagaaactactactaatagtagtagtagcaggtggcattttattgagtgtttactatgtaccatacactgtgctaagtacttcacatgcattttctcacttaatctgaaaaaaattcctggtaggcaggttttattattattcctcagataggcagctgagatttagactaaatgtctgtccaaacacctacagcccgtgaatgacagagctaggactcaaaaaaatgtgtgtgaacccaaaacccatgtcttcaagggcttttcaagcccgagggtacatttcacttgcctattgagtaaggctgctcttcttcctattggagtggcattttcagtttaataaggtagcttcagaaaacagcaacccagtttctgggctaccactgatatctgagcttggtatttgggtctgacgtttccaggaggggtctagttgtatactacttgctgctttatgccaggcattaaaataggctgtcatttggagtaaacaggaaacagataccaacatggattggtgtgtcaaataatactgaggcggacaaaagcacactttattctggtatgcttttaaccataataatgtgtaatcatagaaacatctccaacctctctgtctaaaatggatccacaaggttccattttataaccagcataataagcagaaatgtattgaaaagattattcagtgctaatatgtgatagtaaaattgatatattcatacattgttgataaaagtataatttggtcagtccttttgggaagcaccgtggaaatcagaaaccataaaaatgtaagtataatttagtccagtaatttcactgacagtatttttcattgttaatgaaaatgaaaaaaatttatttcatatggtattctcatttcctgattaaaaatattaaaagcttttatgcaaggtattgaagacagtgttattttgcattataataaaataaattgcccaaatatccattgatagactaataagataaagttacatggaataatattatgcagctcttataaaaaatgtaaaaacctagccattgggaaagtctaatggtataaagttaagtgaaaatgaaaatgctgagttggatttatattgtgctttgcattcctgcagctaagaccaggaatatcagggggaaatagtccatagattggtttatggtttacaccactttttctggatttgctttagaactttatttttttatgattatatagttgttatttataaaaaattaaaataaaaatgatatgcattaggcaacagtgtacctcatctgtgatttctaggtcatctatgataccaaaagcatgtgttttggccagcctgcctctaacatttcggggccaaggcaagggtactcatggagaccccatggcctgcagcccaccctcttctctttcaagctggacataccagctccatgtccaactcccttttgcacccggtgtgaactgatggaactgttagatgccggctgccatttgtttaaatgggtgaggaagaggtagtgccagccctggccttcagacctggagtaggaagtttctaggtccccagtactctgagggtggtctataggggacataggttcagatggacatgttcctttggcctgtgaactctttgcttagtggagtagggtgtagccagaggagggcccagtggggtgctctgaatcgtccaggtctcagactgacactgactttgctgtatgagatcagagtcgagaatattatgatgtgttgagtttaaagagtacctgttctaaagttctctttctgcatcagcaacaaacacagcttccattaggtggaggtttgcactctgctacaattcatgcatagcaaagattcgaccattatttcctgaggttcaaaagtaacagaaaccatggctgtttatattctgatgtgatctaaggaatctgacacagtctttccagctgaaatgctatcttctttgtttacattcatcctcgtcaccaaaaactgtgcttataagatgactgttccaacggaggagttgtgttttctggagaggttatttcattagattaaagctcagtctccagggtcttcctgcctaaagctgagctccccagatctggagaggggagtgttctgtatatattttccatctgcctagaagttaccactgtccctgttcagccaacaagctctcattcatccattcatttcacgaatatttattaagcacttaccctcatggagctagcaagtaaaaaagacaagacaaatgatgtagacattaggtgctgtaagaaagtgttggggcctgagtgataaggagctagccaaggtagtgtgtgtgtgtggcatgtggtggggtggtgatggtggggagggaaagcttccagggagaggaaaatgcaaaggccctgagatgggaattggtgtgtctgaaggacagaaaaagggaagacctaataattgaatggtgaagatggaatccagaggtgcatgttcaatgaatgaggccttcagccctgcacttttcccagcccctttctctcatgcatgcttttctctgagnnnnnnnnnnnnnnnnnnnnnnnnnnnnnnnnnnnnnnnnnnnnnnnnnnnnnnggagaagcagaggtctgtcttggtatgattctgaacaccaaggcaagggtaaaatgggcaccatttggttgtggcactcagaaaagggactcaggaacccctcctctctcgcattttcctaccagacaattccaggccagcctggatgaccacttgctagtcattcactcttcctttttgcttgtttaaagcacgaagccaagatcaagtctctgacagactacatgcagaacatggaacagaagaggaggcagctagaagagtcccaggactcgctcagcgaagagctggcaaagctccgagcccagggtaaatatttgactaacgtgcaggtgtcaaacacctggcctgagtcagacagcctctggttggctggaatcatgatgtttagtttcgttcagttaaagcatttctaggtctactgcaaacaaaaccataactagaaaaaaaggagcgatttcttttctttctttctttctttttttttttttaagatggagtctcgctctgttgcccaggctgaagtgcggtggcataatctcagttcactgcaacctccgcttcccggttccagcgattctcctgcctcagcctcctgagtagctgggactatagatgcgtgtcaccacacctggctaatttttgtattttttagtagagatggggtttcaccatattggccaggctggtcttgaactcctgacctcgtgatctgtctacctcagcctcccaaaagtacaagagtcagccaccgtgcccagcctaaaaggagagatttctgagagaccatccccacactgaatctgctcatcttcccatttcctcacagtccacccagttacccaaatcagaatcccctgctccccacctcctgactctagttggtcaccagagccggtccatttcacctgccagaggcccctctggttcactgtccaggttaactaaggactgtggctacatccatctacccatgcccaccctcagtctgctctgggccagccactgtgtggcatcctgagggatgattctaaaattcacattctctctctgtccaaacggacacttctaacccttccatggcatcctgttgctcttaatataaagtttgaactgccgtggcttccctggcacccccttgaacaagctctaccctttgccagccagccttgtgatctcctgagcttagggaagtgcctcgcacataggaagcacttcataaatattaatgaatataagcagaaattcaagagaagggtctagaaatgcagaaagtagaacaggattaagaatgtatgtgccatgcaatgtgaaactagaacatatatattatgggttgcaatgaaaattgttagaattttctcagaaagccatttgaaaatacatattaataactgtaacatttttcataccttttgatcatcacacctcagatattcattgcagaattttagatcagcaaaaaagaggaagccatctaaatgtctaatagttaatacactatggcgtgttatttaatagaactttttcttcacatgaaatacatgaaggtgtgcagcaatgtttatgatgcaatgttaggtgaaaatcacaatatatcattgtattcttactatggttataactattaaaaatgaatggatgcagctgggcacggtggctcacgcctgtaatcccagcactttgcgaggctgaggcgggcggatcacgaggtcaggagttcgagaccagcctggccaacatggtgaaaccctgtctctactaaaaatacaaaaattagcagggtgtggtggcacacgcctgtaatcccagctactcaggaggctgaggaaggagaattgcttgaatccaggaggcggaggttgtaatgagccgatatcgtggcactgcactccagcctgggcgacagaacaagactccatcttgaaaaaaaagtgaatggatgcttgtgttcctaaaaattcatatttaagataaaagtggttgtgatagggtagttgggattggtgatgctgttatcagtatttatatcctttattgttgttttacagtttgctcagtaaatgcaatttgtgtcagacgccaaggcaaatttaaaaagaaagaacatacccactctctgctctaaccttgtaacatgttctttgtgtggtaacacatggcatgttaggagtaggtgcaccatcaaaactgcacatggaaaatcatgtttctctcttgcatccggtggttcctgcagtggggccactgagttgaaataaaatagaggcaagaaaacctgaagtggaacagactagagagaaataatgaattgaatgtcactgtcgtaaagcactctgccccctggcaccccagctccccagctggggctgcccattgcacctggctggcatttagggagcaccatcgaccaagcatatgctgagacaggagtgccacactgcagccctgccccaaacatggggccttctggtttaatctcaaaaatgttatgctatctttctgtttcccgtgttcccatcctggaaacagagtatgttttcctgccccagattcttagagaataaacgcctacccatgggaggtaaattaggtcttcctagaactcccatcatggcatgggtccacaggccacctaacagtcacagagggctttatcatctgtaaggcccgttcatgcacatgaccttgggctgctcacagagaccaggtgggaaacaagccctcccaggtgtgcggtgacataaagccagagtgcagtcctaggagggccgcccccagtgagcattgtcccccagtaagcattgtcccctgcagttgtcgcgctcccccgtggaaggaatgcttcaggagggggcagccttggctttagccagaagtccttgcctgttcctttatgccatggttgtaattgctgatataagctgatgtttcactctgttgccatttttcttgctttttgttttttaatttttgcttttgggtgtgagtcccaccagttaagtcttaaatcatcatttaaaattcaaaacagaaaaaatgcacgaagtcagcttccaggataaggagaaggaacatctgacgcggttgcaggatgctgaagaaatgaaggtgtgtgtggctgccccttccatcaagcccagtgtgcatttgatgcatttggattggaaatgcttgttctaggaaaatctgtcaccttcagatccgtatatggcaagggacaggggaggggctgttgttgggcattcagagtcgatctcagagtatagcctggcttagaaatgaacaagtccagaaaccccaagatgtctgtagagaatggttaagttgcgttaatacctttgtcttcaccattcctgatgaagagggaaagggtagcacccccaatcactgcatgggctcttttgtcggagttaacttctaaggatttcttcctccaacctttacgcagaacacaccaaatttgagtttctatctcaaacatagagatttttcttttggtcacattttaaactgtaaaggaaaattgattgtggagtaagacttttaggtgaataaaatgagacaggagaagatgtaggattttgattagttgtaggcaaactatgagcctcattgagtcaaggtccacagttaaagacgtccacggcatgcccttgctccagccagcagaataaaatcatgcgtcgtgggagtccctttcctgttttcagagtgctgttgccaaaaggtctcctttggacatcatcataaatctgtgcagtgggcagggcaggggcttttatctcagttttacatgtgagggagtgcagctcacacaggttacaggcttatctggaggttacgtggatagggagaggttggtgccctctgactgacctggctggagaagctcaggctgggctgtaaaaggtcaagggaacactttttatttagttggtgggctaattggcttctagggccaacttggtttgataacagatcttgggttttgttatcccaataaagcaaggccgggtcctgggggcaaaacagccagaaatgcccccagttttgggatctgacatctgagggacacagggaaggaggtaggtccagatccagggcttgtcacagagtgggctgagtgccaacgagtagatgacatgtttctcttggcctgggatgcagaaggcgctggagcagcagatggagagccaccgggaagctcaccagaagcagctgtccagactccgagacgaaattgaggagaagcagaaaatcattgatgagattcgggagtgagtcggcccagggcaccaggggtgtgggggtggtcatgcctcggtcctcttggggaagcctggaaggatgtggctcttagtcgagggccctgctcaccttgccctgtgggcactgccctggtgacacagcaggctgggcgggctgcttccaaggtctgttctccgatctggagctgagcctcctggagccctggcatggcaggtggcaggcgggcccagctgcctctcctagtccccgagggccagggtcacataggtgattccgctggatggacgcatgccccagtagatgggggggagcatctgtaatgaaagcaccaaaaaaaaaaaaaaaaaagaaaagaaaagaaaagaaaaaaaaaaaatttggtcctgactacaggattctagtaggttaataaacactcgagagaagacagcaccaccgcctccccttctccccctacacatacacgctcactgggcaacccagccacctggttccatgtgctcacttcttagggccccacactgtcatgtgtctgtgcaggtagaggtgccagtgacctgtggcactgccaccaggatggcatcattgcagtttctctcaggtgacaccccctcatgttgtgctcctgccttgtcgcagcctctgacatgccctctgctccttcagaataatgttttcaaatgctctgcataaaagacctgggattacaaagaaaaccaattatattgaaatgctgacctccccacccccaccccacccagggtctacactgttccctcccctcccgctttctgtagatgaagaaacagatttctatatgggaagcaaggcgaaatgatttacttaaggtcacattgctaaataggaatcagattggagttagactttaattctccagactactgatccaagtcccttttcaatgtgtgtgagccgctcgaaaggtgcatttgcattttaaaagaggagaatggtaacccaagcaaaagtctaaatggtgtgacccaggctcggtgcccagttcctgaaggaaggcacttagcctcctccctctttttctcctcttcggccatcccctgctgttgccatgttgtgcttttccccttcagggatatctcacattcgttattctgattaatcaccctcacagattcgactggaagggagggggaggttggagggaaggaagagggagaaagagggttggttggtgagtgagttaggtggagggggaagcttccctggcttgtgcctttcaaatggactctgggttttccttctggtagtgcatagctgttcctttacaggcgcttaggcgtggctctaggaaaggttttatgagtcctgggctgatgtaaatgttgaccaaacaccctcaaccagatggcgagtttctgtttgcagcagagcccaggctgtcttttcttcataattctctctgtgcccactcctcgagggcaggaactgtccctgtatcagtgaggcattcggacttgggagatgtttttagaacatcagaccagaaatgagggaaggtggaaatggccaaatcaggttccccaagtgactgcatgccatccgaggggccgaggaagcagagttcttctgacatgggctctctgttttaaaatatcagcccttctcccatctcattatttttcccctgaagctcttgcacaagcaaactataaatacatcctcaaagccttatgtttcatgactcttagatgcaccccagaaattagttttcacttgggcacggaggaagctgtgaggctgttctgtgatccctccaaatcctgcagaattactgcctttattgtacagagctaatagggttggaacagaaccacggttttagcctgatgactcagaatttcagactgatgtggaatatattgctttttcctctcaatttcagtttgaatcagaaactgcaactggaacaggagaagcttagttctgattataacaagctgaaaatagaggaccaagagagagaaatgaagctggaaaagctcttgtgagtgcactctaaatatttcctctattttctctcatccccatgatattctggttagattgggctaatttaaaaacagacaatggctatttgtgtgcttgttggtgggttttgttgatttatctgtggatgcaaatagtatctgctgaaatctctgagtcccctgtggtggtctatggttcctttttgtttttcagattgctcaacgataaaagggaacaagccagagaagacctcaaagggctggaggagacagtggtatgtcaagatatttcccgatttatgtttgtctccaagaccggattcatttgtgatttgtcggattatttcaaaattttatccatgcacacctttctgtgtaatgttttagataagacattctatggaaaagtaggatttgtagaatttagtcctcaacttttcacagaatcagtcaaccaatccatctatccttagagcagtaacctggagcccctgagtgaggattaagctgaattgcaacttagcaattttacagccctgcactttgtgacatacttccactcaacattcaacagatatttattgagcatctcctaacggctggcattcttcaaggtgcttgaatatatccataaacaacagagataagatccctgtcctcatgaagcttacctttagctgtgggagacgataaacagtaaggaaacaaatcttgcactctatcagattgctatagaatgtgcataggttggtgcctgggggaggctccatgaggatgtgacctttgagcagggactcgaagaaggagaagaactgagcacagagatgtgttggggagagcattccaggcagaggcaacagctcatgccaaggccctgagataagcccgggactgtcctgttgggggccagcagggaggtttgtgtggctgcagctgagggaaggacagggatataaggtgagcacagagaggtaaaggcttcagtgattcaggccaggtaaaaccttgagacctgcagggctttgggtggaggagtgatgggcccaacctacctttggaagggcttgttatttgaaaccctggttggttttctctgtcgtgtgtctgggtttgttggcatcatctcctctggtcggcttccatttcagctgctctgtgggatagctgcctggctccgtgccccacagcctgcgctttaagacagaccattctaacatagcctctccatttggtgaaaacacgttcaggcatttcacatgattcaatgacagagagaaaccgttggttagatacagtcatccattttggctccgttcatgggtcatgtggatctgtgtgggactgatccatcttcaaggacctggtgaccccacattggtgggaactggttgcttgggtctggccctgagattgtgctctggcccatggactagtcatatttgttggacctcaaagccagggagaggaaatgagggcaccagccattggagacagaagatgcctgtgtccaaagggagctgggcctttggagcatggaggaggagcctgtggagggggctgctgccggggaacccgaaatgaagccatgaaattgcttcatctacatctgttttaccagagaagtgataatcctaattatagataattatagaaattcagaaaaatattgaacattaaaatttcactatatttctaccagccagagatcagtgatatcaatgaaatattttgggatgttttcttcctttatatccgtgagctctcaggcactctcaccctactgtccctagccatccacgctctctttcagtctcactcacacctacaactcaagcatgtgagcacatcatcacacactcacaccggggctcacaagtcccttgcccacacacgcagtcagctgctcactctcctgttctcatgcctctgcgcagccgcactcactcctgcatgctcctccatacacaagtacttacaacacacactcttgctcacacacagaacatgcacacttgcattcacacacacaacttgcatgcacactaatgatcgtccacactttctcactcgcacattcacacaatcactctcgtgcagttctcaccctcactccccttgcttgccttcactcacacccacacgcatgttcacactcccttgtacacttacacagatgctgtctcaggacactccccctcacacgcacgcaggcgcattcacacccgtcactcatacactcattcactgtcacaaccacctccgttcacaggcacactcatttccatgctcacggactcacatgctttctcctctcatacactcaggagtgtgatatttaaagaatgtttcatcagctcttttgccttttttgaagttcgagtggtcttttgcgtcttttgaatgacgtattttcctcactagctcctcccgtctccctgctcgtccgttctctctcccacgctgggcgcggttccatgcgcaccctcccaggctgctccccgctctcaccctcgcccagcccatgcacgcggacagacacactggcttcgtggcacccacattctctccctcactctcaccacccacacgcatcaaatgcacactttaaaaatccaagagtggagccctgcagtgtatgccgttttagactcggatgttttcactcagccttggaatcctccccgagccgtaaatgttcttcagaaatagacgcactgtccttggctgactgttctgccgccctcctcagcgcagggcccgttctgcctcctggagtgtttgggtgaggtgggcggagcatggagcctgctggccagggggtgaatgcccgggaagcccgctgcaggagacagtggtggaaaaggccaactggccgtcggggcatccctggccccgggcagctgactggctggaacaggacactgtctgggctttggggcgggagccctcctctgggtgcgttgatgagacttgtattccctccttgctggtcccacccttgctgtccactgtgacaggaagctgagccttgagctttggcatggagagtcacaacctgtgatgtgaagagggacatgtgtggggaggcagagggatgataatgaatgtgatggaggagaaagcattgccacaggaggctgaatgatagttgcctaagcacagtgtgcataaataaaagggacaagtgattttaaatgatttatactacccttcccaaactgtttattgttgaatctccctaaaaacaaacaaaatgagagaaagttgccaaactcaggactctatatttagtatttacaccccaggagatgcctgggccttggacaaagaactgttctcattcccctttggtgtggtggtgtttttatgaaaaatgtaaactgtgattacggttcaatcagtaatgaaaccactgacaagaaacagagagagtgcatgcagggtgggcgcaggtgttaaggagcagggtatctgggctgagctccctccggcagggcctgggacagtgtgtctgtaacagagtgagtgctgcacccctgcccctgggctggaaggcagcacagcctcaaacaggtcctgtgtgcacattattcataatcacagatccatttggtttcctgcagaaagtaatttacctcatccgaggacacaattgacttcaggtgcttcttatttcaacacagaattggacccagtaataagaccttaaattaacagagaacctttattgcaagaaacttagtgtttccgtagctttatagtctgtttcttccttttagatgtgagcgtgtgtgagttgcatcccttgaaattctgtgttaaagtaggtcaatttagacaaagtttgcatgcagaatttagctctctcctcttcctctataggaaaatattttgcaaggaactgatcatatttcctatggtaaatacatggagacttgagcagacagaaatgtttgatcttctgatcttgttaacaaagatcaccagatttggctcaggctcttgtctcagtaatctaattcctaaggtttcatttgtagaaaataatccaaaatgaagggaaaaaatgcccccaagatgacagtgaaagttttaacaacaacaataaaaggaagcaatacaatcctaatgaaaaaatggcttttatgttatgaaatatgcatcaataaattcatactagtcatctttattgggcacttaatatgtgccagaaaatgttctaagaacattataaggttcatctcatttgatcttgacagcaatgataaggcaaccactgtttttattctcatgttaccaataagaaaactgaggcacagaaaggttagataacttgcccagggccacccaggaggaaagtccatgaaatgcctcatccgtaagctcagtgacttaaaacaagcaagtgtgtggacttgcgtctgaagcaggtgtggagacaggaaaaatgtgagtcagttacggtgagatattgtggctaacttttcatttcagcttgttggtattacattgtaacatttacataataaaaaaaagaaaaaaggaattcaccctgatacaacatagcccagtaggaatttttgtgaggaaacctttgaatttttgtgggtgaggaaatgtgtggttccactgtgagcagatgggcaggctttgttctggtttacaatttgtggtctgggttctcaggctctgcacctcaaggtgctccagtaatgacactaggtccaggggtgggcatggtcagggtgggggtgtcacagggaagggggtgcaccagcggcgtccatggcaggcttgggaagtgtcgggggaatgatcatggtgccaaatgtgtcataaattcagtgaattgctgcacttaagtggcctttaaaaatctcttccagtctagagaattgcagacactgcacaaccttcggaaactctttgtccaggatctgaccacccgagttaaaaaagtgagttctctttgtctgaatgggactgagaagaaaatcaaagatggcagggaagaatcattttcagttgaaatatcacttgcttaagtcggggctggttatgcttaaaaattaattactgcacaccagagaatgttattaaaagaatgtgctggaggcaaaaaatacttggtaacattttcccatctgatttttccttcttggtaaaaggaagtcagaatactttctctggccttcatttcaaatgaacgcatatttttctggcccccactgtgtgagggcaactgctcttgacacagaaacatttagagcagtcatttcagaaagcattgcccagaagcctggagaagtcggacagagagagcctcttatttgtttgttaaaaggccattaggggctaggtcagagtttataaagcacgtcaacatccagtattttatttgcttttcccagcaaccatgtaagtggtgcttagtgttcctgtttctgcagatgtggagataggctcagatgttaaataacttacccaatattgcactggtgggaagagccagagataggtctggaacccaggcctgcggggtctctggatctgagcttcttccatcctcgtgctacagcagcagtctggagacactccataatggtgactcccccaaacagcttgcagaggtttaaggaaggagtctgtttaagaaaagtgggtgcatatgtgtgtaaatgtgtgtgcatatttgagtgtgtgtacgtgtgtgtgtgaatgtgtgtcagtgtgaaggagccaagggaaagaggtcaaatgtcttacaaagatagagtcgggtctgagagggagagggttaatagtgtagatggatgtattagataggcttgctaaggaggagggacacaaattcctagaagggaggagtggagaagtcaagttggaaggatcggcagggaaatacatgcgggtggaaagaagtcacatttgatgacttgggtcttcttggtttatgtgaaggctcagtccttggtggggaagtagggaagagaatgggaaacccaaggagactagacatggttcaggctgccaaggtaggggatgtgctatggaagagtagaaggattgctgagcagtggtgttggtgttgagttagaagcatgggcttggcgtggcccctgacagcatggtttaagtgagtttcgaatcctggaaatgaaaataaagaaggcagaaaatgatgggcaatttcaaggcctgcatggcaatggctaggcgattaggtagtaagcacagaccaaaacacaaatgaccatgggggcctggccctggcaggagagtgaagccagagcaaaggtgatggacagggaggctagagaggggagggcacctggccagaggttatgacatggactgaaaaggttcagtccgaggaaggaggtggaagccatgaccatacatgggaggctgtggtcctagggagggttaggagcttgagatcagacttccagatttcatgatagaaaactccctaggaaagccctgcttttagaccagtgtttttctgccggtggttctctggccatcagcctcagcatcacctaggaaactgtttagatatgcaaattctcataccccaccccaggtccactgaatcagagactagggatggggcgtggcaatctaagtctcaacaaaccctcccctggagagcccagtgctaaggctcaaatttggggagctcagttttagactgaagagctgcaggtttgagatgctcatgtagccattacctttgagaaaaaggatgatgatctcttctataatcagacagagcaaacctgcttttccaccttggaacactgggatgtgttaggacctgtactttccaatttatctgtgccactcggcttgccaggagtgcagtgttttgccaatttcaagatctgataaatttcaagaatttacccagcacccggatgctatgattaatttgagcctggttcattaattaattttatagatttggaagctgaagggacaagcagaggccattaagacttcccagtgggaccatagacacttgcttacaagtttggtgacttgttgtcccaccatgatggctgaaatcaaatttaggtcctgggtttatgtttttgcagttgttgtttcttaatgagttttggaatgctttcttttgaaaagaagtctctatttactacatgaaaggcagatgtatattttactgaagataaatcatctacaactttcaaaagcagatttgaaggagttttttttttttagctctctaaaaattagctcctcaaatcgcttttcatactaataagggaaattaattgggggatttcttgagtctaaacttttagaacctctattttcactttcagaataccctttggtgggaatggggattttttttttccatccacattatcctggggcggagggtgggtgggtgacagcctgtcctgctgaccccttggtgtcaatgcagagtgtggagttggacaacgatgatggagggggcagtgctgcccagaagcagaaaatttccttcttggagaataacctggagcagctcaccaaagttcacaagcaggtaggagagttctgcccgctcccctctgattccctcctctctcctggaaagaagccccaccaggtttggccacagtgtgcggagaaggcactgagattgaaggtaaaagaactgtacactatcagaggacatgagggctggaaaggtccttacaaatcctttagttctcagtgacttcccgtatatataaaggactttcttttatcaaagccaaatataacgcatagggtttgagctctctggggttggagagggaagtgttcagaggcctgtcttttcatcctgcctccacccctgactttggacaccatctagcctctgtgtctcccatgacacctctgaggtacctctgtggacctgaaagtggacaccactgagctggttcaagtcctttatttttacagatggggaaacagactggtgccttgcttcattgcaccgtgggaggaccgggactggaaccagcaccctctctgctcagctgcccattcctagcgatctcagatgctctctcggatgcctgcgatgtgctggcatttgtctagagtgacagagagtgataactgtgtccaaactcaccagtgatttcagcaggtcatttgtcttggatactttctttttaaatgttggtgtgtgcatggctgttttccctctttaggaattgggatgtgatggaaacggcccaagtttttagaccacatggccgaggagatgtcatttctctttgacttgttaagtcttcttcaatattactgatgatggcattttttccccagagagaggatgatagattctagatagttgaagtcactcaaacaaattgtcgatgagaaatacgaaagcagaaactgtcagggagcttgaaatagggctctgagatgcatttttaaaatttatttttatttatttttgttttttttaatgttttttttttttttttgaggcagagtcttgctctgtcgcccaggctggagtgcagtggtgcgatctctgctcagtgcaacctctgcctcctgggttcaagagattctcctgcctcagcctcccgagtagctgggattacaggtgcgcgccaccactcctggctaatttttttgtatttttagtagagacaaggtttcaccatgttggtcaggctggtcttgaaccactgacctcgtgatccgcccaccttgacctcccaaagtgctggaattacagacgtgagccactgcacccagctgaaatgcattatcttattcatggattgaacgagcatttattaaaaatgtactctctgccaggcactagagctggtgctaggagaacaaagcaggagacccagcagtagctcactttggtgtagcactttgtgattttcaaaactccctccatccatctgggtcccctattatgtagtacacttgtgttatagatgagaaacttgagacttgtggtggtcaaatgacttacaccaagtcagatggccaggacataaagagctggcccttgagcccactcctacctagggctgggctgttgcttcttcaatcagcaaaaaggcgcagtctcctcctcttaccttagcctctggatgtgttgcaaagctgggtccaaaccccatgccagtgtaaacagcaggttctgcatggaaggaagccctctgagagctcaggaacatgcttgtttttcactgagtcctttcaaaccgactttaagtgtttcagctttctcatgctaatttagtattctcatatgtggtcgattttctcacacaatccccctttcctctacacacacccaaacagaagaggaggtaaatcctgcctcagatggaaagtttcttgtggtgggaaataggttttaattgtatccccaccccaccgttccttgcaccctgtgaatcacgtgttcaggaacctggaccccacagtctgagttttcctttcctttctgtggttgtacggagtgccaaggacaacctagcaggggccacctgttcagcagcaggggctgcttctggctgctctggtttgtgcaatgctgcctgcctggtagtaactcccttcctttatcctcctgccccagctggtccgggacaacgcagacctgcgctgtgaactgcccaagctggagaagcggctgcgtgccacggcggagcgcgtcaaggctctggagagcgcgctgaaggaggccaaggagaacgccatgcgggaccgtaagcgctaccagcaggaggtggatcgtatcaaggaggccgtgcgggccaagaacatggccagaagggcccattcagcccagatcggtacgtgcgtgcacagtggcgcccggggtttgagaagctactgcggcctctcagctcagatttgctaaaaggtgaagacagcgctggcccactctggaacatctgaaaggctgggttggagcccgcaggacgcagccctcaccgcaccctgtgctcaccctgtgggaatgggaatgtcaggcgcccccgttatcctactctgagatattccagcatacatcgtggtctcaaaacttctgagctgggcagagagaagccagccaaggctgtaggcctaggtcttgggctataaatgggtacactcttagaaatactggaataggaggatatttctctgcaaggtgtgaagggccctgtgttctgcacccggtgggagcatgaaggagcccatatgtagccagagccccagggaaagcctccaagtgcaggtttggaaatacccctggaagagccaggctggcatccatgacagggtgtggctacaggctggcacagaacctggggaggtctggagtctcagcctcttcaagacctgtatggatttgggcattttgcccatgtaggaaatgagggtgtagccagagtcctggttcccaggatagccatagggacaaaaacaatttaggaatattctctaaacagcttcttctccttttttttttttttaaattgaaacatctccaataacatgtaatttatttcccatcagatattgctgtgtagatgtattgcaaaccagcagtttcacgtttctagttttaaatcataccttagaatagtggttcattgcatgtgtaggatttcataccctttgagaatctattaaaagctatggaccctctccccagaaaacagcatcacaggcagaattctgcatccaatttcaggggctacacagatatccttgaaagtcatggggaacctacgatccatttcagatgaaactgaaaatctttttttctaacttttcttggcccaaattagaaatgagctaattgatgtttaagttctttctgtcccctaaatatttggatgccttggatttgctaagtatactgatagttttcccattttcagagagatctggtggttgataagaattgtactgttggtaagaattgtgacttttagttgtcacaggtgacctgtagatatcagggttgctgttaagacttttctaaatgtctgttctctcttctttctgttggttggatacagccaagcccatccgccccggacactacccggcctcatctccaacggccgtccatgccattcgagggggaggaggcagctcttcaaattccactcactaccagaaataaatacaaagtgagtcccatgtcaagggtggtttctctatctggaggcagaggcttcttgcctttccaaagcccctgcctggcagtggaccttgagtagagaggagttctgctctactccagcacacaccctgggggttccaggtaaacagagacccagacctgtcctcacttagtccagagccctggggtcttctagctgaggctgtctggggcccatgggacctggagccaggcccggcctaatcccctccaggggtaggggtggtgagtgattcagccgagctttgttttgcctgtgggactcccctctttaattggcatcccaaagggcattacctgtttgtcaactgctttacccacagcagacagaagttgggggttgctttaagtctcaggaacagaatataaagaaagagccagataatagaaagtgatgtttttatgtttactatctgaactcaacaagtggggattttaagaagatatctagatgagtccaggatgcttttttctttgagatggtggtctgcaagcttctctacccacaacccatgtgcacgacatttctctcccagcaaaaagaaaaggaacgagtgatattctttccaaaagagaagaagcagagagcgaaaactgtcatcctgatggaaatggagaaaagaggttactagttgggcgggcagacagatgactaggtgaccagaaaactttgtttagataaactctgactttgaacatgcagatgggaagaggtggctctgaacattgtccttggactctaagcccttgctagggtagctggctcccaaggcaggcaagcatgcaaggtgtgaagcctggacccctcctcatccagtcctttctgcatcaaggcaagaaggtgagcaggaggggctggagccatcactcagggtcccggcatcgcccaggcataggctaaaacttccaagggaaatgctttggtagttgcccccacacaacttttacctgtgctgccccaggcagtgccaacgagcaggccaggggctggtcagagtagtgggaacaggagggaaggcggaggcagcccgcgggcgggcagtgtgcctgccatcatctgccatcttctagacaggaaaatgggaaatggtcttggcggtgggccaccccattcctatctaatctctgcttccaatcagaaatagaatgaaactggaagttagaaagttgcttttgactacatattgtcagtatcgaggctgatacctgaagggaactctaagatccagctgggcagcttagaacagaaaagcctgaagcagtggtcatcgaactttggtggatgtgagcatccttgagcacccagaggcccaggctccttagaagaggaagggcctgggctttgtttgtctttttaaccaagtactccaggtgattctgatattcatcgaagtttgaaaactctccatggtttatacaggatggcggtttacgtctgtcttatgtaagggaaatttgaaggtggtacatcagtagttaagaatctccacagtgaaaacagaaacctagcctcttaactaggttaagcacgtgcctgcctcctgaactcaaggccagctcaaggtcaccaaatgacttcagtttcagccatcatgcctacattccaactttagcaaccagagaggaagcagagaagaggcaaaagcagccgtcctgaatgaatctcctttaagtagccttcctgaagccccatgcaatgctgatgcctccctttccctggacagcactgagccacatggccacatctagctggaaaaggtagtcttttagctgggcacatcactaccccaaagaaaggtaatgcttttagagcaaggacagggagagtggatgttgaggtgggcagctggcatactgtgcattatggaccacctaatatgctgcagcactgggctagatgtaatataggcatcacctcatttgatgaaagcacacatagaggtgtatgtgtgtttcccagcaaggccttactaaatatactggtccagggattctggggtccagagattgtgcagtgggacagtcaccttcttcatgggttccaacaaaggtctgccagtcccatattttatgtaggctccaaacaaccaaatgctggccattcatcaccagtgtagcctcttctcatacagaagagtgaaaatcagtaggtctggggagactttcaagaccttcggagtgaaagaaccaccctcacccattgtggcatttttttttaattttactttaagttctgggatacatgtgctcaatgtccaggtttgtcacataagtatacatgtgccatgatggtttgctgcacccatcaacccatcatcatcttttcgagatggagtttcactcttgttgcccaggctggagtgcaatggcatgatcttggctcactgcatcctctgcctcctgggttcaaacgattctcctgcctcagcctcccgagtagctgggattacaggcatgtgccaccatgcccagctagtttttgtatttttagtagagacagggtttcaccatgttggccaggctggtcttgaactcctaacttcaagtgattccccccacctcagcttcccaaagtgctgggattacaagcgtgagctactgcacccagctggcaatttgtttctttactcaaagtgttacaagtggttttgatggttttatctgaattcagagcctccttgacataccttctccacacagcttcagacacagcttctgtaactaggtgcttctctcaccaggttacaaaataaacaggccccctcttacagctctcaggatggcagtgtggctgaggggactggcattggacaagggacctgggttcaggtgttaggtcttccacttccttcaagttacttaaactcaggtctgtttcctcatatatgaaatggggaaaatcttttatgttggtcattggcattgacagaaggcttaaatgaggtcatgcttctaagcccataacaattgctcaataaaaatgttagctgctagtatagatgagcactgcagaaggtggtagttgatacatgttggtttatagtgtcctttaattcatatagttgttactaaatggtttttagttcctctatagcaataaatcctggcgactggatagggaaggcctatttctaactgagtatcctagttgttgctatgaactgacataagggcttttaaagataatattggccgggcatggcgggtcatgcctgtaatcccagcactttgggaagctgaggtgggcagatcactttaggtcaggagttcaagaccagcctggccaacatggtgaaacatccttccctactaaaaatagaaaaattagctgggcgtagacatgcacacctgtaaccctagctacttgggaggttgaagtggagaattgcttgaacccaggaggcagaggttgcagtgagccgagattgtgccactgcactccagcctaggtgacaaagtgagagcctatctaaaaaacatatatatataatttacttatctacaagctatgactatttttaagaaatgactgggcatttgtcagtggagattaaaaaggggtagtaatcaacagattcaggaattgcaattgaaaagtaaagaaatgctaaatcctttttgaaaagtaattgaaaatatggaattcattgcttagatgagagcaaagcctttttgagacagtctttcctgacctttgggattttcattctgaagtatctcttccctgggtagaaatgatctcaattgtgtcttcccagccctcctgtggagtcaaagcacatattcttacagctggatatctttggaatttccttctgcttcatttcagggttcaagaattatagccataatgagtattttggtttattctcaaggtttcagagcctatgaagatgccaatatacaaaaatcaaaagaacccaggataatgctggctttgatcttatctggttcaaatccacagggggctgcctcaggaggagatgatctttttcaaaccccagagctacatatggggcagtgcagtgcaaccatgtgacattgggcaagttacttgatttctgtcagctttaggtttcctaccggctaagtgggatcaggcattgagagcctagctctgtacttggtttcacagtgaatcagacaagaaggctgtgttcttgtccagtgatatgcttgttaggggaagatggacagaaaataaggtaacttcaagtagtggtaagtgctcagaagaaaacaaaaacaggctaatggaataggaacactgttttagaagagggggtgacatttaagttgagaactgagtgatgaaaaatgccaggcacacagcaacctgggagaaagtggttcgatgatcactcaaaggtaggaatgaatgagggttatttgaggaatgttaccaaggctgataaggcagtagctcatggatctgggagaacccatcttcattagagtggatggggagggagttgagcccaagtaaatgaaggtgttgaagctgtgggcaacttagattgtagcctagtgtgaggggccactggggctgtgggcgtggaagcagtgggagctggttcatgattagacaaggccactctgggctggaccctgaagaaggggtaggaatggggtaagcactgggggttgcctagggcgtcactgtaggtggccatgggggagggtccggtaccagacccaggtggtggcagcaggggagaagtggcctgagtcagtgcctgcttagagctgattcagctgtcaggcttactgatgagggttgagagcaagaagaggaggaaggaagggaatcaaggtagttcctagatttttgtgggctctagcagttagggaaacattggtccctttttaaccatgccagggaaaatcgggggatgagcaggttttgtgggaaagcttggtttccatcatgttgcttatgtgctgcctctcagacatccagctgagcccaccacgcaagtgggtgtgtggaacaggtggctggatccgtgggtctggagcacaggagagaggctgaggtgaggccagggctggagagttgtgacttgtagattgtgtttatggccacaggtctgaaggaggcaacctagagaaaaggtgggcacagcagagaggggagctgaggggcgagttggaccaggcccaggcactggaaaatgggaaggccagagaaaagaggtggcaccagcagaggggcctgaggatcatgtgggggcacagaggtcaagtgaagaccttgaccctagaaggaaggtggtcagctcagagcttgagtaagatgatgacagagactgggtggttgaagaaggccaggtggcagtgaccttagcatggactagacagactaggtgaggaaatagagccggcagctgaacccactttgggggttttatttgaaggagatcagagaaatggagcgatgtggtggtaaggtggggctgcgttgcttttctgttgtaagatgggagatattacagcatagttgtgtgcgatggtgatggtatagctgagctgggcagaggaggaagcacagctgtgggtgggcggtagatggggtgcattgggaggcaagatccaggtcaccttagagcttgttttctcgtgcaggcaagaagccagatgatcagctgagagagagggaggaagcagggtctcgctcttgagaccagagacggtgtaaaatcaacctctcaggcagtgctgagtcttctttgcagccccacacttaatgtagacacctgattaaacatctgcccagctccctcgttttgagagccctggagatccacttcctttccaggcagtgctttggcaagccaggggacttgttcaaatgtctccaccagatggcgccagtagggcattgctgaaaccttagatgttttctgaaagacggaaggcagaatggtcttttttcttggttttcctatatttagaccattttatctcaaacttgagtagtaaatagagtattttgaaaggaatacaattctcacagatccccagagttgatttaaattattttattataatacaatttgcacattgtaaacagtatacattccctacttacagatcttatacaactgtcaagtcaaaacaaatttagaaattaaatcgaaataaaaccacaaataaaaagtccaaaccaccaaacttcacataatttaatgaaagaagggctttttctgaaaataaagagctaggtgcaatgcgaccccggagtgcgttgcttcttgtagagtttgggatgcctgttttttgtgtgtcgtggtgtgactcaattctttcactcctgtactcccagcactctgagaggctgaggcagcaggatggcttgagctcaggagtttgagacaagcctggacaacttagcaagaccttgtctttactaaaaataaaaaaattagccaggtgtggtagtgcatgcctgtagctccagtgacttggaagggtgagctgggaggatcatttcagctggagagtttgaggctgcagtgagctgtgatcatgccaccacactctagcctgggtgacagagtgagattctacctcaaaaataaataaacaaataaaaacaaatacatgaagattagcctagtgcctggcactgaacaagcactccgtgctcatctgtgttgtcctcatcacctgatcctgtctcctcattctacatcccaaagaggcgggatgagctgtcaagatcccataactatgagtggtagatcctgggctaagagcgatgatcttctctgcaacagttctcaaagttcttggccttaggaccttttctcctcttaaaaaggatcaatagactgggtatggtggctcacgcctataatcccagcactttgggaggccaaggcaggaggatcacttgaggccaggcgtttgaaaccagccttagcgagactctgtctcaataataataataataaaataaaataaattaaaaattagctaggtatggcagcttacgcctgtagtcccaaccacttgggaggctgaggtgggaaattgagcccagtaatttgaggctgtggtgagccatgtttgtgtcactgcactctagtctgggtgacagaatgacaatctttctcaaaaaaacaaacaaaaaaggatcaatgagtttatatatatatatatgggttatatttattgatatgtatcatattagaaattaaagcaaaatatttagaatactgccgggttcatttaaaaaatagtaataagcccatacatgttaccacaaatgtgatttgtaatgaaaataactattttcaaaacaaaaaatagccaaatggcattgttttacatttttgcaaatctctttgatgcctggttatttaatagatggcagctggattcccccagctgtttctgcattctgtctgttgcggtgtgctgttttggttgaagtatataaagataatccccctttgtcacaccagacaagattcttggccattggacagctaagaaaactgtggaatggggaagttgggatcatagtgcccgtatcacaggcttgtctgggattgaatgagagaatgtgaaagaagagagaaaaaagtcttagaagaatacctggcaaaaattaggcccccgtgcatgttagctaatgttaaagtggtcatggggacagacctgaaaagacagctgaggtgggactgcagggagagaggacagaaataactgtaggtaggtgctgctatggcagaggactttgaaactggcaatctcaacccaaagaagggaattgtggagcacccggaggcaagaattcctgattccatctacagcacagtaggctcctccactttaatactcctcagcttcatggttctcagagtcataaattcagagcaactaaaattgttcctccacagcagattgtaccaaagctccaatgagataaatccacttctattcagcagtgataagtagagtacaattggtaattcttataatgtggggattgaattataaaaaggcaaaagaaaaactaaaactatgtactgtttggattaagcttaaatccactgcaagcaattgcaaaagcccaagttgggtgtgaaaacggtctctaaatacttcttgcaaaacccttgtataattaacttccttcattagctttccccaccccttctaaagaaaggtgattttatttcctcctaaatctggtcacacgttgccactttgaattaccatctccagtttggcagagtgccaggggaagtcctagagcaggtcagttggtccagtcccctgcctctaagtgagtgagtggctacttggaagagagtcaacaggactgggttttaaagattctccagactcctcagtctctctgggattagaacagacagaaatgctttatctcagggcaaaaccatttacctttaaaatttatatctattttctcccatgaatttatctaaggatatgaagatccagatagtgggaaggatggatgagagcatcctgctggaatccatgtttcttgggcctgctggaaagacttctcagcagacaggcctgtagagatccttaactggggatgaagaggaacgctgcatcctagtaaagaaaggacccttcattggcagagttcctgtgcttttcctctcctttctcactctccttgaggtgactaaactaagcaggtggggcctcctttgtggccccgtgtttcttccaaactatgagccaaaacctgctgaatcttgcccagcggggatcgggggctttgactgagaggccttccagggggaaattgtgtcactttatggtctgctggagttattgaggccgccccattgcatttgtgtctagtgcttgctgggtcaacacggtttggctgcaaacattgcgtcaggccataatcccacaatccaaggtatgtgctggcacctctctgcctccaggcacgcagaacggccatctcatccgaccaaggggatcttatctgaccagggggatagcgtgcgtggagaaatgaacctgtgagaaagtgaaatggcagtttcagtggtggcattcaggcaggcactcctattggttttcagctcagaatgcattttaaataacaactatgaccatgcttttaggtttttcacttctaattctggcaataagcccaaaatttcaccagaaaggccatgttcttcccaaagacatcttactctctgtgacttctaaaaatgacagaaatatcaccctctagggttgtttaagcccttcttagttgtgtagctttgccactgtgggtgattataccaaatgagttctgtgaatattttttcttgtcagtgaagaggtggttttgtttttgtttttgtttttttgagactgagtctcactctgtcacccaggctggagtgcagcagcatgatctcggctcactgcaacctctgcttcccaggttcaagcgattctcctgtttcagcctcccaagtagctgggactacacatacaagccaccatgccgggctaatttttgtatttttagtagagatggggtttcaccatgttggctgggctggtttcaaactcctgacctcgagtgatccacccgcgttggcctcccaaaccaaagtgctgggattataggcatcagccactgcacttggccaagaggtggtatttttaaaaagaatgtgttgttctgtttttttttttctattcagtttctgttccgtatttcttctccctttttcacccactttgcttgtatctgctttaataacccctttctagactgagaatttttctatttatatgtaacttacatcctgctgatttatgcaaaatatgtgaggttgcttacaatattataacatataaatcagaagagtgaagaaaaaaaagagcatggtagcgggaatctgagatattaccacagttgagcaccaaatgttgatataagccttctagaggcaaaacagaaagcataatgcataatgtgtcaggttacagagggctttttttttttttttttttaatcaaaagagaagttgggcttttcttagtggctgttgtatttccagtaccaggtaattccatgtatttcttaaggataaggctctacctccctcttgtcatccctgtccccatcccctagagtaccatgagctctgcacaaaacctatagtaagatctcagagctagggcctccagccggtgacaggaaacagagcctttcagtgtcttctgaaagttgagcttactgatgttgggtgcaggctgacagaggccattcaggctggtctagacgttcatcctggagatgcgcccagcaccagccgaacttctggtgggaagtggaatgaaatggacaggggtggtcttttggagaatcttattatccgatggagacgaagcatacctttgggaactgggaacctctttctacagagagtctgggttaggggccttgttgcacctgcttgctatcctaagtgcaggcaaatgagaaatgttttaatttccccctaggaatgagaaaatgcattatgttactctgaatatccatagcctcaacagataccgacttatggaagagaatgttgagactgtcaggactaaatacttaaagcaaaatcaggaaatcggaggttgtgctgttcatgtgccactatccacatgtgtcttttgagctctcaaaatgtggctaagtccaaattgagatgggctgaaagtgtaaaatatacaccagattgcaaacactattgtgtgaaaaaaaaaatctcagtagtaatattgtaatgtaaacgatctcaacatgtaataccagttacatgttgaaatactatttaggctatataaaatatattacaattaatcttacctatttcttttcactttttaatgtagccactagagaatttaaaattaaatatgtggcttggccgggcacggtggcttatacctgtaatcccagcactttgggaggccgaggtgggtggatcacctgaggtcaggaatttgagaccagcctggacaacatggtgaaacaccgtctctactaaaaatacaaaaattagccgggtgtggtggcaaacccttgtaatcccagctacttgggaggctaaggcagaagaatcacttgaacccgagaggcagaggttgcagtgagtcgatatcgcgccactgcaccccagcctgggtgacaagagtgaaactccatctcaaaaacaaacaaacaaaaaatatgtggcttgtgttatatttgtatctgacagctctggtctaaacatctagaattaaacaaaacttttttgaggagtaaatttctactgtgttttctaattcctatgttctctctttggttctctttcaacagatatgactccacgtagcatgtcaaggactacattaatcaccaattcctttatttttccccccctacagtttccattttttttttatacttgcttactccagccatctgcagtacaccagtttcaggtcttttgagctgtgtagagtttctgtgtgtacagatgtgtgctcggacttttctctttttgagaaatctgaaggagatggttgcagaagatccacttactactgagaaccattaccaccgactcggcctccggggtgttgggtggtttctgggtggttcctggagcctcctctgggcagtgcactgtcccatctgtacgccctaatgtgccattccctagaggggaacaaccaagtgccgtggaggcagatgatcatggtctgcctcaactgtctggtttcctgtaaaataaacacattgttttatatttttagggaacaaaaagtgctgctatagggttcaaagttttccttctgaacacttttccgaaacaaattaccccaaagacacattttgaatatcctggtcacatctttggatctgtaaaatataccttttagtatggcacctgttaaaatgcaaagcaaatttctttggggcagaaaaacaatctgacagtagcagtgtagaatttgttcattcaaatacatctgtgtaaatgcaaaaagtcataaaattcacctccgagctgcttgcttttgaacctgcagcaactagtcttagccggcccggtttgaacatcgttctttcagaagtgctgaaaatgctgcaaagttggataagtggaaatgtggctgcccctctcctcactacttcctctctgatcgttctgaagcttgcattgggaatggctgctttctctaaccattttcagcttgagtgggtattgctgaagaaatccaacatcattccagcagttgaaaaaggaagccttcgggagaaagtgcttgtcaaaattttgttctttgtgcttgtgtatgagtaagttgccatgaataagttattattttaacccataattggcgactgtttatatgaattctttctttggcaccaaataggtttcatcttcttaggcacaattagaaaaaatccacatagatggatattttacatttagttattgctttatccaaatacatgaatctaaagctgaatcaacccttacttccagttgtgcttattaagaagatcaatttccaagtagtaaagttttcagggaaactgactgtgctgctatttgttttgacaaatttgggggtaagtcaatgacaaccaaaccaatctcggtggaaactcctatcctatcatgttgtgtgcccaagatgagtgagctggcactgtgccctgaagctttcaccactgtaatgaaatatatgccaggggagactttgggcttttctcatgactgtgtgggtcgaaggtagctcaagtgtgtgtgtgtgtgtgtgtgtgtgtgtgtgtgtgtgtgtgtatgtgtgtaaagtgctaagaactgtgcattgacatccaaacatttcttgtacaaaatttccctagcaaagcaaacctgctttgacttaatttatttgttaaatgttgcactttgtttatgtatgttttgtttttggtggggaataaggagagagaggacgacaaattctattgaagtatttattttgtgaagatggcaattttgcatttgtttaaatttttttcattctttaattttgttatcagtgccagcccaatatacctgctctaccattatttgcggtctgataaaagggtccttgtggggcaggttttgcaaagcttatcaggtaataacatatgccacataaccttgttgatatgtttgcttctgatttgggaagctaaacattggtgtttgagaggattgccaattattaattgtcattaccactactctccattactttttgtttggaaattgaacaaaggtcagtaatggtttttggctcttgttaatatccatcataaaatagattgttttagattctttccagggtgatttttccctgggtaccccgtttctacttctaaagaattgcttggcactttcatgtttcaaagggaaacattcgcttgtagttccattttacttgatctctacaagggactgacaacatttgctttacttttattcacagagaaagttggctttgatgtctcttaaagataattctgctagttgctgatcagccagtcagttcacctagcttcaatctttataggacttctaatctaattttcctatagtgtgactaaaagggaggcaaattattggaacggattattcaaatggatccttaaatattgctatgtataataagccagttattatatcaggaccatgttctctgtaggccactttctaaaaaagccacatatgtgcaattttcaggtttttagactattgctccctgtactttaaatgtaaaaaccacacttctgaacaactaagctcatgaatatgattttggttatatgcagcttttgactagcatgtattgtgtctttttctcctctatgaataattttatatttcatgctacttcttgaaagtttactctttgatgctctaagagaacagccagatggtttatatgaataatctttatctgcaggatggtggattggtaaattaggagaatgttgtttgagatatcaagatttatgtctgggaactaaaatatataatgccaaatgtgtttttgtcaattactagagaattctgtgcaaacatatcatctcttcaaatgctgcacactttgcttttgttaaacagcaggtagtagacagaacaataacagtttcgcgttaagacttttaaaggaaatagaatcgtgattaagaaatcagaatttatagatatattgggataaatgaagaaataaaaatgtttgtctagaatgtagcatctagtgactttttaaagccctaacgtttacataaagaagctctagttcttatagaaataacaaagcaaataaaagttcttaacaatcccctctttcgaagtgcatttttttaaagcagggcaggagacatttggactctagctatatgacatactgggaaaggcagagggtggagggaagatttcacttcattgtctagcccagaatcttgagcaagctaaagaaaccatcataatctaaaattgcttcatttaacactaacaatttagactttttaaaccaagcattgaataatggctggataactgccgaagtaagcgccgctccatgaagtctgcttacttatttaaaaattgtgtatcagttttaaatactgttcattgtgtgcagatataaggggaatagggcattctgtagaattatacatgtctagtttgtaaagtgtgtcctgtgtactgcagatgtgtgttctctgggctttatgtatctgtacagtagctttcacattaaaaaaattgtggacaaacttgtccggggggtttgaggggagaatggtggtttatatcaataacgatgctgtactatagtccatgtaacaaaagatctggaagtcaccctcctctggcccacggaaaattttggtaatcttctaggttctaaaatgaagatgtatgggtactctggcagactgcatgttgtataatttgaaaaatactaaaagtggaaaataaaattgaattaaactttggctggtctgtttctccttatttgagccaccctgaaggtatggtcattggagatgtcagtgcctgtgtgaggatgagccattttctggcctcaaaagagttcacttcaagtgagcaggtgccccaatacacagcataagcaaagtcaaccttgaccatttttgcttttactttgcttaaatatctgctctaatttttttttcatttcagaactaagaaaacttgacatttgtcacttcaattctgaaaagatagcagctgttgtaaaaaaaaaagtgtcttattagcttttttaaaaagtaggattgactgaaagctcaatagagcagtgtattcactgaatatctgaatttcttcttgcctgagaacggcattaattctccaccaaatgaattggagccctgtttgcatatgttgaaagattatcagcatcttttgaggattggggtgtttatattcctgtttaacctactgattcatagcgttaatgtacaggtctgagatctcgtgagaggacaccggagcatgaatcctttgggggctaaccagtgccaggacacaggataatttttttttctgctctcataacaaggagacttccctaccttaggacactagaatcgtgtgaccatgcatgacattgtgtatgtaaagcatcctcattcttgtgcttggtttgattaatggtgcatgagagccagacagtaaacctctttcccttaattgattaaaaatgtaaaggatagatgtcaagtgaatgtgtaattaagggcactgcaaatggtgtgcttttatgctgtcttatccatctttttcgaaattgttattctcccaagaactctgaagaagtttccagatatcagattgttaaaagtgacttatgtagtaaacttcaaacgtggtggttgaatattcagctgatgcctgtgtgttttagatgggaaagcagttgtctgaaagaaccagattacaaagcaaatttcaatatcaatgggaaatgacccccacagatcccagaacacagcagctctgcgatgcagtcagactgcgttgatgccagtgttctcttggttcctgcaagactttcttgaggtttcttgtttccgcaagctctgaactgggctctggctttgcctcagaagcacagagctggagcatctgtgggagaaagtggaaatggagcaataatctgcaaaggcaattactggtgatgtgtgtattggcaggtttcattctagcatttgtgacaggtcgtgtcttgttatttgtcttgtgtacataatacactgaacagaggtaggagtcacctcttggatgacacattagttgaaaatgtgggctaacttgacaaaaggcatcctgagccatggaattttcactttccttttggcgtttggtggttcttcgtccaatttgcaaagaaaacacaaatctctctgtggggttagttgggttcaaaataatttttaaaaatcccataccaaccactgttggtggtctttctgcctccattaccctggatggcaaaggctgggattctccatctgctttgcttcaacagcagtttgttctggacttccaggaggccctctttgccgtcgagcaccttttaacccttcacccttccccatgcccagatcacaaatgattctcatagtatagctgttcaagatttatctacaacaatattttattccttcagaatgtaattagagaaattgacaaacttgttctggatgaaacgaaacagcatcagaatctcgtaatgctcagaaagctgcaataagcagtcagctatttccagggcactattctggctgtgtgccagacactgttttaaatgctttacatgtattaatccatctaatcttcctaataaccccgtgaggaatgcaccattatctctcctttacaggtaaggaaacaggcgcagagaggttaagtagcttgcccaaggtctcacagccggcaagaggaggcgccaggattgaaacccacacagtctggttctaaggttcatgctctcaacaggtagtaatactgcctctctgaatagtgattgggatatacatatatatgtgtgtgtgtacctctctcactcactctctctctatagtggtaagcagcagccaacctcaaaaacccttttgtaaagaatttatacaaagctttatgcctttgcaacttctctgtgctctcctttcattggaatctgagacctcgttgttatttgaattactttaagcaatcaaatgcatctaggaaagaaataatagtgaaggaggatgcctcacagcaaaggtgcctgatgacactgaactctacaggaaggctgcgtttcagtagtgcccttgtcagaatctttttaatacatagcatacttagaagtgtagccattactctgtcagttttcaaattatgtgtcataagaatttaacttatcctccatgtggatttttttttctttaagatgctaattctctctgtctgcattaaaacatgtataacctatattcttctgcttcttcagtaaaaagctctcagtactctcttgccccacctgaaatggctctcagggaagggctgaggggcactggatgagtttcctctcattctgagggatgggtgaggcctcagacgaggctgtcccctacctcacctctggccccatcatgattaatgggatctcgttttagagctttaggttttagaaaaaagaaacatgccagtcataccacacatgcatgtgcaagtccaaccacagaaggctgaaaacagtggggttcccttacgagctcctccctttacctgtgcctctcctgtctgagggtgttctgatgggctaccggggagcaaggctggtggcagatgtgtctaggtgacacgatgctgactccatcagccagcgtccacctggctgcctgcctgcagaccgcaacctccagcccagtgtccttgctgccctgcagcacctttctgggacctacatgcaacagcaaaatacctctggagtactggctggcaggcagtggtactactgagtaattccacatggaaagaatgatgcatgcgggacctggatccgactctcaacttcccatccaccggctggctgggggattgtgttccagtggtttaactatgcagagtctcagtgagctcatctccatacctgaatttagcccacgatgctccattcttcacagtgcctttcagggatcagataagaaactgtaggaagacattttataacagtgctactcaaatataagggattgttattgtcaaaaacttcctaggagaatgtatgttcatcttgaaccccagctattgccttctacctagcatcaccaatactcagagtagaagaggaaagaatatgcggagacattgggaattgtctgattctacccagtgacatcaaatctctttgtagctgtccatgtagggttctttcttttcccactctcttggtcagttggggctgctataacaaagtgccatagactgggaggcttataaacaacacacatctagttttcacagttttggaggctggaagtccaagttcagggtgccagccagcgtggtcaaattctggtgaagacttcttcctggttgtggactcctgacttcttgctgtgtccacacatggtggaagggagggggaagctctctggggtcccttttataagggcactggacttattcatgactaatgactaataaactcatcgtgatgacctaatcaccccaaaaagctctacctgctaatatcatcacattggattaggattccagcatattaattttggggagacacaaacatccatttcattgtacccacttctccaccctctttcctcttgggggaaaacccactcttaggctatttcatgagtaagagaatgtgacataccctctgaagtatggtgcagggaatagggtttcaggctagtttccacactctatgcgttgtggcttttcacaccagagggctcaggtaagtgcccttcactcagtgtcctggtgctggatcatgaatcaagtccattcagtttcccatacgtggaggcagaagcccggtaatcaaggttaatgctgagagacgaaatcctggcagaatatttgtaggagcttaacaagttccccaaagggagattagagatgctcaaggagtcacttagccgaaccagcacacaaaagcacattcggcttctgccagcatctggaaacaaggtgtctgcttcccttccataacccaggtattggaaagttcgtgtcccagcacacacagcagaggcaggaacccactgttcagtgcaagctgactctgtccacatgtgggcctgctgctcctaaataccagatgactatgatcagggcctctgctttaacaagttttgtctccagactgtcataaacccatgagaacatcaaaatccaaagagttgaagtcacatgttcaagactactttgttcgttttgactgcagagctcaggttccgtctcttacagtcctctgcttgtccatctcagtggtacggattggaagctgctgtagaaccccgctcccaatcttccctgtgagttgttgtcaacaaatagtgctttgcaaatagctttccctttcatatattgaacaaataaattggagagttcttaaagaaataaagagtacatcaccaggacttagaagagaagactatgagggacattgggaatcatctagttccacccagtgaagtcaaatgactcaccttgcaccatgcacaccatcaggagagagcccaagcccggcgcgccacccgcttcctcagggctcactctgctgcatcaaccctcagcaggcaaagaccaaagctagtcacaagaatggcactggcaatgcaccttcctgactccattagcccaaatattgacattagttgtgtggaaatgttttgccacagtcatctgttgagtgagtactgtgtggcaggagccctgtgatcaagagtgaacttcagcagtgtagactggagttccagtggttccaactctttccttatccactaagtgcctcaaacaagtaacctaacctctcttagtgtcgtgcctggctcacagtgcattctggaatagctagtccttcacatgcattctggaatctcttacaaggaatgagtgagggtggcactgttattcaccccaaatacagatgaaaaaactgaggtgtggagatgttaaatgagttgcccaacatcacaaagcaaggtagtggtggagctggctccagagtccacattcttaaccaagaggctgagctctcctggggtcacatggctgctgaggagtgcagagggactgggttcacatcctgcctcacttcctgagctgagtttcctcccagatctaagctgcttcgtatggaagcagctgaaattttcatgtgatgaactgaaaaagccttctgtaaaaacgttagtgttcattcattatttcaataaatatttgagcacctatcttataccaaagattgttttcagagctggagagagatgtgaataagacaagacagagtcttcatttccttagaggcaaattataaacaaatgaacaacactttctaaaatgacttcgtatattcaagtgctgtgaaaagaataaaccagggtgctgtgatggcaagtaactccagtctagttttgactgggtggtcagggaaggccttagtgagtgagggagccagccatgcagagactgggagacagttgcaaacagatgaacagcaactgcaaagttcctcaggaaggattgtgcttggtgtgttagtggtaatagaactctgattttacacagataacattctccacactggcatttctttccctcatttacctatcaaaaggacaatgagggccaggtgcggtggctcacgcctataatgacagcactttgggaggccaaggtggtaggatcacttgaagtcaggagttcgagaccagcctggccaacatggtgaaacttcgtctctactgaaaatacaaaaaaaaattagttggatgtggtggcacatgcctgtaatcccagctacttgggagattgaggcaggagaatcgcttgaaccctggaggcggagtttgcagtgagctgagatcgcgctgtagcattccagcctgggcaccagagtgagactctttctcaaaaaaaaaaaaaaaaaaaaaaagacaatgagtatgtttgtgttgctttcagaagtaagaagcaaattggaataatcaacttcttctttcctggaaatacaatgccaaaggcatttgcgcatttttgtggccagcaatgttgtgagcagacccacacatctgtagcccgcgcttcagtgcctgctctgaaacccaggtaaaagaggacaatttcatcctggctgatgtgttttaaacagccaagcaaattcacgtggatccacaggccccaagagtataaaaaataatagaggggtaaatatggaaaagctgatttgctgcccaaactcagggtcaagcacaggtctgagcaggccacctgtatctttttagagttgtcttctcagtgaaatggagctgctgctacctgccaccttggaaaaactgcttgctggcctcgtacgtgaggggtatgcccaactcactttggggaggttatttcaactttttactacatcaggactctgcgaccggtgaacatcaaaaacccaaagaaacacgcacatccttgcctgcccttggtaagcctggagagaatttcactggtcaataacagatgattctgaattttgcctgattattctggagctgacatttttgggtgtcacatttaacatggacatttttgaagcataactttgataaccactcttgctgaggcagctgcctgccctgttcttgcttcagattcagttcctgctgagatctgcgtggaaagaagtatttcccactatggggctcacacaactaaatggcaccactgaaattccctgtcaagtcccctggttagtgtctaattagtgtgtggctttaggaagtgggacaacacatttacatttttgcaggctgttacctgaacgtgatcgctgaatagcgtcagctgttcaaatagtaatgctgcatacaatgagaaatgtgagagggtgtgtgtgtgtatgtgtgtgtgtgtgtgtgtaggaggacacacccccgcccgctggctggagtgaggtatctgcaatcctgtgtcaacaggggtctaggcttccttaagatttaagcagctaacacagaggtggctgcactgtttttttttttttgtgggggtcgggtcgggggtgggaatggagtctcgctctgttgcccaggctggagtgcagtggtgcgatctcaactcactgcaacctctgcctcccgggttcaagcgcttctcctccctcagtctcctgagtagctgggattatgggcacccgccaccatgccctgctaatttttgtatttttagtagagaagggtttttgccatgttgcctaggctggtctcaaacccctgacctcaagtgatctgcccatcttggcctcccaaagtgctggggttacaggtgtgagccactgtgcctggccagctgcacttcttactctcctcctaagagaagcccgattttgttttcagagtgctccttgtgtgaactggggttgtgggaaggagtgacatttcccttcctttgttcagacggggtgaagacttaacttacaggtaagggaggcccttgactgacgtggggtgggaactgtttcgagctgtccttatctctgggcctgtttcctgacctgtgagatgggcctgtttcctgacccgtgaaatgagaaggttgggtgggatcagtttcccaggcttgcctgtggtgagtagcccccggagtgctcattcaaaagccactctgctctcccgaatgagaatgtttaggagtgaactctgtcatgagcaggcatccaagtgatcctccccttcaaggatgtttgggaatggtggtctgcgcagtctctaacagatcttccaactccaaaactcctgtcccggctatgtctggaaggcagtgactcctaactattcctgagacccaaatggctttgcaagtcttacaacagctgtggatgttctgtttagtaaaaacgtatacagacacagaacttcaaattcagttgcagggtctgtggcttttgattaagaattcctactttaaggttaacccttgaaagagaatgtaagcattcacttgagccaggcatgaagcagctgctcactaaaggtcagttattatgctatttctgtgtctcagcttttctatgaaattctcatattattgtctcattgtataggtgaggacactgaggcatagagagattaacatgcattgtaagttgtggctgaatttgaactcaaacagtctgattccagagccagtgtgaacttaaaatctgggctgcctgataaagtggttatcagttttgcctacttgaattcatggcactttctgctcctaatatttctggccacttccctatacctccttatattagtcataattaactaagcagctactatggtatgaggccaccacttctcctgttgtccttcccagtttctccccaacctccccttttccctagtttataagacaggagaaaagggagaaagcaaaaagttggaaagaaacagaagtaagataaatagctagacgaccttggcgccaccacctggccctggtggttaaaataataataatattaacccctgaccaaaactactggtgttatctgtaaattccagatgttgtatgagaaagcactgtaaaactttttgttctgttagctgatgtatgtagcccccagttacgttcctcacgcttacttgatctattatgactttttcatgtagaccccttagagttgtaagcccttaaaagggccaggaatttctttttcggggagctcggctcttaagacacgagtctgccgatgctcctggccaaataaaaaaaactcttccttctttaatctggtgtctgaggagttttctctgcgactcgtcctgctacactactatgtgccaggaatgctacacacattgtctcattgaaaaatgtcctcagaaaatgatatacagtattttttattttattttattttttttgagatgaagtttcactgttgtggtccaggctggagtgcaatggcaggatctcggctcactgcaacctctgcctcctgggttcaagcaattctcctgcctcagcctcccaagtaactgggattacaggtgcccgtcaccacgcccggctagatatacattattaatacacatgttgagtcctaagtaaagacaggaaaaattaggaaggtaaatatatcctaaggctcagaagttttttggattgttgcttctttggataatttatatttcattatattatcagagaactagagatagagcagaaactgaagattttctagttcaaatatcattctcctagagaccagtagagaatagcaataaatagttatttgtaaagattaattaattcattctagagtcttatgaagtctatcagtggttttgtccctatttccagcattttaatgttgatcagaagtgggctggctctctttgcactgctaggcagagctactgttcactgagcaggtgctttgtgctggcgctgtgctcaagcactttacgtggattatttaacttagccacacaacagtatcagaacttcttatttcagataccccttttaagcaaaaaacttcaaacagaggtcttgtctgatttcatggctgcacattttccaagtaggaaaaacacacaattgaggaacatgcccaaggctgctcagcaagcacaggagagagagtggggtggggagggagagatcacgtgcaagcaagcaagcactggggcagaacctgtaccctcctgatgattctcaggcctgtctgggtggcatcacttagca

SEQ ID NO: 711 - DNA, 6433 bp, Homo sapiens
caagggaagccatatgtcttcgacagagtgctacctcccaacacgacccaagagcaggtttacaatgcatgtgcgaagcaaattgtcaaagatgtccttgaaggttataacgggacgatttttgcgtatgggcagacttcatcaggaaaaacccacaccatggaggggaagctgcatgacccccagctcatggggatcatcccacgaattgcccatgatatctttgaccatatctactccatggatgagaacctggagtttcacataaaggtttcctattttgagatctacttggacaaaataagggacttacttgatgtatccaagaccaacttggctgttcatgaagataaaaacagagtcccgtatgtaaaggggtgcactgagcggtttgtgtcgagccctgaggaagtcatggatgtaatagatgaaggcaaagcaaaccgacacgtggctgtgacaaacatgaatgaacacagctctagaagtcacagtatcttcctgataaatattaaacaagagaatgtagagactgaaaaaaaactcagtgggaaactttatttggttgatttggctgggagcgaaaaggtcagcaaaactggtgccgagggagctgttcttgacgaagctaaaaatatcaataagtctttgtctgctcttggaaatgtgatctctgctttggcagaagggacaaaaacacatgtgccataccgggacagcaagatgactcggattcttcaggactctttgggtgggaactgcagaaccaccatcgtcatttgctgttctccttctgtcttcaatgaggctgagaccaagtccacactgatgttcggacagagagctaagaccatcaagaatacagtctctgtgaacctagaactgacagcagaagaatggaagaagaaatatgaaaaagagaaagagaaaaacaagactttgaagaatgttatccagcatctggagatggagctaaacaggtggaggaatggagaagctgtgcctgaggatgaacagatcagtgccaaggaccagaagaacctggagccttgtgataacacccccatcatagacaatattgctcctgttgttgctggcatctctacagaggagaaagagaagtacgatgaggagatctccagtctctacagacaactggatgacaaggatgatgaaattaaccagcagagccagctggctgaaaagctgaagcaacagatgttggatcaggatgagcttttagcttccacaagaagagactatgagaagatacaggaggagctgacacgtctccagattgaaaatgaggcagccaaggatgaggtgaaagaagttctccaggccctggaggagctggctgtcaattatgaccagaaatcacaggaagtggaggataagacccgggccaatgagcagctgacagacgagctggcccagaaaacgactacattgacaaccacacagagagagctgagccagctacaagagcttagcaaccaccagaagaaaagggcaactgagatcctgaatttgctgttgaaagatctgggggagataggtggaattattggcaccaatgatgtgaaaactttggcagatgtgaatggagtcattgaggaggagtttaccatggcccgcctgtacatcagcaagatgaagtcagaggtcaagtccctggtgaaccgcagcaaacagctcgagagcgcccagatggactccaacaggaagatgaatgccagcgagcgggagctggcagcctgccagctgctcatctcccagcacgaagccaagatcaagtctctgacagactacatgcagaacatggaacagaagaggaggcagctagaagagtcccaggactcgctcagcgaagagctggcaaagctccgagcccaggaaaaaatgcacgaagtcagcttccaggataaggagaaggaacatctgacgcggttgcaggatgctgaagaaatgaagaaggcgctggagcagcagatggagagccaccgggaagctcaccagaagcagctgtccagactccgagacgaaattgaggagaagcagaaaatcattgatgagattcgggatttgaatcagaaactgcaactggaacaggagaagcttagttctgattataacaagctgaaaatagaggaccaagagagagaaatgaagctggaaaagctcttattgctcaacgataaaagggaacaagccagagaagacctcaaagggctggaggagacagtgtctagagaattgcagacactgcacaaccttcggaaactctttgtccaggatctgaccacccgagttaaaaaaagtgtggagttggacaacgatgatggagggggcagtgctgcccagaagcagaaaatttccttcttggagaataacctggagcagctcaccaaagttcacaagcagctggtccgggacaacgcagacctgcgctgtgaactgcccaagctggagaagcggctgcgtgccacggcggagcgcgtcaaggctctggagagcgcgctgaaggaggccaaggagaacgccatgcgggaccgtaagcgctaccagcaggaggtggatcgtatcaaggaggccgtgcgggccaagaacatggccagaagggcccattcagcccagatcgccaagcccatccgccccggacactacccggcctcatctccaacggccgtccatgccattcgagggggaggaggcagctcttcaaattccactcactaccagaaataaatacaaaatatgactccacgtagcatgtcaaggactacattaatcaccaattcctttatttttccccccctacagtttccattttttttttatacttgcttactccagccatctgcagtacaccagtttcaggtcttttgagctgtgtagagtttctgtgtgtacagatgtgtgctcggacttttctctttttgagaaatctgaaggagatggttgcagaagatccacttactactgagaaccattaccaccgactcggcctccggggtgttgggtggtttctgggtggttcctggagcctcctctgggcagtgcactgtcccatctgtacgccctaatgtgccattccctagaggggaacaaccaagtgccgtggaggcagatgatcatggtctgcctcaactgtctggtttcctgtaaaataaacacattgttttatatttttagggaacaaaaagtgctgctatagggttcaaagttttccttctgaacacttttccgaaacaaattaccccaaagacacattttgaatatcctggtcacatctttggatctgtaaaatataccttttagtatggcacctgttaaaatgcaaagcaaatttctttggggcagaaaaacaatctgacagtagcagtgtagaatttgttcattcaaatacatctgtgtaaatgcaaaaagtcataaaattcacctccgagctgcttgcttttgaacctgcagcaactagtcttagccggcccggtttgaacatcgttctttcagaagtgctgaaaatgctgcaaagttggataagtggaaatgtggctgcccctctcctcactacttcctctctgatcgttctgaagcttgcattgggaatggctgctttctctaaccattttcagcttgagtgggtattgctgaagaaatccaacatcattccagcagttgaaaaaggaagccttcgggagaaagtgcttgtcaaaattttgttctttgtgcttgtgtatgagtaagttgccatgaataagttattattttaacccataattggcgactgtttatatgaattctttctttggcaccaaataggtttcatcttcttaggcacaattagaaaaaatccacatagatggatattttacatttagttattgctttatccaaatacatgaatctaaagctgaatcaacccttacttccagttgtgcttattaagaagatcaatttccaagtagtaaagttttcagggaaactgactgtgctgctatttgttttgacaaatttgggggtaagtcaatgacaaccaaaccaatctcggtggaaactcctatcctatcatgttgtgtgcccaagatgagtgagctggcactgtgccctgaagctttcaccactgtaatgaaatatatgccaggggagactttgggcttttctcatgactgtgtgggtcgaaggtagctcaagtgtgtgtgtgtgtgtgtgtgtgtgtgtgtgtgtgtgtgtgtatgtgtgtaaagtgctaagaactgtgcattgacatccaaacatttcttgtacaaaatttccctagcaaagcaaacctgctttgacttaatttatttgttaaatgttgcactttgtttatgtatgttttgtttttggtggggaataaggagagagaggacgacaaattctattgaagtatttattttgtgaagatggcaattttgcatttgtttaaatttttttcattctttaattttgttatcagtgccagcccaatatacctgctctaccattatttgcggtctgataaaagggtccttgtggggcaggttttgcaaagcttatcaggtaataacatatgccacataaccttgttgatatgtttgcttctgatttgggaagctaaacattggtgtttgagaggattgccaattattaattgtcattaccactactctccattactttttgtttggaaattgaacaaaggtcagtaatggtttttggctcttgttaatatccatcataaaatagattgttttagattctttccagggtgatttttccctgggtaccccgtttctacttctaaagaattgcttggcactttcatgtttcaaagggaaacattcgcttgtagttccattttacttgatctctacaagggactgacaacatttgctttacttttattcacagagaaagttggctttgatgtctcttaaagataattctgctagttgctgatcagccagtcagttcacctagcttcaatctttataggacttctaatctaattttcctatagtgtgactaaaagggaggcaaattattggaacggattattcaaatggatccttaaatattgctatgtataataagccagttattatatcaggaccatgttctctgtaggccactttctaaaaaagccacatatgtgcaattttcaggtttttagactattgctccctgtactttaaatgtaaaaaccacacttctgaacaactaagctcatgaatatgattttggttatatgcagcttttgactagcatgtattgtgtctttttctcctctatgaataattttatatttcatgctacttcttgaaagtttactctttgatgctctaagagaacagccagatggtttatatgaataatctttatctgcaggatggtggattggtaaattaggagaatgttgtttgagatatcaagatttatgtctgggaactaaaatatataatgccaaatgtgtttttgtcaattactagagaattctgtgcaaacatatcatctcttcaaatgctgcacactttgcttttgttaaacagcaggtagtagacagaacaataacagtttcgcgttaagacttttaaaggaaatagaatcgtgattaagaaatcagaatttatagatatattgggataaatgaagaaataaaaatgtttgtctagaatgtagcatctagtgactttttaaagccctaacgtttacataaagaagctctagttcttatagaaataacaaagcaaataaaagttcttaacaatcccctctttcgaagtgcatttttttaaagcagggcaggagacatttggactctagctatatgacatactgggaaaggcagagggtggagggaagatttcacttcattgtctagcccagaatcttgagcaagctaaagaaaccatcataatctaaaattgcttcatttaacactaacaatttagactttttaaaccaagcattgaataatggctggataactgccgaagtaagcgccgctccatgaagtctgcttacttatttaaaaattgtgtatcagttttaaatactgttcattgtgtgcagatataaggggaatagggcattctgtagaattatacatgtctagtttgtaaagtgtgtcctgtgtactgcagatgtgtgttctctgggctttatgtatctgtacagtagctttcacattaaaaaaattgtggacaaacttgtccggggggtttgaggggagaatggtggtttatatcaataacgatgctgtactatagtccatgtaacaaaagatctggaagtcaccctcctctggcccacggaaaattttggtaatcttctaggttctaaaatgaagatgtatgggtactctggcagactgcatgttgtataatttgaaaaatactaaaagtggaaaataaaattgaattaaactttg

SEQ ID NO: 712 - protein, 911 aa, Homo sapiens
QGKPYVFDRVLPPNTTQEQVYNACAKQIVKDVLEGYNGTIFAYGQTSSGKTHTMEGKLHDPQLMGIIPRIAHDIFDHIYSMDENLEFHIKVSYFEIYLDKIRDLLDVSKTNLAVHEDKNRVPYVKGCTERFVSSPEEVMDVIDEGKANRHVAVTNMNEHSSRSHSIFLINIKQENVETEKKLSGKLYLVDLAGSEKVSKTGAEGAVLDEAKNINKSLSALGNVISAEGTKTHVPYRDSKMTRILQDSLGGNCRTTIVICCSPSVFNEAETKSTLMFGQRAKTIKNTVSVNLELTAEEWKKKYEKEKEKNKTLKNVIQHLEMELNRWRNGEAVPEDEQISAKDQKNLEPCDNTPIIDNIAPVVAGISTEEKEKYDEEISSLYRQLDDKDDEINQQSQLAEKLKQQMLDQDELLASTRRDYEKIQEELTRLQIENEAAKDEVKEVLQALEELAVNYDQKSQEVEDKTRANEQLTDELAQKTTTLTTTQRELSQLQELSNHQKKRATEILNLLLKDLGEIGGIIGTNDVKTLADVNGVIEEEFTMARLYISKMKSEVKSLVNRSKQLESAQMDSNRKMNASELAACQLLISQHEAKIKSLTDYMQNMEQKRRQLEESQDSLSEELAKLRAQEKMHEVSFQDKEKEHLTRLQDAEEMKKALEQQMESHREAHQKQLSRLRDEIEEKQKIIDEIRDLNQKLQLEQEKLSSDYNKLKIEDQEREMKLEKLLLLNDKREQAREDLKGLEETVSRELQTLHNLRKLFVQDLTTRVKKSVELDNDDGGGSAAQKQKISFLENNLEQLTKVHKQLVRDNADLRCELPKLEKRLRATAERVKALESALKEAKENAMRDRKRYQQEVDRIKEAVRAKNMARRAHSAQIAKPIRPGHYPASSPTAVHAIRGGGGSSSNSTHYQK

SEQ ID NO: 713 - DNA, 43256 bp, Mus musculus
  misc_feature (1)...(43256): n = A,T,C or G
gaagtctcctgacttctgcgagcgagaccctactctgggctccccaggcacgagaggccgggcttgcaacaagaccagccgcctcttggatggctgtggcagcctgtgctgtggccgtgggcacaacgtgctccggcagacgcgagtggagcgctgccactgtcgtttccactggtgctgttatgtgctgtgtgatgagtgtaaagtcacagagtgggtcaatgtgtgtaaatgaaggtgagcctcgcctaggcacgacgaggaggagaagcactgtgtgagggctgctctctttcagccctttgctcggatttctgtctagggtttatcgtggctcccggaagctcagagcatctgcctgagaacagctctgggggtgtagggtcaggtgaaatctgtaacgagcagccttttgtgggggaagtggccccacactctgttcttaaacactcgaatagactaagatgaaatgcactgtactgttagcgtcttctctacctacagctccctcgggctcaggttcctacttcctttggatagggagtctatcttttggccactcctcttcctcgaaggataatagcaggcattgtgtggagtcaataagacccgtatatatagcaagagaccacctcttcctatttgtggttctcaaactcctccactacagcccagaacctcctcttatgggacctcgggtgacaataatgagaggttttcggttggaaaaggacagagggcagggaagcctcagacagctgtcttgtcaggctcttgggaggcttctccttccgttcagttgttgaaagggtctctccaaaggaaaggttttagccataactcttggaggcccttttccttcttcagcaggaagggtgggaatggataatttattttactgagatgtgttcttggttcctgtttgaaactaaaataaattaagttactgaactactggactggcagtggcagatggtgatatgtctagccacactcggggtagtagcccgtgtttttttctctttctaggtgaagtctacactcctgtactcagtgactttttatgtatatcctgctgacttccacaaaggatttgaaatgatgctcaaagactgagtttaggtttttagtctgtacaaaccaaggtggacttctgggtgtgaaggacttttagattcaaatgtacatagaccctgttcaccccgagccctaggctccagggtcaccttcaccattactcagaaccaaagctggtgcttgtctcccctgtaaagggctagatggtagatacactaggctatttatactgtggtctctatgtcgacaactcacctccaccgtacttacccagttctgctgttatagaccccaaatagttatggcagggggtgaatgaaagcagacacagacctcacataagcggatggggatagctgtgttcaacacagctcacaaagctggtgtgcagggccagaccttgccctccgactgtcacttattgaaccctttgctatactacaaggtcatgtctgcaatgggagtttcagaacttaaacttaacaattaggtggacaattaaaggacaggtactgttgtctctaagtccaaaccagagaattgggcaggggttgggggctggagggtgggggtggggtggtnnnnnnnnnnnnnnnnnnnnnnnnnnnnnnnnnnnnnnnnnnnnnnnnnnnnnnnnnnnnnnnnnnnnnnnnnnnnnnnnnnnnnnnnnnnnnnnnnnnnnnnnnnnnnnnnnnnnnnnnnnnnnnnnnnnnnnnnnnnnnnnnnnnnnnnnnnnnnnnnnnnnnnnnnnnnnnnnnnnnnnnnnnnnnnnnnnnnnnnnnnnnnnnnnnnnnnnnnnnnnnnnnnnnnnnnnnnnnnnnnnnnnnnnnnnnnnnnnnnnnnnnnnnnnnnnnnnnnnnnnnnnnnnnnnnnnnnnnnnnnnnnnnnnnnnnnnnnnnnnnnnnnnnnnnnnnnnnnnnnnnnnnnnnnnnnnnnnnnnnnnnnnnnnnnnnnnnnnnnnnnnnnnnnnnnnnnnnnnnnnnnnnggtgatgggaaaaaaattgagaggattcctatgctcaaaatgcaaaatgtgtcgtttgtcagggaagagtctcactgtgtaccccaggctagccaggcggtcagtacgtaccctaggctggcttcagactttccactgtgtctcattcttgagttctggaattgcatgtaggccttaccactcccggctaaaaattagataattttagcaaaactagcattctctgccactgaattatttgcatatacattttgtctttctttattcaatgttctttttttttgtatttaatctgagtaaaataatttctttatcttttcaatttttctacatttatttatttgtgtgtgtgtgtgtgtgtgtgtgtgtgtgtatgtgtgtgtgtatgtgtgtgtgtgcacatgcaagtggatgcaggcatactgtggaactcatatggaagtcatgggacaacgtgcagaaggcagttcaccgtttaccacttgggttccagaaactgagtttaggtcttcaggtgcggtggaagcattctgacctgacctgctgggccatcctgctgcccatcccttgtcttttcagatataagtagagagacgagattttttttttttctacaacatctccaattcctagcctaatgtctttgaaaaggagcacctttaagatgccttaaggacagaggcaggaggacttctgagttcgaggtcagcctggtctacagagtgagttccaggacagccagggctacacagagaaaccctgtcttgaaaaacaaaacaaaacaaacaaagaaagaaagatgcaatgtggaggggctggggagatggctcagtggttaagagtattggctgttcttccagaagatccaggttcagttctcagtacccacatgtcagttgacaaatatctgcaactccagttccaggggatttgacagcttcacaaggacatacaggcaacagcaccactgcacataaataaattgggactggagggatggctcagccattaagagcactgactgctcttccagaggtcctgagttcaattcccagcaaccacatggtggctcacaaccatctgtaatgagatctgatggcctcttctggtgtgtctgaagacagctacagtgtacttagatataataataaatcttgaaaaaagaaaaagaaaaagtaaataaattgcctggtgtggaagctgacttaggcagagcccggtgagttcaaggccagccttgtctataaagtgagttctaggactgccagggctgttacacagagaaaccctgtctctaaaagatagataatagatcttttttattaaaagatgcaatatggacaaaagacctttcagagcacctgcatatttggggtctataagatgctcccagggaggctggagatagcacctgctgcttttgcagagggcatggattcagttcccagcatccacatggtggctcacaaccatctgtaactccagtccaggggatctggtgcccttgatggcctctgcaggcttctgcacagccatggctcagagacatatgagggcaaaacactcatacagaaaatcaaaatatatattttattttaaaaggccaaaaacatgcttcgacggagtgcagaagtagctccctatatttctctaggtgataggttatctggtgagacaggaccaaggggaccatgaggactgttggatcatggcagtactccatggtgacattatacctttttagtgtgggaggccaggtatcgtggaactcaggaagcagagacaggcagatctctgtgagttcaaggccagcttggtctgcagagtcagttccagaacaaccagggctctatagagataccctatctcaaaaaacagaaacaaacaaacaagtttggggagggaggggtttggggagatggcttcttggtgtagagtgcttgttgctcttgcaggagacctgggtttgatttctagctctcacagttgggcagttcacaacagtctttaactccagttccaagggatcaaataccccattctgacctccagaggcactaggtatgcatgtggtacgcagacataaatgtgggcagaacatttatataagcagataaatctttaaaaatcaaaagaactatatatgtgcatatgtgcacgtatatgagtatctagaagagcgtcaggaatcccctggtgttttgcactgcctggaatggatgctgagaactgaactcaggtcctcctgaattcacccatcctctccatggcaacaacttagcgggagatgtcagacacctgctaacctaatgtgtgaatgaggagaggaagaaaggagaggggactgaagtaagatggacttggatacaaccaagaataacagggaacatccagagtgcagatgccttccctctaggaagaggcattctccagatggggctgtggcgagagagtcttttaactttccttttccctcccctgtcggtccctttgcctccctcgctttcctagcttttctttccatagcatgcacgctctgtggtggacttaagccccaaaccacaaccttgacaaattccaattggatttggtcagcagggccaacaccccctcccagcacaggcgctgggctcaggcccaggactggggtcagtggtggggtgggagtttgcaacccacagaactggtgggtggctacagtttcagcttttactgggctctggtggcagctggagggagggaaaagagcacactctggaggagccctaccttgaccaaatggctaggaagcttagagtggtggggagcagctggttacaggggagtagcacttctatccacccctgcttgtgtcaggccaacctctcctgacccttgtctccccacacaccagagggtgaaggacagaagacctgagggggtctctccagccacacccaccttttccaccataggaagctgtcagtcatttttgtcttcctttcactctgccatacatttgtgggagggctcaaggtcttcatcattaggtttcctctccttgttgaggttccacaaggcatgctgtggaagcactagggagtggggtgagcagtccataggcatacagaggcaagggagtgaggacctaacctggtggagggttatcacaaagttttaggcgagaagtggagacgttaacaatcacactaaaggcatgtcagagcacatgtcagagccgcaggaatgcataatggtcttttttttgtttgtttgttttttgagacagggtttctctgtgtagccctggctgtcctggagctcactttgtagaccaggctgtcctcgaactcagaaatccgcctgcctctgcctcccgagtgctgggattaaaggcgtgcgccaccacgcccggcttataatgttcttaaggtttctattgctgagataaacactgtgaccaaaaacaagctgaggaggaaagggttaacttcacctcacagattctatagtcactgaaggatgtcaggacaggaagtcaggataggaacctggaggctggaactgaagcagaggccatggaggagtgctccccatggctttttttttttttttttttttttttttggataaatggtcttttctgtggaagcctggctactgtcctagaacttgctacgtagaccagcctggcctcaaattcaaagaaatccacctggctctgtctcctgagtgctggaactgacagtgtaccaccgtagctggctcagcttgctttcctgatattttcccctggtattgaacttatttttatttgcatgagtattttgcctgcatgtatgcttgtgtaccacatacatactacacacagtgtccatagaggcctgaatggggcctgggactagagtcacagacagttgcctgccaccatatggatgctgtgaatcaaaccaggtccttgggaaaaagctgcctggccccttagcctctgagtgactagtcagccctcacctgcttcataaaattcaaaggtcgtgccgcccacagtgaccttggcccttccatgccaatcatcaatcgagagaaatgccttgcaggttggctcacaatctggtgaggtcatttcttgattggggcttcctcttcccaaatgattgtaacttctatcaagttgtcatcaactagccagtacagttgacctcttgtcaatatgacacacaaacacatcactattcaactagaccctttcctttctcagttaccctcaacatggcatgttataatgatataaaacattccaatgctgatgtttcccatatttgttacaaattcaaacgtataaagaaacccggtccttttagaaacatctgaagtctctcttttttttttttaagatttatttattgattatatgtaagtacactgtagctgtcttcagatactccagaagagggagtcagatctcattacggatggttgtgagccaccatgtggttgctgggatttgaactctggaccttcggaagagcagtccagtgctcttacccactgagccatctcaccagccctgaagtctcttttaaagttcaatgtttttctaaaacattcaaaatcgctgtaaaattctgaagtttcttaagcgtggagtcctgtgaaataaaaaaaaaaaaaaaaaaaaagctacatacgttattgcttcaaaaaggagaaaccaggacaatcacaaacaaagcaaagcaaaaccagagtccagcccggtaaaaaggccagcgctggggcctcctcatggttctttgggcctcaaagtgctctgtggcctcaactctgccagcttgtctcctgggcccagggcagcgctattccacagtttcttctgtccttggcagttgtcccacggtgctggcatctccaaaaggctgggtctctgctgcagctggattgtgttctcctcctctcccccctcctccccccccccccccccctgaccttgccatgtggtgacagtagaccagactggtttcaaagtcagaggtccacctggctctgcttcccaagtgctgggattaaaggcctgtgccaccaccctggactgctctttccttaatcacagctgattcttcagccccagctgtccagtatcaattaagtaaagtaaaagtttcactttagttgttctttttttgttgttgttgttgtttttttgtttttttattattattggctggggtccctctatatagccctggctggcctggaacttactatgttgatcactctggctgtgaactcacagcaatccatctgcctctaccccccagagtcctgggattaaaggtgtgagccaccacatgtgcactttagcggctcttaattcaaaatatgagacttagactctttaagggactttccaatttctccctgtaacttcccaagtcaggcctctgtcgtctgcactgctcttggcattatcttctaagtccccacagcaacccacggaactctgagcacacaacggctttcccagcccagagttcagatgccaccacaatcctccccaaaacacaaggtcaggtctgtgacagcaacatctcacgcctactgtccaaatgcaacctgaggaagaaagggtttattatagttcatcactgagttggaactcagggtaggaacctggaggcagaaacagaagcagaggccacggaagattgctgcttatacataggcttgctcagcctgatttcttatacaacatacaacccaggggtgacacctcctacagtgagcttggctttctcaaactatcactcaaagaaaatgtcccccaggcctgcttccagcccgagctgatagagcaagacattttcttaattgaggttctctcttcctgcaggactctgtaaccggagtccagctgacataaaactacctagcacagtaactatattttggggagtctcttgcctttaagaacccaggatatgggctagggagatagttcagccattaaaagtactagcaagacaagcttggcccgagcttgttccccagagcctgttgtaataggtggagggcgatcaggctcttactgacctctcttgcctagaggacctggctcccagcaccacgtggaacaactgcttgtaactttgtctccagagaatgttacatttttttctccctgtagtagatatccacacttacaggcacctactcacacacagagacgtatgtgcgtaggtacagttaaaaataaatccatttggctggatgtgtgacaaatacctttaatctaagcactcaggaggcagaggcaggcagatcgtatttgagttcaatgccaacttggtctataaagtgaattccaggccaggtggggctacatagtgagcccctgtctcaaacacaacaataacaaatatatatattttaaagctggatgcctgtggtgtaatgaaagcattcctaaagtaagatgggggatgatgccaggagaatcacacagagctagcctagagtgtgcactgcagcagcagaaaccagagatcctggcccaacgagggaaaaaagtcaagaacagcgactcccaaaaggtgtcctctctaacctccacatcttgctagagcacaagtgcacccgcaatctctcatacaagcacacacacacagagttaataaatggagggaaaaacgagcaaaaaccagagcttaacaaaggctctcaacagcattgagtcctgagtggggacaaatataattctcttcgttataagcaagttccttgctgtccatctcttcgttaaccatctctggctgttctggagcctgctctgtaaatcagactgacctttaactcacagacatccacctgcctctgcaccctagtctccagtgctgggattaaaagcttgtgccaccaccgcccccagccagtcctgtaatttttgaggtaaacaagagaagacaaactggtataaaggtataaaccagagacagatgtgacaagagatagattctgttcccagcctatgttttggagggagagaagagttataacgctgcaccaagctcttatacttgatgcatttaaagaacgcagtgggggctggtgagatggctcagtgggtaagagcacccgtttctggcgaggacccttctagctcagattctaacatagcttgtggctagagtctcaggcagtgtctccatcatgtcaaaagatgagtgtcagggaaggaaggcggggtcctgggtgcgctttcctggggatactaaaatccagactcatctagagagacttcatgagagccgcctctgagtttctgccctctgcctttcagcctcaacctcctagacgaccccatccagatgtttcctctagtatctggaatgcatcgttctttctcctcttcctttatgggaaaggatctcagagaaagcatccttaggaactagggagcagagcggattagcaggtggggtgcgagtgatgcgctgtttatttggaataagactggactagagcaggatacagcaaccgttttcatcctccatgctccacatgggctctgcttaagaaaccccggagactccctggtccgagccctgtggccagcgcagccaggatgtggcaaggtcccggagctcgctctgctcgggagcctcacctcagtgcccacagccccctctacacgccgtgccttccgatcctccagcccccacacaggcccccgcctaggctcagcttcagcaccggctgcttttgctgcagccgctgccatggtgatgggtctcgcgagaactgccgctcgctaccgcgcacttctcgcgcgatcgtggaggtgggaagtagcccgggctgggggtgggtgttcgccgcacagctcctgtcgccgtcgcggcttccggtgctaggtggagggcgggcaggagggagccggggagcgggccagcggaccatcttcaccgcggtcgggtcggcttgcggagcgggaggcagcggccggagagccgggcggaacctgcgggggcggaggcggcggtggcagccgcggcgcagggagcaggaacaggttcggagctggggagggaaggcgggtccgggcagggaagaggctgggtccgggtgggagcccgaggcccccggccgcggtccggctcgcaccgtctgggcgaggtgctggtgtggggggtgatcctcgctgagcttggggaccccagccccactcctgtccccgcagccgaaggacgccgagctggggtgggggcggggggcgcacacggatttgtcctccgcctcccccgagggtgcgacctgggctgcagaggtgagcttgggagggttggggacgagggggaggcaggctgacctgtgggagggggacgcgggggcggtgtggctgtttggctctcttttccttgggtttaaagggctgcgaggaacgctgccttttctctctccctcccccgcccgagctgtgggggaaccaaagaaaagccgtgccgtgccgtggttattctcctccctcacccagcgcgaggcgtggggggccggggcttagtatcagggcctactggtggggctcggctggctgcgcacggtcctcacggaggtggcgctctgctctggggtgttgggaagagggcagcaggtggggagagggtggagaggaggctggagacgggggagggggacctgagctagctcggaggagagaggtggggccttcctcccccaggcggagcgggggcggtgtcaccgaaggagggagcagcttgtcactggccctgagtttgtgtcttccaatccgctttctttctctaggaagtaccaggattcccggaacagaaaatgaagcctttgcttagcatgccagtcctttttgaaggaaggagggggaggtggggaggtgaagttccctgttaaaacctcagggtcctttagttaagtcgtaactctttggagagacttgtttttttttttgggggggggggagagggtctctgggccaggaagaatgtagtggagggttatgtatgtggtcaggactaagaagaaaatagtgaggtcattagggagacgggtaatgtaaaacccgtctctgccactgttgcattgggtcacccttgggtccatggcatgaaagttttattgggaggagatctgctgcaggagtctgattgcttgagtcattgcaacaggatagaatctagtctctgcatacctccatctgtgaccccaggcagggggatagggaactgtctttgctgccattttgtcttagacctgtttggggatagtatccccactgtgtgctgcagtggccattgggttggcctttggcatgttggacctgcgcttgagtacattgttaaaggccgttttaagaaaggcccatccacttacattcagcttttcacacaaggagtcactgaccttggaggcagctggaaagggctcccaggtgtcacacagtcactcctgcacagttttccttctttctctccttcctttccccctcccttactcctttgtttgtttgagatgcagtgcccttgctcgcctcaacctaccagctgcctgccgctgtctctggagtgctgaggttgacctgggaaccgaggcagacccttacttccttttttgagacaggctggatttgaatcttgcttttgtaagaacacgggatagcaatgcatagaactgcgcaaggtttctagctactgcttaaggaagaggtagtgcagcgaggggaaggagttctctactgatgagaaggagaaacttctttaaagccagggttgttaaagttgaggctgtggctgacagaaactgggatctgcttcctcacatagctttggaagtagataccaagaggcctgtgagtcagagcacaccagtgctttggctaacggtgtgcttagaggcgggatgccgcagtgattgaagctgggttgtagagacagacaagatggggccaggctcacctcctgcctgtgctgtcccgagctgtcccatgctgtcctgttgtatacatttgataacttacttgttcgcacttaggtttcatttttccttttgcataaggagagtcatggtagcagctacctagtaggctgtcgtgagagttaaatgagataagtgaaaagtcctgagaactgcatagggcacacagcacatgctgactgcccaccgtcatgtagtgtggcaccaacactcaggcagggctgctgtaaaagagagctagttagtagaagagcagggtgggcctatgtgaagggacagttgttacagtgactttactcagtgcctcgtgagtggtaacgttttattcttgtctgtatcagctcatagccgtagcacgtaatgcttcagggagaggtgaagctggagcagggcaggggccgagaacatcttggatgcaagggcgtgtggtgatccagagtagtgttggttagaaaggccactggagggctggctggctggttcagtggaggaaagctcctgccagcaagcttgaagacctgagtctgattccgtactcctgccccaggtccacaaggtagaaggagaggacagattctttcatcgtcagtctctggcttccaaacaaaaacgatgtgaaaagagaagaaaaagagattcttttaagaaaagtcattccataaccgcgtgtgacaagtaagacagcatgtgatcctagtacttgaaaggtggaggccagcagatgccaggagagaccttgtttgaataacgaaccgtctcccctcccaattggcacagtgctagactcggttggctcttgttcagaggactggagttgagttcccagctcctgcttcccgagccacaacacctgcagctcagctccaggagacccaaccaaacctgcatgcacacacgtatagtttaattaaaaaaaaaaaaagaaaagaaaaaggatgaagctgaagagatggctcatcagttaagagcatttgttcttacagaaggctccaagtttgctttgtcagcatccacctgtgggctccaaaccatctttagttccagggacccggtgtctcctggcttactgggcaccaggcaggtgcagggtacactgacatgaagacaaagcatggatgtgctgaaataaataaataaatcttataagaagatggtgggctggggcttagttggcagagtgcttccttgataagtacaaccctggtgttccatatctagtaggtatggtgccgctactcatgggagatcagaggtggggggatcagaagttaaagatttgagccaggcgtggtggcgcacacctttaatcccagcactcgggaggcagaggcaggtggatttctgagttcgaggccagcctggtctacagagtgagttccaggacagccagggctacacagagaaaccctgtctcaaaaaaacaaacaaacaagcaaacaaaaagttaaagattggggctggagagatggttcagtagttaacagtatagactgttcttctagaggacctggacttgatgcccaacattcacatggcctctgcactcacccggcacaaagcgggagcacgggcatctctgtaagcaaagcaccagaagccataaatgcataattcttaaaaaaaaaaagaagtcattttcagctacacactgagtttgaggccagcctgggataaatgagaccccatgtaacaaaacagaaatctcaagagtgaaggtgacttggaggtggtgactggacatcctgatagaatttagaggttctgtttgctgggaactcagggtcaccgttgactaacttttcagttctgtcctttgaaaatgttaagctctgtctgtctcacacatacgtgtcaaggtccagagattgtgctatccttaatttcctgtcaagccttctccatggtgagatctgtggtgattaggtggagagctaacgaaactcttctataataaaaggaatctgagaacgttaggaaagagttcccagaaaagtgagggcttcgtggacatggtgaccccgttagtcccagcactcaggaggtagaggccgatctgcggcagcgctctgagcttaagaccaggctgacttgcacagcgagttcctagctttattttacttatgtgcttttaaatcagttttattctacgtgcattggtgttttgcctgcatgtatgtgagtgaaggcgccagatcccctggaactggagttacagacagtggtgagctgccatgtgggtgctgggaattgaattgaggtcctctgaaagagcagccagtgctctgaacagctgagcagtttcttggcactgagaccctatccttaaaaaccaaccaaacaaacaaacaaaatgaagccttcaggggcagtgaagctttgggcttaacacagtggttctcaacctgtgggccacctaaatcaggaaatatcagatatttacaacttctaacagttgcaaaatttcagttacgcagtagcaacgagataattttatggctgggggtcagcacaacatgcagaactgtgttaaagggtcacagtgttaggagggttgcgaaccactggcttggcttaggtaagggcacttgaagcctagcctgaagacctgagtttgagtcctggaacccaggaaagaactggtgctcaaagttgttctttaacctccgtgtgggacatggcgcacacctgcctccatataccacatatacacgagattggagtgtaagtaaactagagagatggtccagtagctggtcctatagcacccatattggacattttctgtctcttgacttgaggtctaggtgacccaaggcacagtctcttgtggcgtctatctgcactcatgtgtacactccccactctccaggagtgtacccacctttaattccagtgctagagagtcagaggcaggcagagatctctgagttcaagaccagcctggtctacagaatttgttccaggccagccagagctatataatgagaccccatctatggatggatggatggatggatggatggatggtcagtcttttagtatttctaactttcctgtgtctcggtgtttggctgcacatgtgcctgtgtaccacacatgtagggctagaggagctcaaaagagctgtcagatcccctggaacagaagttacagattatttaaagctgnnnnnnnnnnnnnnnnnnnnttacagattatttaaagctgcgtcagagctgagaactgatcctgtttcctctggaagagcagcctgtgctcagtcacagagccgtctccagcccctccagccctccctcccacctctgcctcctgagtgctggaattaaaggcctgcaccaccactgccagctgcaaacatttgtgtgcttttcttttttcttctttttttttttttttttaagtgaagggttcatattctagtttgggaaaatattgtccaaggtgtgaccttttcttacagatttttttttttttttttttttttggtttttcgagacagggtttctctgtgtagccctggctgtcctggaactcattttgtagaccaggctggcctcgaactcagaaatccgcctgcctctgcctcccgagtgctgggattaaaggcctgcgccaccactgccctgctcttaacagatttctagaaaggatctgttagaaagaaatggcttaagacttgaggtctatcccccaaaatgtgacaggtctctcggtgcctttttgctctcccattgctgatagagcccatcatacatacccttatgtgtgagcatcaattataaatgtttacatttaaaatgaattaggatgcaagaggatatttgctttctgttgaaaaaaaaatgtgtgtgagatagggtcttgtgtagcctaggctagcctcaaattagccatgcagttgacgaagtctttgacctaatgatccttctacctctacctctgtggtgctgggattgcaggtagatgtaactaccccgctttatcagtgctggggactgagccttggcctgtgcatgccaaccaagctctcccctgaccaagctacattcccaggcctgtttctctttgaataaaacgtttagacttcaccttaggtagaaccgtaaactatagtacataaaacattttagtgaggaagtgggctgttatggtactggggactggggcgagtgggggaacataatgaaaacctttgcatttgtggtctcttcttcccagactgcttgcttgtttgctgctgctgctgctgctttcctctttcttcttcaagtataattcgaccttttcttggttatttaaaaaagacttgccaggtggtggtggcctgttttaatcccagcactcaggaggcagaggcaggtggatttctgagttcaaggccagccagggctacacagagaaaccctgtcttggaaacaaagtttatttttgtgtgcatactttgcttatgtgtatctatatgtgcactgtgtgtggtgccttgtggaggttggactggagttagagttggctgtgagctaccacatgagtgctgagaacctgacctaggtcctctaaagaacagcacatgctcttcactaaccagctgtctctggttccacttctaaaaaaatttatgttttatttactttcacttaaaaaaaaagttacagccaggcatggtggcacacgcctttaatcccagcccttgggaggcagaggcaggcagatttctgagttcgaggccagcctgatctacaaagtgagttccaggacagccagggctacacagagaaaccttgtctcgaaaaacaaacaaacaaacaaaaaacaaaaacaaaaaacgttactccatgtgtgtgcatgtgtgagagagtacatgcctctgtgtgtgtgtgtgtgtgtgtgtgtatgtatgtgtgtatgtgtgtgtgtgtgtgtgtgtgtgtgtatgtgtgtgtgtatttgtgtgtgtgtatgtgtgtgtgtgtgtgacaattgttatttttctccttccaccatgtgaatcctgggtgttggcctcagatttccaggcttggtagtaagcgcttttacctgataagccacctcgaccctttttgagagaagtgtgtatgcattctagactgtcctgaatttgttatgcagaccacagtggcctggttctgcctcccatgtgctgtgattacaggcacacaccatccctgtgtcttggcaggctctcagtcctcaggaacactgagtctgagaacatgaaaaccgctttcctagttgtcaaattcaggagagggactgggggccacaggtggcttcctttctgcctgacagacatgacaaatgccatgtcatcctcagtggagccatttgcagagtgtcagtccttgtgcctgtgcaggaacgggaagcacgtggcagcctttgcagatgaagggcagagtcagtgctgggatcccagccctgccctctattacagcatacacaggaagtgatcctaggacagcggctagacacctgagctgatgggtggctctgcaggcccagtcaccgaagttctgcctaggcacccatggcctttgtgatccgtgactccagctggcatagaacgcatcagaggcattttgggaagctttacctctggagagtgaggcagacaagttgaatggactacactttactgtttctttaggctctttaaacagaagaaaaatacagcgtatgggtgtttggctgtgtgcatatctgtaccatatgcctgcagtgcaggtcagagagtgtctgatctcctgggatctggtaacacagttgtaagctgccatattggtgtcaagaattcaacttgggtcctcttgagagctgccagtgctctcaaccagtgaaccttctgtccagccccgcttagtttctgcggtagtggttgaccttgcccagattctggctttctgttcgacctgttcactgtgagctccatcttgatcggtaccagaggtcagattgggtttaaggctttcctcgctctacccaaggtcactgatacatttttagtgttttttttcttttcttttcttttttcttttttaattctcttattatatcccagccacaatttccctccctccactccttccagtccttctccctctcccctcccctcccctgatccattcctccatttccctttagaaaagagcaggcctcccagggatatcagctgaacacggctgacaagtcacactaagactaggtacaaaccctcatatcagggctggacaatgccgtaggaggaaaggatccccagagcaggtgaacgagtcagagacagccccgactcccactgttaggagtcccacaaaaatactaagctaacaaccataacatagagaacctggctcagacccatgcaggcgctctaattgttgcttcagtccctgtaagcccccatgagccctgcttagtttattctctgggccttgttctcatggtgtccggacctccctggctcctacaatcctccttcctggaactctgcctaatgtttggctgagggtttcagcatctgctcctatcagtggctgggcactgatctatgaggatagctgaatgtcactaggaatcagctcactaactttttttccaggttgtggtttggtttctgatccatcctctggttcttagccatccaggcagtgtcaggcttgggctcaccctgtgggtgtaggcctcaagctggaccagttggttttagtgaggggaagcatatcgtaggctctcctaggcannnnnnnnnnnnnnnnnnnntcagctgaacacggctgacaagtcacactaagaactaggtacaaaccctcatatcagggctggacaatgccgtaggaggaaaggatccccagagcaggtgaacgagtcagagacagccccgactcccactgttaggagtcccacaaaaatactaagctaacaaccataacatagagaacctggctcagacccatgcaggcgctctaattgttgcttcagtccctgtaagcccccatgagccctgcttagtttattctctgggccttgttctcatggtgtccggacctccctggctcctacaatcctccttcctggagctctgcctaatgtttggctgagggtttcagcatctgctcctatcagtggctgggcactgatctatgaggatagctgtcctccttcctggagctctgcctaatgtttggctgagggtttcagcatctgctcctatcagtggctgggcactgatctatgaggatagctgaatgtcactaggaatcagctcactaactttttttccagttgtgtttggttctgatccatcctctggttcttagccatccaggcagtgtcaggcttgggctcaccctgtggtgtaggcctcaagctggaccagttgtttagtgagggaagcatatcgtaggctctcctaggcagctggagataacagcaccacagaacagctgggtttggagcaggtggaagcggctcagattttaagaaatagaaaacagagcaggggttggtgagatggcttagctccagttccagggtccaccttcctcttctgtcctttgcaggtaccagacacccttatggtgcacagtcatacatatacacatagcatcatacacataaaataaggcaggtgccactctaaccagcttaaaacagcgcagtgaccttacccacatagctatctctctggctcaaaggttttatgggtttttgtttgtttgttttgagacaggagtctcactttgtagtcctggctggcttggaacttattatgtggactaggctggtcttcaaattcacaaaaatcctcttgctttgccttgcctcctgaattctggggttaaagacatatcccaccacactacacccagctaggatttatttttttccagagagaggatttagcccagggagccttgaacttggtatgtagctgaggatgtccttgaatttattaaagtagcaagagatatgattgaaataagccaggtatcagaaggcagatgcggctctcacatgaggtagaatattaaagtagtaagtacaggaagaggaaagctgtcccagtttatgtcaccaggatcaagaccccaacagaaagcaatctgaagagaaaaggtttatttccctcacagcttgtagtttatcatgaagggaattcaaagcagaaacctggaggcgggagctaatacagagaccatggaggaccatgttgctggcctgctcccatggcttgctcagcctgccttctgtataacccaggtccaccttcctggaggtgatgctgtctgcaatgggctaggacctcttacatcatttatcagtcaagacagtgtcttacagacctgcctacgggccagtctgatggaagcattttatcagtggagttaccctcttcagagatgattacagggtgtgtcaagctgacagaccaatctgtatagaaggggacaatgagattgcttagtgtataaagtgcttatcaccgggtccttggaacctgtgtgatagaagaaaagaaccaattattcagacttgtcctgtgacctccacacacgccagagaggagtggcagctgccagtgctccatggagggagggggctccttcctactgcgctgcagttggaggcaagtgctgcatctccagcacgcgtgcgtgaggcttgtttcctagctgcaggctcactttggagagttgagaacgtctgcagatgagtaatggtggtgtttgcactgcggtgtaagtgtgttaacgtcattgaaccagttaagatgaaaacagttaagatggcaagttttttttgttgttgtttttttgagtttttcgagacagggtttctctgtatagccctggctgtcctggaactcactttgtagaccaggctggcctcgaactcagaaatctacctgcctctgcctcccaagtgctgggattaaaggtgtgtgccaccacgcccggttaagatggcaagttttatatgtcatttttaaacacaagtatacggctagaacacttttaatccactggcttgtccttagagggcctattttctcctatttctctgctctatctagtttgtttttgttatttgttgggtgggaggctgttgtgagcctaggctggcctacaatctgattctcctgcctcagcctcacagcaactagagctttgatgctgctctgttttcttggatgagggggatgcttgcccatcatcctgttttgttttcaggatttttattttcctgtgtttaagtgttttgcctgtatgtgtgtgtgcagcatgtgtgcctggtgccaatgaagatgagaaggagggcatctcaggcatttgtaagctaccatgtagatactgactaaactcatgtcctctgagccacaagtcctcttcactgctgagtcctctttctgacccctaggagttggggttttgttttgatttcagatagggtctcactgtgtgtccagctcttagcctctgagccattgttccagtgtcccagctagtgtttttcaatttttaaaaattacatttggcctggaaagatggctcagtggttaagagcactgactgcttttctgaaggtcctgagttcaaatctcaacaaccacatgatggctcacaaccatccttaatgagatctgatgccctcttctggtgtgtctgaagacagctacagtgtacttatatataataataaataaatctttgggccagagcaagtggggccggagcaagcagaggttctgagttcaattcccagcaaccttatggtggctcacaaccatctgtacagctacagtgtattcatgtacataaaataaacaaatcttttaaaaagtacacttatttgtgtctgtgggagaaggcaactgtcacagcacacacatcaaggctagagggtaacctttggggtcaaactcaggttgttgtatttagtggcaagcctgttgacctgctgaaccatctttctgcctcccgcccgttcctttgtacatgtgggtgtggcatgtgtgtgggcaccattctgtgtgtgtgtgtgtgtgtgtgtgagcgcacgtgcgtgctgaaggacaactgtggatgtccttaagaatgacatctgttgggctggagagagggctcagcctttaagataagcannnnnnnnnnnnnnnnnnnnnnnnnnnnnnnnnnnnnnnnnnnnnnnnnnnnnnnnnnnnnnnnnnngttctaggatagccagggctacacagagaaaccctgtcttgaaaaacaaaaaataaaaaaaaaaaaaagaagaagaatgacacccgtctcttgtgagacaggttctcttgccctggagctcacccgttagtctgtatagactggctggacagtgagcctcaaagaagcttgtctctgctttctaaccatggggttacaagtgtgtactaaccaccatagctggctgtttttagatgggctctggggctcttacgtgggtcctgtgctttgagggcaagcgctcagcgactgacccgtcccctgtgctgatgttgtttctttgagacagggtctctgtggtctgggctgttgttacactctcggcattcctccagcccgggcctctggagagctgagactgcaggtgtgagctgccaccccaggtttagcatctcatcttgtatgaagctggacacgagagcactaatatcctcacttaaaggtggaagaaaccattctaagaagctcccagggggcttcccacggttcactggggacggtttgtttctgcatgccccttagtgagccagtgagccgggtcatttcattcactaggctgagaaagagtctccccgaaatgtacttcacattctgtgtctccccaattgtaaacaaaatggggcttacttagaagaaagtgaagaaaggctgtggtagaggcagccagtaatttctgtcgtctgaggccatcttgctttttttaaggttcagttattgtttgtgtaggtgatttccagatatcacccccccaccccctgtccattggactttatatttttgcacaaaaatagaaatacaaactgctcttgcagaggacccaaacttagagcagtaaagtcacacaactacagcagcttgtagctccagctctggggatctgatggcctcttccagccattgccctgccacttacatgcacatgcctacgccatagaaagagatttaacagaaagaaatctgcattaagttctaaagcgaatatcctcgtccttaccagatgcattcctggcttttgtttttttaaggtttgtttacttagtatacatgaatatactgtagctgtcttcagacacaccagaagagggcatcggatcccactagatggttgtgagccatcatgtggttgctgggaattaaactcaggaccttcggaagagcagtcagtgctcttaaccattgagccatctctcacctttttctgtctgaagaattgtcatccagttccaagtcgtcgttgacctttctattcttcctcttaagtttagtccatcattagaccctgtgagttctacttttttctgagacagggtctctgtatttgatcttggctgtcttgctgtctagaccaggctggctttgaactcaaatcctccaacttctgcctccaagtctgtgcccagtgagtcctaccatatcgatgtttcagatctctcttgtcttctgctgctacctcttgctactaggaacttaaaaaaaaagatttaacttattttccatgaagatgcgaatttgcctgcatctttgtaagtttagcctgtgtgtgcagtgcctgcgggagtgagttgtgagtctttctgcttccatctttgcagtgctgagactatagctgtgtgctactgcaccctgtgtatgcagtcctgggattgagccagcactttctatatgctaggcaagctctagagcagaggccttgcttggtcccctcttccttattcagtgtaccctttgacgagtcagggacagacaaaagaagtgctttcttggctttgaaaatctacagtttactaagataccaacgagttcttgtgttctgacataagtgttcttgaaacaagacgtaaaatgtacagatgtcttcagacatggttggtacttcgtacttttagctccagcacttgggaagcagaggcaggcagatctctgtctggccagccagggttatatagtaaaatcctgactctaagagaaaaaaaaagatgaaggtggaggacacagcagcaacagctgggtgtggtcacatgctccagtgttcccagagacagaccagatgatctctgtgagttgaaggccagcctggtccacatagtgagctctaggacatccaggactatatatagaccctgtctcaaaaacaaacaaatacagctaaaaatatattaaagctatgactagccaacaattagttcaggagactaatgcagactcactgagtcctaaactattggtcttgtggttatcagtgtttcagattccatttctgttagtgatagagtcctcaatttgaaaatgacctggactacgccggggcctagcaaacacataagtggatgctcacagtcagctattggatggatcacagggcccccaatggaggagctagagaaaatacccaagaagctaaagggatataaggttctcctatagggagaacaacattatgaaccaaccagtaccctggagctcttgactctagctgcatatgtatcaaaagatggcctagtcggccatcactggaaagagaggcccattgtacttgcaaactttatatgccccagtacaggggaatgccagggccaaaaagtgggagtgggtgggtagnnnnnnnnnnnnnnnnnnnntagcattggaaatgtaaatgaggaaaatacctaattaaacaaaaaagaaaaaaaaaagaaaatgacctgggaacaccattgctcttacagccaggcagtgggggtcgaaaggttcttctgccttcctctggaccctgaagaggatggtggaactagatccaacatcttctgaagcatttcaggacacatgcttggtccagctttgcagtcagatgggaggagtgtgtctagctcacctggctaaacacggggctaaacacgtaagccaagatggccgaacagctcgccattactgtttataaagtcagagtttcatgcacactacgaagatagttttccaagtgcactacctggccagtttagctgcaggttgttgttgttttaggaatgcattctggtgcagggatgtgcatagggttagagcaatagctcagccttgaaaggccaagacttactacagagatgatgaccatctgtataggcagggattggtgttcccagcattgctaaaagctgccactgccctagtgacaaggacagagtactgtgtcttaataggcagagaggaatagagaaagcagtcaagctcttaattatgctaaagggagtcataaactctggctgctcccggaagcttagtggctaccaggtatctgtgagatctttgatttaacaaaggggaaattccactgttttgtccttttaggatgttcctgaactagttttgggttcaactgtgtctggaaaatggccagggtttgtcagctcctacccaagctaaattgtatctggacttattaaagatgtttagtaaatagtcatagtatttcaggagggacagtcatgaactgtgcagaatttttaaacttcttgtgaagtaccaaaatccgaagggcactataaattcaagaaacggtagggtttagatatcagttggtgtggtggtacaagtgtatagaatctcggctctggggaggaatggagacggggatcacaggtcgtccctagctgatcttcctgaaaccaatccaagggcatgtttgttaccttgagcagagaacgtttacagtaaggattgccctttcttgttaagtatgtggttaaacattggtaaacctgtgtgattgctcaggaggtgagatgcaaagggcagagctgtcagtctgaaggctggatctttggaagaggagtccccaccctacacacacacaccctgttgctcttgtaagaaaccaccatgttagttgatgtcactgccctgcccggatctgatgtacataaaggcaaaagccatttttactgggtcacagtctaccaggtctctggcttcaaagaattaagtctgtggagatggtgtacatcgaagaggatatagaaatgaatttttaggggacattgagctagatcagcaggtcagggtgcttgccaccaagtgtgaaggcctgagcttggttcctgggatcctcgtggtgaggacggaggaggctcccttattgtcttctggccttcatggcatgccagatgtgcatagacacataacttaatgaggaatacacatatttttgagtgttcccacaggacaaagccaaggtgattactgcatgtgccaacatcagggaatcttttccttgggagccaagcatcaaaactggcaaacaaaggagttttcttctatgtcagtccaacttgggagacattctgttaatgacttatttcccccaaaacaatgaagcaaccccccttttaacattacgtttactgtgtgtatttgtgtaagttcctcctgctgtcacacgtgaggtggtcagagcacaggtctggggagctgtttcctttgctgtgggtcgtggaactctaactcgggtgttaaggcaacaagtgccattcctgggtgggtgagtcatcttgctggctcacaaagaaacgtctgtgtgctaataatataacttaaaagtaaaacagatttccatattgtataaaatgataagcggtggcatttcacactgcatagtcacaagagatacagttgtgaagaatgtgcgcacaggtctagagaggtggtagttagagcatgtgttcttctttcagaggaccagcatttggttgtcattgcccacatggtgacttagaaccatcagtaactccagtttcatgggatccgatgtcctcccccagcatcctcaggctgtacgaagtgtacttacataatatagccacgcccacacatacaagtctaagaacttgtacatttctgttgtcatgtgtagcacttgagctctctatgcctggtctgtttgatccctcagttttctccaggcctgtgtccatcctcgccgtaatccgcgtcctcgtcttccttctgggtgtcttagcttcctatcttttaggacttttggaaagaaatttgggctagctttggagaaacaggtttagcagacagctttgtggcttttgtctgtggcttacccatcatcttggatttatttccattaatgcccccccccccacatttattatgggtatgtggtgacaatgacagtaggcagtgaacatggacatgtagtacatgtggctttggtgcaatgttcattcttgatgaatcccccacctccatcccacattaacccagactgtcatcaaacttgatagatagttgtgggtagccttgaacttctgatctccttgcctccaggtcttaagtgttgggatcacagatgtatgtgtcaccatgcccagctttacagcacattgatcaactgtagtccatagatagcaatcctactgggcagaagaaatgacacagggatatctctggttgaagctcatgtcagtatgcaggatggatcatccatagtgatttaagtcatgagtgtgaagacagcacttgggaggcaggcggatttctgagttcgaggccagcctgatctacaaagtgagttccgggacagccaggactaccaaagaaaccctgtctcggaaaacaaacaaacaaacaaacaaacaagataggcccaaggaaacaaaggatacagaccttgcagagggggttacattttaattagggagatgactatgtacccattaataaaaaagcaagtcacagggtaatgtgtgcttcatgagaagttcacatctttcagggactttgcaggacagatgtgcagccagcttctctttctctccaggccttcctccttccacctcacagtgctgcactagagcccgtgtctctgttgtcaggttacggtcaactttgaattgtaacttcagcatgacagttgagcagagaagtggagggttatctagaggttccgagccagggctattggctgctggtcttgtttttcagcagctggtctcactatgatcatataatcagtgctagcgtggtcatggaggacagacagggagaagtgtgtgatataagtaaaatccctgccagagcctaaaaacagctcttcagctctctctgctccatcccgggaaacatggagaaagttttccttgtggaggtcatggtaccagaaacccaactactataggttgctggaggttgggatgacctgattttagtagctggacaagtgtccctgtcactcctcctccccccccccttcctgccctcaccttaggaatgtgtaagggccttagatctgactggatgagttgaggctggaaggacggcggggctggcaggtgggcagcatggctgagattgagtcctgaagtccaacaagccctgttgctggggtgtgagctgggaggcctgggagaaccacacctggctccttagtctggggatgtctgaagatgaaacgcttctgcactcagttctttttttatttttagacagcctagtacttcagtccctaggggctcttgatctgagttctatgcactagtctggaatttgctacagaggaataggggaaacaaaacaagaaaaacaaaacaagcctgaagaagttctccaaaaaagtgactaaactcccagcagacttccctgattcaccttgtaactaggattcttcgctgcccacctctcacattcctgggtttagatgcgctctgtcctgacctgttccttcgccttctgggtttggggtgtgtgtgtcgctggtttccagactctggagagtgccagcagctggcatatgatgatcactgaacaagctgcccgctgacacatgccttctgaggcacagagagctgcctggcttgagtgctctgaacccccattgcatgactgtttcagaggtgcgtttttagaccaagtatgcagtgcacacctgtaatcctagcacttaggttgaggtaagaagagcataagttcaagtttatccttggttacagagtgaatttgggaccagcctgggcaatagggaccatagctcaaaacatttttgttggatggagagatgactccgggcaagagtgcttgttcttgtagagacccgagtcagttctcagcagtcacatagcagtcacagtggctcacagcggctcacagctgtcccacatcctcacagtgcctcacagctgtcccacatcctcacagtggctcacagctgtcccacatcctcacagtgcttcacagctgtcccacatcctcacagtggctcacagctgtcccacatcttcacagtgcttcacagctgtcccacatcctcacagtggctcacagctgtcccacatcctcacagtggctcacagctgtcccacatcctcacagtgcttcacagctgtcccacatcctcacagtgcctcacagctgtcctacatcctcacagtgcctcacagctgtcctacatcctcacagtgcctcacagctgtcctcacccgtttagcaggggtgtcgggtgttgctgtgaaccactggtgaaggaacagtcagtctgcttgagctgtaggtgaggtcgatagagatcttcagagttaattggactgttgaactgcaccaagcattcgtaggtttcaggaacacagtgctgcagggcctcttggttttactaaagggagcttgaagcaaccaaaggttttgaactgaagaaccaaagggcctggtttggcctttaaagtcactttgcctgttttgtggagaacaggctaaaaggctagggaagacagagggacaaactgattacctgcttgcaggtgaccttatgggacagctctccctgggtgagccatggaaagctccccaccatcccagctctggatgtagctgtatcgacaggggaagtaacagcagctcagggtgtaaatgagcagtgtcttctagaagtcctgcttgcagcttttcttcctcagttagactggtgtggaaggagcactctctgactagagcagcctgtaaacctcaggagccttgtcagcagttacagggccactcctcattccgctctgctctccgccgcctcagaaagctcagggcaaggttggcggaggagaggcaagtgggtttgcagtgctctggggtgtaacagagaacgttggaattgaaatgactttagaaatctccgactagaaccttcttgatttttaggtgcagctctgcaaagatgaagtaaacagccttcctagtcattgcagtagattgctggcatagcaagggccctacatgcctcctgcttgcctctgctctcagacattcagtctgggtgtgagtgggccttggtattcatagtcccttctggtgtttacccagtagtgagtgaactccagccttgactttggcaaattccacgaatatgaagtctttacaaacagttgatggtaaggagtttgtgtttcctttgtctagggtcaagtcctccataccaaggaccaggctaaaaccagattacactgcccctccctgggccctattgacttaaagcagccactgtaatcatgggcaatatctttgggaaccttctgaagagcctaatcggcaagaaggagatgcgcatcctgatggtgggcctggatgctgccgggaagaccaccatcctctacaagctgaaactcggggagattgtcaccaccatcccgaccattggtaagggcaagctgaggggaggcaggcaaggccttcccttcccaggcaggttcatacacctctcgggcttcagagagagtgtctgtttaactttggcaggtgctggagctgccgtttgcccacctgccctggccctctgatgggggaacttccttccgcctgcagcctggcactcagcagtgccctcaggcattaggcttggtttgttctctgtgttgtttggaaagcaggtgaagggctttgatgttcctgccagaggcctggaattgctttggtttagatcttcagtagggagaacatttgctaaaaacatggggctgtgggtcctcctcctcagctggggctcctctctcaggcttcccattgcctctcactccactttttttttttgttttttgagacagggtttctctgtgtagccctggctgtcctggaactcactttgtagaccaggctggcctcgaactcagaaatctgcctgcctctgcctcctgagtgctgggattaaaggcatgcgctgcaaacccccaccccccacccccggctctcacgccacatcttagcgtagatatattttattgatcaagggacagaacagagtccttcctttgtagaatggaggaccagagtctgagtgacaggagagcggcggctcttatactatccaggcagctgtgcgccctctgatcagagatcacccttgtagacttcttcaattttccttcctaaaaaatacatacctcataatatataatagaacacacacttttaagtgtgtttatgttttgcatgtatgaatgtatgtatgtatgtatgtaccacaggcatgcatgtgtagtgaacatggaggcccagacaggccctcagacctcgtggaactggagttatggatggttgtgagccactgtgtgggtactgggacttgaaccttggcctttgggagaacaagtgctcttaaccactgagccacatctccagcccttttaagtttccttctaggctccccaggtcaaggacctcaaggtcccagtatccctttagccttctgctattggtgtcccgggtaaagctgaggagagatggcgtgagctcatcaggttattactggtagacctggtatttgaggccagtggccattgacttctttacctcccaaagggtttaatgtggagacagtggaatataagaatatcagcttcacagtctgggacgtaggtggccaggacaagattcggcccctctggagacactacttccagaacacccaaggtatgacagacagagctcctggggttgccattgctgggcttgtgcagagcatggctgttctcttagttatgggtggccatggccagcccttgccctgatgcagctcttggaagtggagaaggggaccgtgcgtctggagggtgtggtgtgggataggaaaggggacactgtcgtcgtctgtgtgtcccacgctctctctgctctccaggcttgatatttgtggttgacagcaatgatcgggagcgagtgaacgaggcccgggaagagctgatgaggatgctggcggaggatgagctccgggatgctgtgctccttgtgtttgcaaacaaacaggtgagctttccccctttttctgcatctgggagagcatcctggctgtgggagtcaaggggccttgggctcgtgggtgaaaggcctggaactactgctgacgggttggaagtgtgaggaggagacgcacttggcttcttcatgctcttctccttgttccccagcccagctgtgtcagcagcatttaagtcctcagggtcgatgtggtagcatgtctgttcaggatctttatcctccctgtactctgtgtactgtagtagagcgagccttgctcctgctgctgaatcacacacacttagaaccctgctcttccctatctaattccctggccctgcagttctggaactactgggcctggagcagttccttcagatcttgatctgggtttcctgagataacgagaaggtggccatatatgcgcctctgacagatgggtgcgctttgtagagccttgacagatgctgaggtatctctctgtgtgtgttcctttgtgctgcaggatttgccgaatgctatgaatgctgctgagatcacagacaagctggggctgcactccctgcgtcaccgcaattggtacattcaggccacctgtgctaccagcggggacgggctgtatgaaggcttggactggctggccaatcagctcaaaaacaagaagtgagagccaggcagccctctctgactaccccacccactcctgacacacacctgctgtctccttaccccaattttcccttcttcctcttgaaagtggccaaggtcctgggtatcatgtccacatgcccagcaagcgccttgccttcctcctcctcctccctcctccctcctccctcctccctccctgtacactgacacggtcagcccccaactgctgtcctgatgatgaatcattccaatttactggatttaaaacagaatgaagctgttacggtttcgtggggtggtccccattggtttcaggaggaagagtggggtgttctctgtttgctgtttggcactggttgctgtgctcttggcatctgagtcccttccctgtgtccctggccactctcctccctgtcttcctttccttctgaaccctctcctattctacatggacattgcacgggcctctctgtgtgtgcgtgcatgtgtgcgcctgtatatatgtgtatagagagatatatatgtagggtcaggggagggagcacagcgcagctcagggcttacagccgggacactgcgcactggaacctgtcccctgcccttctgtgttggtgagataaggggatgtgggtgggtcccgttgttttcctctctgcaggtggcattcctggatgttgggatacatgatgggcgccttcggccatctgtcttacctttccttctccactatgatgagcacacgaagtggcattggtctctgggtgactgttcctaaggagctgccgtgctactctgcctcattagtagcccactcacgctatcagtctagagtgttgtattgatcctcccccaccgtcctcagatctgctcctcaggaactcagagggaggtgggttagtgggacctgcatgtagaggtggacagtggtcggggaaggcctagttttccatcttactgtcataaggaggagaaggtaaggcatggagcagtcctgttcctgccttctggtctgtcagagatctttccccttagtagttctgctggcctgatgaggactgaccaagtggagtaacgagaagccatggactgggggtaacatagccgacctcagtatcaactccctgttcttcagttctctgtctagttcaggaccaggaaagatgagtttctgttgtcctcgatgtcctgtccccctccttcctggcagctttccccagtcctcaccctgtcctgaataggtctgtggggttggagtagatgccgtaggaccctgcatggctgagcctggaactgtgatcttcagggccctccctccctccatcctctgcttgttcagctgctgctgcaggtctgtagagggcgcctattccagaagatctgacctgggtcctgacttgtcactgcactgaagctgtggctgttctgtgggctcctgtgtgtgctggctgcgccctgagctccaaaacagctgcccataacctctctgctaaggtcaggaccctgggctctctgcagcttggccaagggactcttcccagaggcctgttctgagttcctccactcagtggccaggtttcttgccacctttgtctatagcaggcagataggttccccagcctaccgtcagctgagctgtgcgaggttccaggatgtctctcagtgcaagtagtgctgtgataccccagacaccatgtgagcgtgtgctctagacctggtgtgtgtgagtgtgtgtgtgtgtgtgtgtgtgtgtgtaagtgtgagtgtgtgtgagtgtgtgtgtgtgtgagtgtgtgtgtgagtgtgtgtgtgtgtgtatgtgtgtgtgtgtgtgtgtgtgtgtgtgtgtgagtgtgtgtgtgtgtgtgtgtgtgtgagtgtgtgtgtgtgttctctacatgggggtgccagggattctgttccattttaaatgggttccttccattccctgcattcctctctttactgttcctgcgtccccctctgtcgacctcactctctctgccgtttctaagcccctaccccctcctttctgttgctgctgtgagcgcctgtttgccttctccgttcactcaccactttgcctgtttggttttggttttgtcttctgtttgattttctgctctatctttgctttgagattggtgaggactttgcctcttgctctgccacactttctgaccttcctgcttagatgctagttccagataggttttgtacattgcagacatgagtccactcctgcaccccttaccagagcttatttttctccacctcctgggaccaacctgaggctgagcaggctaaagcagccttgaatgttgccttggtgcatgctgctccagacacatccagcagggagcagtagcaccttggtaacatccctggctttgtggggaggtgggggtgctttctacattccctaatccatctttagggttgggtgtttcatcccatttctgtgaactccctctcttgcttttctcaagctggttttattttttatcttgttctacctttctttctggggacttccccttccctccacctccagagtttgtggtgttacagtggtatctgcagttctgaagtgggtttttttctttttgctttctctggaatgtagactgtacatgtttaataacttgccttctctatccttgctcaaaaatgtgggataatgcaatgactgtgccctggttggaaattaaacttgttttacgcagctctggcgcagccctttgtccttgagcaacactgcggcagtagggagctgtgtggtcctttccacaccgttccttttctctgcagaggtgggaagacacacctcagcgcgtggagtcatggcggaacgcaggtttattgggactgcggttatggttccttcttccctcacaccctgaaggaagtctaaacgaatcaagtgctagcatgtgggggctctatgactgaccaactcctaaagagctctgtcctcaatttacctgtatttaccacctgttgacagactttcagggcagcggttctcaacttgtgggttgtgacccctttgagggtcacatatcagatatcctgcatatcaaacatttacatcatgattcataacagtagcaaagttacagtaagcacagggtaaacatctgggcagcatagaaaatggtaaatatctgggcagtatagttttgttttttgtttttttgggtttttttctagacagggtttctctgtatagcctcgaactcagaaatccgcctgcctctgcctcccaagtgctggaattaaaacgcgtgcgccaccacgctgactcatctgggcaggacagtaaacatggggtaaacatctgggcaggacagtaaacacggggtaaacatctgggcaggacagtaaacacggggtaaacatctggacaggacagtaaaccggatgccttcctcagcataaagcagccaggtgcacgaggctgtgtggatcctgttgccaggcagctaactcgaagggatgtcttgggtgcatctttagtaaagcttacattcccgttcctgttccattgctctggtgtctccggctgtcactgaagacaccgttccacacagaggaaaggcgtggtgccgccctcagtaagcagggaaacctctccttcccttgctgcagagcttgagtcccacatcctgccatggactgtttaatctgcactcactgcccctcctttctcccgggacaggtttccttttcctccagttaccgtcaccctctcaggaaccattgctttttgtccatttctctgacttctgaacctcaacccatcaccaaccccgtgtcttcaacattactttccctgaaagtctggctctttgcctcctcctggctcctccaggcttctcctgctaataagttaggagtatctttctctggtgctttgtttatttgttaataaatagatcactttctgagctgtattttgttgctttgttgttgttttgagataagatctcagtatagcccaagcagacttcagacttgtttgtttctgtgttttaagagagggtttctttgtgcagccctggctgtcctggagcttgattcgtagaccatggcatccttgtactcaggtccaccagtttctgcttcctgagtactgggataacggcctgagccacgtcagctgccaccacctgcttgctgacctcagacttgctactctcctctgctggattacaggtgtgtgccagcaagcgtagccttggctgtaatacagtgataatagaggccaggtgtggcagtgcatacctgtaataccagcactcaggaggcagaggcaggaagatctctgaaggcatgaggccagcctggtctgtatctatctgatgcctcatcttcctccctcaaagaaaagtaaataggagctggagagatggctcagtggttaaaatcactgactgttcttccagaggtcctgagttcaattcccagcaaccacatggtggctcacaaccatctgtaatgggatctgatgccctcttctggtgtacatgaaggcagggcactcatatacataaaataaatcatttttcaaaaattaaaaaaaaaagaaaaaaattaaacagtttagctgaatgacagtggatgagtcttgatactagaacaagttggggaagcaggtgactggttcttgcctgtctcttagttccacagattcaggggagatatggggccctctgtggctttgagggggtgtaggatagacggagtgaacctgaagatgagtttgtgtacctgatcatcggagcgaattccttcccatggcttgtaatttgacaaaggacccagatccaggtgtacacgtgagaatcatgtgggtgaggcagcttccaggatgtacctgtaggaaatgagcctctcagctccatccaggtgggggaaaggcaaaactgtccccttcacttcataaggttggctttctcatccttgaggggcagcagttgaaactgctggggacttcacctgccagttcaaacacacacgttcagtcaggacagagagggagcagacacttgccttctctgtattcagggggagctaggcatccgtctcggggtgctgtggaatctttggacatcttggtaatgactgaggaggatgccctgcccttccttcccttctggtcagtgtaaggaatgaggtccctgggcaggttatcaacactaaacaccatctttggtcactctaacccagtagctggagaggtagcataacatggtggtcactggggaatggcggaatccaaatgccttccttcctctgcaggttttccaactgattttcctgaccctgattgttggaattggtaagaatgaccctgagttccggagaaaggagcagacagttagggccaaggacgtggaaacgttgaggatggtaaagagaggacaaaatcagcaaagtagtgagggtccagaatccgaccgttgactgtcaacgctggaaagttaggtgtccgctgtgtggatatcactttggctgtcagctgtaggagagcatgggggcttcagttagagccagtgcgtattctaagctgcgtgtggatacgaacagggcactggaggtacagcttctggacacaccccgggcagttctctacacaggcctcccactaactcaactcacactccaccttcctgagagctagctggcaggcagacaaggcagaaggtgttagactaaacctttcacctacgtgcctccctcctggagtgtagcttactggtagatagatcacttggtaggaagttctgggtttgattccttggtaatgcatatacacaaagcaactatcttggtgagggccatcctaggacagagttgaatactgagacttttaagggataggtttagcttgtggctctgaaccacaggaattcactctggtttccaaatacagcaaaaagagcatactgctacagcttatagatgagatgggaagctctgtcctgtctgccacgccatgcagtggtggagtgctagcagccgcagggtttgggagcagactgcttcatttttggatgatcgagtgtctaaatcacacctaaagaggccagtctgtggggcatgggcttcatgagttcaaagttctgcattccattcatagtactagaaaaaacaacaaatgcacagtaaggccctgattcagtccccggtggcagagagggtttttggaagctgttctctttttacacctggctgtggtgtggcagtctgagaactctgctgaatcctgacacttgcaaaaggcgcagggcttttgtggatgtggttgtccacttgtgccctcctgggctgagccaggccagctttcttgtctctcagaatcacaattcaagttcctctttggttcaaccgaaaggattcctcctcgacccttactggagcagtcagtaaattgacctgggtaggttgggtcttctggtttttatttttgaggtggggtctgctggcctagaacttgctccgcagtacaggcgcctctgctgctcttctgaagttcaaggcacagcaccatgcccagcctctcggtgggctactgttggaaatagcctcaccctttccttcccaccctcttcgtgtgccttacagagcctcagagcctagacaaccacctccccatttgccaccactccggttagccacaggttctgtgctgtgtgtgagctcctgtgttcagacacggtgttcctgtggagttctctgcaaccggctcttatcttcccctccgttggcctctctctgcttttgtattaaccatgctggcccctaatctctagacagctggccctttgcttttaacccttcctttctgtgttggctaaaaaccccacattaaggaggccaggcatggtgtcttgggccgttaatcctagcacatggtaggtaaaagcaggtggatctctgtgagttcaaggctagcctggtctacagagtgagaaatgcaggattagagagaccctattaacaacaaacaaatcaaacaaacaaaaaaagaaagtccacatcaaggctggggctatagctcagttggtagagtgcttgctgagtgtggtttcattatctagcactgcattaaaaacagatgctataatgtcagtacttgggagtgaaggcaggaggatccggaattcaaggccagccttggctaacctgggaaacatgcgactatctaaaacaacacaagagagtgccacacgagacgtagctcaggcctcagctctttcacacagttcctgggtttcacaggccaacttacttaccaaggcacctttggctctgagggcgcactcacttaagtacctcacatggaggcttttaggtcagcggttcccagcctgtgcgtcaaggtccctctgggattgtttatcggataccctgcgtatcaggtacttacttgtaaccggaggaagattacagttaggaagtagcaatgaagggatttcatggttggggtcagcacagcctgaggaactgtgttacagggtcccagctttaggaatggtatgaacctgtcaatcacatcgattcagatcacatgttttgcttgtgtagccaagcagccgttgttgtcagtgctccatacaatgcacagatatgcacgaccgcatgtgttgtcccctgactcttcccatccccaccccaaacccagccatcctcagccacttggggtgcatccattgggttcctttattttttaagaggtctcaaccaggtggagtggtgtatgactttttcatttcagctctcacgaggcagaggcaggcagatttctatgagttcaagaccggcctagcctacatagcttgagttccaggccagccagagctacaaagagagagagagacctgtccctcccgcccctcccccgcccaaaagacatcagagctgaaattgctgcttggcagggtgcagtgataccctcagagtcgctacacaccaggtccatgctccctgtctcaaaatggggtgggcagagggagagaggcagggtcttgtgtgtccccaggctgacctatgaactcattgattatgtagctgaggagaccttggacttgtgatcctctcacttccacctcccacgtgctgggaagacagctgtgttcacgagcagttagtgctgtgttgtggctgcacccagggctttaggaggcatgtgaggcaagccctctactgagctcatccccggccctcagtgcagcccttgctttctgaatatatgcaccaaacgtatttggggaggggttaaaacacagtaagttcacaccacagacagtattttacttaaactgaagtttatatatctgtcttagatttttatgtgggctggtgagatggctcagcagttaagagcactgactaaagctgggcgtggtggtgcacgcctttaatcccagcactctggaggcagaggcaggcggatttctgagttcgaggccagcctggtctacaaagtgagtaccaggacagccagggctacacagagaaaccctgtcttgaaaaaccaaaaaaaaaaaagaaaaaaaaaaaaaaagagcactgactactcttctgaaggtcctgagttcaaatcccagcaaccacatggtggctcacaaccacacgtaatgagatctgactccctcttctggagtgtctgaggacagctacagtgtacttaaatataataataaataaatcttctaaaaaaagatttgcatgcagtatagttaaatatttaaatggtttctcatttgatacttcaacaatttgttcaaaataaaacatttggctggatgtggtttgaatgcttatagttccagagcgtgggagatagaagggggaggagccagttcaaggctgagctagggagctgttccacaggaggtgccggccaccaggccatactgcctgagttctattattgaactcactatatagacccagctgacctagaactcagagaaccacccccacctctacctcctgagtgctgggatgaaagacatgagccaccattacctgccaccaagttttgtttttgttttagagtttaaggcagctcggctctgaggttagcccacttgtccagtatcatgcagctagtgcctagggaactctaagcatgtcacacgttgtccttgtccagtgagccagctggctctttgcgggacacacagtaactaaacaagggaaagagtagtgagtgcttctttctattcagagggaggggaagttgctgttagctaagacagtcaggactgagaaggggggggggggtttaactctcctggagggagctgagaggtaaagggaggggcgtgaggtagaacaagccgagaacacagggcaggttggtctgactccagagcacagtgcaggagcccggaagttgactcagttcagttagcaagtattttcacacaaggcgtgaacactgaagacaaaagcaagagacacagctctatctctaagaagattttcagagccaagatcgatggggcacacctgttatcccagcacttaggaggctgaggcaggaggatcccaagttcaaaaccagcctggacttgttttaaggaaaaaaaaaaaaaaaagacttccagtttaataaatgaccaattcaggaatggagattagggctggatgacaagtttttaattgtcaaggactcaattctgtttatcagttggtatggaattatgtaagcttttagcgatatgaccgcacggagcagtatagagagtgatctgagagacgcttgggggtcaggatggagatagaactccctctctattagaaggtgtttggtggtaggtaaccctgggctagcatggtgggtctcttcttacttaggcttccatctttgtggttcaaatccaagaaggacctgcgttccctccctccttgtgatcagctgattgctagagcataactcatcttaacttctcatgtactctccgggtacaggaagggagggggcccactgctgacagtggagcatgaaacgaccggcttcctgactatgttggta

SEQ ID NO: 714 - DNA, 777 bp, Mus musculus
tcaccgcggtcgggtcggcttgcggagcgggaggcagcggccggagagccgggcggaacctgcgggggcggaggcggcggtggcagccgcggcgcagggagcaggaacagggtcaagtcctccataccaaggaccaggctaaaaccagattacactgcccctccctgggccctattgacttaaagcagccactgtaatcatgggcaatatctttgggaaccttctgaagagcctaatcggcaagaaggagatgcgcatcctgatggtgggcctggatgctgccgggaagaccaccatcctctacaagctgaaactcggggagattgtcaccaccatcccgaccattgggtttaatgtggagacagtggaatataagaatatcagcttcacagtctgggacgtaggtggccaggacaagattcggcccctctggagacactacttccagaacacccaaggcttgatatttgtggttgacagcaatgatcgggagcgagtgaacgaggcccgggaagagctgatgaggatgctggcggaggatgagctccgggatgctgtgctccttgtgtttgcaaacaaacaggatttgccgaatgctatgaatgctgctgagatcacagacaagctggggctgcactccctgcgtcaccgcaattggtacattcaggccacctgtgctaccagcggggacgggctgtatgaaggcttggactggctggccaatcagctcaaaaacaagaagtgagagccaggcagccctctctgactaccccaccc

SEQ ID NO: 715 - protein, 186 aa, Mus musculus
LKAATVIMGNIFGNLLKSLIGKKEMRILMVGLDAAGKTTILYKLKLGEIVTTIPTIGFNVETVEYKNISFTVWDVGGQDKIRPLWRHYFQNTQGLIFVVDSNDRERVNEAREELMRMLAEDELRDAVLLVFANKQDLPNAMNAAEITDKLGLHSLRHRNWYIQATCATSGDGEGLDWLANQLKNKK

SEQ ID NO: 716 - DNA, 41197 bp, Homo sapiens
  misc_feature (1)...(41197): n = A,T,C or G
agctgtggctgtggctggaagggcagtggtgagcaggatcggctgagggccaaactgctgcagctgcaggcactgtcccgaggcaagagtttcccccactctctgcccagccctggccctggctcaagccccagccctggcccccaggacacatgggaatggggtggctgtaaccatgacatggactttggagagaagttctctcgggatttcttggattccagggaagctccccgggacatccaggcacgaatgcgaatccacaacaacagggtggggcgccaggtatgtgtgtacatcttgtcctgggtctccccagcttttgaggcctggttagagtttgagaggcatagggaaatgataggataaagtgtgatgagtgactgacactcaccatcagcaagtcacccagcctcagttttgtatctgtaaagaacctaatgatacttatcttacaatgttattaagactgagctagcaggccagtgtggtggctcacgcctataatttcagcacttttggaggctgaggggggaggattgcttgaggccaggagttcaagaacagcctgagcaacgttgtgagaccccatctctatatttaaaaaaattatacatataaaaacagactgggccgggcgcggtggctcatgtctgtaatcccagcactttgggaggctgaggcaggcagatcacctgaggtcaagagttccagaccaccctggccaaggtggagaaaccccatctctattaaaagtacaaaaattaggccgggtgcagtggctcacacctgtaatcccagcactttgggaggccgaggcgggtggatcaagaggtgaggagatcgagaccatcctggctaacatgggaaaccctgtctctattaaaaacacaaaaaattacccgggcatggtggcatgtccctgtagtcccagctactggggagactgaggcaggagaatcgcttgaacctgggaggcagaggttgcagtgagcctagatcgtgccactgcactccagcctgggcgacagagcaagactccctctcaaaaaaaaaaaaaaaaagacaaaaattagccaggcgtggtggcctgcgcctgtaatcccagctactcagtaggctgaggcaggagaatcgcttgaacctgggaggcggaggttgcagtgagccgagatggcaccactgcactccagcctgggcgacaagagcaaggctccgtctcaaaaaacaaaaacaaacaaaaaaacagactgagctagcaaatagtatacccagcatagtgcctcatcgttggctgactgcatagtagctcttattacagctaccttccctacagaatttaggcatgctgtgggccagactcccaattttataagtgcttacaatggaaagagcactggattgggagtcaggacaacttgagttgagtcttggctctattactagctgttgatggaagatggacaaatcacactgctctgtcttcaattctgccatcataaaatgaggaagttggctattagctaactgcaatgtcctttctgttctgatataccatgttattcttgcctccatttgtccctccctgtgttctctgttcccttccctctcctgtgcctctgtgttctgtccatttgctgccctctgcttcacctcttttccccctgatgctctaggtggtaactgaaaacctgaagcggaaatgcaagtgtcatggcacatcaggcagctgccagttcaagacatgctggagggcggccccagagttccgggcagtgggggcggcgttgagggagcggctgggccgggccatcttcattgatacccacaaccgcaattctggagccttccagccccgtctgcgtccccgtcgcctctcaggagagctggtctactttgagaagtctcctgacttctgtgagcgagaccccactatgggctccccagggacaaggggccgggcctgcaacaagaccagccgcctgttggatggctgtggcagcctgtgctgtggccgtgggcacaacgtgctccggcagacacgagttgagcgctgccattgccgcttccactggtgctgctatgtgctgtgtgatgagtgcaaggttacagagtgggtgaatgtgtgtaagtgagggtcagccttaccttggggctggggaagaggactgtgtgagaggggcgccttttcagccctttgctctgatttccttccaaggtcactcttggtccctggaagcttaaagtatctacctggaaacagctttaggggtggtgggggtcaggtggactctgggatgtgtagccttctccccaacaattggagggtcttgaggggaagctgccacccctcttctgctccttagacacctgaatggactaagatgaaatgcactgtattgctcctcccacttctcaactccagagcccctttaaccctgattcatactccttttggctggggagtccctatagtttcaccactcctctcccttgagggataaccccaggcactgtttggagccataagatctgtatctagaaagagatcacccactcctatgtactatccccaaactcctttactgcagcctgggctccctcttgtgggataatgggagacagtggtagagaggtttttcttgggaaagagacagagtgctgaggggcactctcccctgaatcctcagagagttgtctgtccaggcccttagggaagttgtctccttccattcagatgttaatggggaccctccaaaggaaggggttttcccatgactcttggagcctctttttccttcttcagcaggaagggtgggaagggataatttatcatactgagacttgttcttggttcctgtttgaaactaaaataaattaagttactggactggtggatgcagatggtgatgtatgtacccacacttgggatcccagtccatagcttcttttctaggtgaattctcctaccttcctacactcagtgactttatgtatatcctgctgagttccgcaaaggatttgaaatgaatctcagtgactttgttggcaacttttcctttgtaaaaccaggaaggactcctaggtgggaagggctagagttccagatgtaggccctattgactctctatgcgcctcaactccagatttcaccttgatcactgccttagaacaagggctggcaatttttttgttttttttcggtaaagggctggatagtaaatacattacacttgtggtctttgtcccaactattcaactctgccacaactactcaactctgctgttatagatcaacagcagccatagaccacacataaacgaatgagcgtggccgtgtccagtaaaacttcattcacagaaatgggctgcaagaccaaatttggtcccctagctgcagtgtgttgaccctcattctagaccacgaggttgcctttgttctggagtttttcagtcctaaatgtatctcaacactgaatttggacccaaaagaacaggtacttttttctctggttccaaaggagtgaacttgggatatagatgcaagactgatgggaaacgtataaaagagattcatatgcttgaaatgggagtttttccctctggaaactagcaaaaccagcatgttctctcatggaattatttgcatgttttttgtccttatttatttgattgagacagggtctcactttgtcacccaggctggagtacaatggtgagatcttggctcattgcaacctcctcctcctgggttcaaaccatccttgtgccttagtctcccgagtagctgggattacaggtatgcattaccatatctggctaagttttgtatttttagtagagatgggttttcgccatgttggttggccaggctggtctcgaactccttgcctcaagtgatccacacgccttggtctcccaaagtgctgggattacaggcgtgagccactgtgcctggcttatttattattattattttttgagacaggatctcgctctgttgccttggctggagtgcagtgacatgatcttggctcactgcaaactccacttcttgggctcaagtctgggtccaagagtagctgggactacagacacatgccaccacacctggctaatttttgtgtgtgtgtgtatttttttgtagagatagggtttcaccatgttgcccaggctggtctagaactcctgaccttaagcgatatgcctgtctaagcctcccatgaccttcctcatttagagctcttttgtatgtcatcttagtaaaataattcctttatcttttaagagataacatcaactcaacagaacaggatttatttttatttatttatttttgagatggagtttcactcttgttgcccaggctggagtgcaatggcgtgatcttggctcactgcaacctccacctctctgattcaagcgattgtcctgcctcagcctcccaagtagctgggactacaggtgcgtgccaccacgcctggctaatttttgtatttttagtagagatggggtttcaccannnnnnnnnnnnnnnnnnnnnnnnnnnnnnnnnnnnnnnnnnnnnnnnnnnnnnnnnnnnnnnnnnnnnnnnnnnnnnnnnnnnnnnnnnnnnnnnnnnnnnnnnnnnnnnnnnnnnnnnnnnnnnnnnnnnnnnnnnnnnnnnnnnnnnnnnnnnnnnnnnnnnnnnnnnnnnnnnnnnnnnnnnnnnnnnnnnnnnnnnnnnnnnnnnnnnnnnnnnnnnnnnnnnnnnnnnnnnnnnnnnnnnnnnnnnnnnnnnnnnnnnnnnnnnnnnnnnnnnnnnnnnnnnnnnnnnnnnnnnnnnnnnnnnntgagactcccgttctcaataaatacatacatacatacatacgtaaactgttttcttcctttcttcctttctttttctttctttatttcctttctttctttctctttctttctttcttcctttcctttccttcttctttcttttctttcttttttttttttttttcatacaatgtcttgctctgtcttccaggctgagtgcaatggctcaatcttggctcaatgcaacttctgcctcccaggttcaagcgattctcctgcctcagcctcccaagtagctgggattacaggtgctggccaccacacccagctaatttttgtattttttatagagatagggtttcgccatgttggccaggctggtcttgaactcctgacctcaggtaatccatccgccttggcctcccaaagtgctgggattacaggcatcagccaccaagcctggcctaagctgttatctttctaagattcaatgcagacaaggaatatgcatcacacatttagaacttcacaaatgactgcacacttatgcagctgccagatgctgactctaacagattatttctttggccagagaatgtagaaatagttctctccacttctctagacaatagacacttctgctaccctcaaaatcagatgaaatgagagtagtaccaaggtagtgaggacattttgaggagtattaggttagggcagtacttttttttgttttttgagacagggtcttagggtttctgtcacccaggctggagtgcagtagcgtgatctcggcttactgcaacctccacctcctgggctcaaccgatcgtcctgcctcaacctcttgagtagctgggaatacaggtgtgcaccaccaggcccggataatttttgtatttttagtagagatggggtttcgctatgtcgtccaggctggtcttgaactcctggactcaagctatctgccctcctctgcctcctaaagtgctacggttacaggcatgagccactgtgcctggccataggacagttttgtttgtttgttttttgtcttatttttaagagacagagtcttgctatgctgcccaggctggtctcaagctcttggacccaagcaattctcttgccttggtctcccaaagtattgggattacaggtgtgagccactgtgttcagccagtactttttttttttttttttaatttagagtcagtgtcttgctctgtcactcaggctggagtgcagtggcaagatcactgcagccctgaactccttgactcaagtgaacttccagccccagcctctcagagtgttgggatttacaggtttgagtcaccacactgggctctagggcagaactttgtggccaaattttatgtcctggatttccacttgagcattgagaattctgggtttggaaatttgatggagacaggagaaatcccatccttacttcaggcacttactgaacctagtgtatgtggaaggaagaggggatgcacttagaatgggcataggatataagagaataatgataaagaatatttataatcagaacttctcacactcaggacgaggaaggagaatctctaacagagtcacagcatgattatttcagctttttcctgtttccttcctctgtactttgggtccctctttcctttctagcgttccctcttccttcatcagacacactgtgtggcaaacttaagccccaaaccacaaccttgacaaattccaaatggattttgtcagcaaggccaacacaccccttcgccactccctatccctgctcctagcacatgcactggggtcagcgacagggttggagtatgcaacccacagagctggtggctacaatttcagcttttactaggctccaatggcagccagagggagggagaaaggctgatgaactgtaagacgggcctcttgtccctcttcagctccagatgagttctactcctgctggcctttaccaagtggctgggaagttagggaggggcagtggccagctaattgccagctgggcagcactcctcctatctctgctcctgtttgctccatgggcagcgcactctgatgctgcaacagacgttttcttcttcagactccagacaggtgaaggacagaagcgctgggagattctctagtcccattaatcagtcctgactgacataccatggtacctgctgcttactacattagactgtcaccatttccatctttctattgcactggggataaaaccttgagaagatctgaagcactgggcaggaatatcaacaggttccacctccttgtctgagttccacaggcatgtgcacgtggtaagggcactagggaggttttataaatcatagttttggtggacagcatggtgggataacctggtggagtgttactagaaatttctagagaaataaatgaaagagtaatcacatggaaatatcaaaaaacccactctaggagtaataatactggaggaagatccttttgtagttcataagcataatgactgggtgcttacacacatgtgagatgtgccaccctcaaaccttgttacattggcacactatccatttgacatgaacaacaacaacaaaatactggaggtgtcttttgtccttaaaaacacagagctgggctaggcacggtggctcatgcctgtaatcccaacactttgggacgcctagatgggaggactgcttgagctcaagagtttggcctgggcaacatggcaaaaccctgtctctacaaatagcataaaaattagctgggtgactgggcatggtggctcacgcctgtaatcccagcactttgggaggctgaggcaggtggatcacctgaggtcaggagttcaagaccagcctgaccaacacagtgaaaccctgtctctactaaaaatataaaaattagccgggcgtggtggcacatgcctataatcccagctacttgggaggctaagacaggagagtcacccgaacacaggaggcagaggttgcagtgagcggagattgtgccattgcactccagcctgggcaacaagagcgaaactgtctcaaaaaaaaaaaaaaaaattagccaggcatggtggcgtgcacctgtagtcccagctacttgggaggctgaggtggtaaggatcacttgagcccaggaggttgaggctgcagtgagccgattgcgccactacacgtcgtactcagcaacacagcaagacccagtttctttttttttctttcttctttttttttttttgagacggagttttgctttatcgccccggcttgaattcaattgcccgatttcgggttcattgttggttcaaattccgggtttaaggcattttccttgattaaccttagggattatttgggcttttaggcccttgcaccaaggcttgctaaattttttgaatttttgttagagacgggtttccccgtgttagccaggatgttctcgatctcttgacctcgtgattcgtgatccgcttgcttgggctcccccaaagtgctaggattacaggcttgagccaccgctcccggccaagatccagtttcaaaaacagaaaaaaaaaaaaaagcaagaaacaaacaaacaaaaccaccaacaaaaacacacccgacagaactacccagcacagtggcacatgtctataatcccagctactcatgaggctgagacaggaggacacaagaacccaggaattcaagactgaagtgtgctatgatcgctcctgtgaatannnnnnnnnnnnnnnnnnnnnnnnnnnnnnnnnnnnnnnnnnnnnnnnnnnnnnnnnnnnnnnnnnnnnnnnnnnnnnnnnnnnnnnnnnnnnnnnnnnnnnnnnnnnnnnnnnnnnnnnnnnnnnnnnnnnnnnnnnnnnnnnnnnnnnnnnnnnnnnnnnnnnnnnnnnnnnnnnnnnnnnnnnnnnnnnnnnnnnnnnnnnnnnnnnnnnnnnnnnnnnnnnnnnnnnnnnnnnnnnnnnnnnnnnnnnnnnnnnnnnnnnnnnnnnnnnnnnnnnnnnnnnnnnnnnnnnnnnnnnnnnnnnnnnnnnnnnnnnnnnnnnnnnnnnnnnnnnnnnnnnnnnnnnnnnnnnnnnnnnnnnnnnnnnnnnnnnnnnnnnnnnnnnnnnnnnnnnnnnnnnnnnnnnnncttagggaagagccatgtgttcattcccttatactgctgtaaatgaggagagagggcacttagagaaccttctattggccgggcacggtggctcacgcctgtaatcccagctactcaggaggctgaggcaggagaatcgcttgaacccgggaggcagaggttgcagtgagccaagatggtgccattgcactccagcctgggcgacagagtgagactcttgtctcaaaaaaaaaaaaaaaaaaaaaggaaccttctgttcttagcattactagtgcccttctatcacagctatttttgtttcaaggcagttctgcatgtctagaccaggtgcaaaacggagtgtgagggaagtaggagtgggtaggaagcaagaaatatgggtgcaaagtccttcacctttccttgggatactaaaatccctactcatctaggcacacttcctcaaaccacacttctgaatattaggtttccactctccgtctttcaagttccaacttaactggctcagagtccagctgttttcctttagcctcttaagttcatcactctccttcctcttccttatgggaaaggatctcttgattcagaccccacagtaatctagtctcaggaatagtgagcaacaacaatggtgcggtgagggctttcaggggatggcagctagcccagattaagaaataaagatgaagtctggctgggtaaggcatgccacagcaacgactgttcacccatatcccgatgctggctttgcccaaggagcccctgggcccctcagcccagcccgtctcctacgcagccaacttgccgcctcagtccttaaattccaggcacaaccctggagcttgggattgtcacctcagtcctcactgtctcatccccattcacggctcccgcctccgccgcccacagcccccacacctgcccccgccctgactccagctccagcgcccggctgccggtgctgcagccgctgccatggtgatgggtctcgcgagaactgccgctagctaccgcgcagctctcgcgcgatcggggaggtgggaagtatcccgggctgggggtgggggtacgccgcacagctccagtcgccgtcgcggcttccggtgctaggtggagggaaggaaggagggagccggggagtgggccagggcagcagccgggctgaagtcggcttggggagccagagggagcggagcggaacctgcggggcagaggcggcggccgcagcggcgcagctgatagcaggaacaggtgagaggctgggaagggaaggcgggtcccggtagagaagaggctcggtcagggtgagggctgaggagatagagcgcctcccgggccccgcccggcactgcttggcgtggggcggtgggattcttcccacccgagagctcagagagggtgcgtcgggccagcttcacgcctgcccccgcatttgaaggacgcagagctggggtgggggtggggggcgcacacggatttgtcctccgcctcgctcaagggggcgacctgggctgcagttaggttgtcgcctgcaggaggtgtgctgttgagggagaggaaaaccgtccgaggagaggtgatgagggggcggtgatggctgtttgtatcttttctgttaaagggctagggaatgctgctttcttctactccctctccctcccccaccttagcaataggagacgggagagaagccttgctgtggttacaccccctcccccatcatagggcaggggtgcgtaggggggttgggggttagccaacagggcaggctgctggggcaccacatgggcgctattgtggtagaggttgcgctttcgagtctagggaaccgcaggttgggaagagggcagcaagtggggagagggtggagaggaggcaggagaaggaggagggggatctgatcttcctgggaggagagaggtggggccttcctccccaggcggagcgggggcggtctcacaggaggagggagcatcttgtcactggccctcagtttgtgtcttccaatccgctttctttctttaggaagtaccaggattcccggaacagaaaatggagccattgcttacgcgaatcgtttgagggaaggggcgggagttggggaggtggagttccctgttaaaacgggccacttgattagcaaagtggtagctgttattttgggggaattcccgtcttgattgcattaaggcgggtctccatctttccaggccaggaggaatgtggtggtggaggtggaggattgtggtatgtggtcaggagtgagaagaaatagtaaggccgtcccggtgagggagaaatgtaacctaaaacctgtctctgctgttgttggattgggtcacccctggtctatggcatgaaagttttattgggaggagatctgctgcaagagtctgattgcttgggtcagtgcaacaggacagaatctagtcgctgcatacctccttccctgtcctcaatcaggtaggtagtaacagtctttgctgccattttgtcttgggcttgttgttggggtaggtgtttccacttgccgtgacttgggacatgggacagtgttatgggacagtggattatcatagcccattggacttgagtttgaaaaacatgtctgtaaaagttcattctaagaaagaaactaatccattaaggttcagcttttcaccgaatgaatgattgaccttggattcagccaggaaaggctcccatgtatcacatattcacatgcgtcctgtttcccagcatagaattattaccttgcatagttagaatttttatagttgtctatcttgcttttccaaagagactagacgcttttcgactgcaggaactggatttcgtctcctcttccacaatgcccatgcaaacagtaggtacccatgatgaatttagaatgtaaatagatagaactcaacaagctttctaactgtagtttaaggaaagggcaagagatggcttggctgtcagcagaagtgcctggaaatagcttagcaagggtacaaagacccttagcctttgtaattaagaagtttttgtgtctctgccttcctaagaggcacagaataggcatagataatggaaacttaagacccaaaaagaaaaatattactagaacacagagtcattatctgcagtcccagatttcctgcttccccattgtgggcaaaggggtctctccatcagacctaagtctttcaaagtgttatatatgaattgggatcctggagagtttggaggagggaccaatatatgtatatgtgtggtgtcaggtacagaattggtaccagtgaatggtagctgctattattatactgaatgcaagtataaaggagagcagactggaaagagtggaagtgagtgaaatactaagtgcacaaagagtcatattgtagtgtgtgttcaccctactcttttacactagagtcataataagaggaagtggactcaggatagagggtgggatttattggttagaaggaggaacttctttaaaaccaggttggttaaagttgagtatgtaactgaaggaaattgtagaatctgcttccctatatacctttatttttatccacccaggctggagggcagtggtgtgatcataactcactgcagcctcgagctggcctcaagccatcctgtacttcagcttctcaagtagctgggaccacatgcgtgtgccaccatgcccagcgaatttttttttttactttttgtagagatctcactgtgttgctagggctggtctcaaactcctggctccaatatatcctcccaccttggcctcccaaagtgctgagattacaggcatgaaccaccatgcctgaactctcctcaccatttttgttgaggtaaatttagaggcagaatggtatagtaattaagagtggatcttggaatcagacaaaattagattcaaatcctgcttctgctaattaccagttgcatgtttcttgtaaaattgcttgtcttctctctttattttcttcatctgtaaagaaggtaatgacatatggttttcaagagaattattatttttttggttgtcagtagaattaaatgagataaatgtaaagcacctggtattgtacaaagcatatagtaagtaccaaataactgttagctgctattaataatccattatcataatcctaataatatgaacactcagggctgccttagaggaaaagaggtttacagaagaacaacttgctgcctgaggtgcttgtgtagagggatgattgttaccatgagtttctgtgctggtcgtaggcttatgagcagcgaaatcttttttcagcttcagcatcagcatcgcagagacagctcctgctgcctgagtgggaggtgaagctggagcaaggcaggggccctgaaccatcaatttggatgtagggtgaagatatgggggcacaagaatagtattcatattagaaaagtcagtgtgactctgagataatggttcactcttccagaaaagagcaccctgatgacctaggtcagggatttagattcctagatgcccttattttaggtctcagtcagtatatggggatcttcatttagtccactcttttcatttagtccaatcttaataaaaaatgtctgcttttgagtatctgtttcagaatatcatggcctagaaattgtgatatctgtagaattatctgtctaccgtaccttcttcacttgaacatctgttgcaaatatagatagagtgctaataaaactatttgataatgaaaagacatgaggagcgtttggaaagggtcccacagatgtttgaaggtttcatattatagtctggtaaagaactgactaaagtagggatttcatgaatgtgttagagctttaccatggacttatgcaaaggatctgccacaccatgtggaccagaaaggaaatggctcagaatgttagagatccaccattattaccatattcctgaagaaagttgagatgactgggtgtggcaggtctcttggtaccttttagttctcccattactgctgaaagcctggcataatccttcctttattagcttatgcacaggagtgtcaagcgtgaatgcttaaacttcagcatgagcttaagatgtaggagagcatttgctctctgttgcaatggtttatgtcctttttttaaaaaaaaaatagtcaaaccttaaataaaattttatttgaattctaatacataaaatggacaaaagtggagttactctctactggtggtggaaaatgggggtggggtataattacagcccctcacatgatctctcctctcttcaagcagaacctgtgggctctgaggacatggaaaccatttcttcagtttgtcagatacagggaaaaggatcagagaccacctatagaatacagtcttcttcaaccccacaagtgttttgccaccctcagtagaaccgttctcaacacgcctgtcagtcactagctataggtcagtcattggtgctggatgctggagacgtgaaatatgaataaggcatagtctgtgctggcaaagagctcacagtctagtgaggtactttccagcctttttctcatcatggtatacacaaaaaatggtaatagtgagacttgaaatctgagatggctggcccaagggctgtagccaccccaagccctgcccagccatccagtggctgataggatcagtatctccagctgacctgtaatgcactagaggcacattgggcagttgcagctctggaaagcaaaacagacaaacgtgaatactgcagcaagtcctagagtagaagtgtgtttgggatgccgagggatcgcaggtaactcttattccctaagtaggcagttctctgttcctctgtgtccttaggctgctctgtataatggttggccttgtccacatcatgtcttcctgtttaagcagtttactgtcagctccatcttgacttgcacaatgggaccagattaggggcagaagattattaggagtctaggctattgatggactttcagtgattttgtgattaggaatttatagtgttctggatatccaagactgtagaggtgggcattggattggtacagccatagaatatcaggagctgtagtggttgtaagctggtcagattctaagaacaaggcaagctgtaatttttgggcagagggcagtaccacagaatgttccaaagaaacaaatgagtctagtttttatcttgtcactgttttatctgactaggattctaaaacagaccttgtcatcttttctgactcacttgctaagggttgtctgtggtaaaagccagacccttcccaggcgttttgggtctccatcagacagggcggttcgggatccttcttcacttcacagctgtggcgtccttcaggtttgcgtgtcctggagtcttttccaggattgttctttgcctagatgggaagctggcataacaattctggcctgagcctaaacaccactaattgagctaataggaacttatttagttaggtacgttttagtttacaccaaaactctagctttggatcctccctcttttcttttgtatgttctatccccattggtgtctatgatgtcttgctctcttgatttcccttctgcctctctggttgcttcttattctttcctggcctgcttttctgcccgctattttatttatttatttatttattttaattagtttttttttttgagacggagtttcgctcttgttgcccagcctggagtgcaatggcacgatcttggctcacagcagcctccacctcgcaggttcaaaccattctcctgcctcagcttatggagtagctgggattacaggcgtgcgccaccacgcctggctaatttagtacttttagtagagacagggtttctccatgttggttaggctggtctcgaactcccgatctcaggtgacccgcccgccttggccttccaatgtgctgggattataggcatgagccaccgcgcccggcctatttattatttatttatttatttatttatttttgtgatggagttgcgttcttgtcaccgaggctggagtgcaatggtgcaatctcagctcgctgcaaccttcgtccaccacctggcttcaagcagtcctccagtcttgcctcctgagtagccgggattacaggaatgccccaccatgcccagctaattttgtatttttagtagagatggggtctcaccatgttggccaggctggtctcaaacccctgacctcaggtgatccgcccaccttggcctcccaaagtgctgggattatagctatgagccaccgcgcctggctcccactactttaaatgttgaaatgtcaggcaggtttctgcctttgcccttttcttctatcccactgtgtacactatccctagatatatcagttaggatgtattagttgcaaaaatagaaaacacacgtgtctaaaacgctgagaggatttattaaatcatatagcaagacatctagtagaaaggcagacataggccgggtgcagtggctcacgcctgtaatcccagcactttgagaggctgaggcaggtggatcacttgaggtcaggagttcgagaccagcctgaccaacatggtgagaccctgtctctactaaatacaaaaaattagccgggcgtggtggcaggtgcctgtaatcgcccagctacttgagaggctgaggcaggagaatcggttgaacccaggagatggaggttgcagtgagccgagattgcgccattgcactctagcctgggcaacaagagcaaaaactccgtctcaaaaaaaaaaacaaaaaggcagacacagaagaacacatattgtacaattttacttctatgaagtacctagagtaacaaattcatagagacaggagaatggtggttgccaggggctggagggacagggggattggggatcctctgtttaacaggtacagtttcagtttgggaagattaaaaagttgaggtgatgaatagttgtgatagttacactacagtgtgaatgtacttaacgctactgaattgtatacttaaaaaaatggttagaatggtaaattttgtgtatattttactatgatttaaaaaaaaagaagccagtcgggtacagtggctcatgcctgtaatcccagaactttgggaggccgaggtgggcggatcacttgagcccaggagtttgagactagcctgggcaacatggcgaaacttcagttaaacaaaaattagccaggcgtggtggtgcatgcctgtagtcccagctactccagaggctgaagtgggaggattgctcgagcctgggaggtggaggctgcagtgagccactatcacgccactgcactccagcttgggtgacagagcaagacccatctcagaaaacgaaagatgccaggcgtggtggtgcatgcctatagtcccagttactcaggattgcgtgagcccaagaatttgaggctgtagcgcaccatgagggcacctgtgaatagccattgtatttcatcgtgggcaacatagtgggaccccatctctaaaaaagaaaaagtttagtttaccagcttgatactgtaattaaggacccaactgagtttttcccatttttctgctctgacatcctggagtttttaatgtctgtctccctctctttatagtctccagattattctagcttctcatccttctacatcatcaacatccaaaggctggacaagagaacattgccataggtccttttctaagattgaggggccaggcacaatggctcatgcctgtcatctcagtactttgggaggctgaggtgggaggactgcttgaggtcaggagttcgagaccagcctgggtaacatagcaagaccttgtctctacaaaaaaactttaaaaattagccaggcatggtgatgcacacctgtagttctagctacttgggaggttgaggtgggaggatctcttgagcccaggagatggaggctgcagtgagccatgatcatgccactgcactctagtctgagtggtagagtgagactctgtttctaaaaacaacagtaataataaaaacaaacatgttcaggccaggtgcagtggctcatgcctgtaatcccagcactttgggaggccgaggtgggtggatcatgaggtcaagagatcgagaccattctggccaacatggtgaaaccccgtctctactaaaaatacaaaaaattagctgggtgtagtggcgggcgcctgtagtcccagctactcgggaggctgaggcaggagaatggtgtgaacccgggaggcagagcttgcagtgagccgagatcgcgccactgcactgcagcccgggcgacagagcgagactctgtctcagacaacaacaacaacaaacaaacaaacatacatattcaccttcagatctgttcctcttgtattttctttctgaagaaatgccacccggccctaggccagaaacctgggaatcatctttgattattctactcttctgcgtacatttaagcactcattaaatcctgtggattctaccattttgatgtttcaaatctgtcctcttctctctatctccacttgtagttgacaacttgcgatttctcacctgtattactatacctcctaagcagtgtctgtgcctccagtctttcccctttctaatttactcctgaaacttctaaagcacatacctgatcacgttactcagcatggcctttaaagcccttcatgatccagtccctgcttatctctccagccccatccctcatcattttctttctttcttttttttttgagaccgagtctcactctgtcacctaagctggagtgcagtgatgtgatcttggctcactgcaacccctgcttcctgggttcaagcaattctcctgcctcagcaccctgagtagctgggattgcaggcccacaccatcacacccggctaatttttctatttttagtagagacggggttttaccatgttggccaggctgatcttgatcttctgaccttgtgatccgcccacctcggcctcccaaagtgctgggattacaggcgtgagctaccacaccttgcctgtactcttcactttaggaggctgagactggaggatcgtttgaagtcagaagttcgagaccaacctggtcaacaaagtgagactctatctctaccaaaaataaaaataaaaaagttagctgcgtcacgatgatttgggcccgtaggtctttttagctactggggaagctgaggcagtaggattgcttgagcccaggatttggatgctgcagtgagcctgggtgacagagtgagacctcatctctttaaaaaaaaaaaaaaagatcatataaatttttttaaagtgctatctgaaacttaggtctttttttctttttctttttttttgagacatattctctcactctgtcacctgggctggagtgcagtggcgtgatcatggctcactgcagccacaacttcctgggctcaggtgattctcttgtctcagcctcctgagtagttgggactacaggcgtgcaccaccacacccagcttttttttttttttttgtagcgatgggcttttgccatgttgcccaggctggccttgaactcctggcctcaggcaatcttgcatcagcctcccaaagtgctgggattacaggtgtgtcctgctgtgcctgnnnnnnnnnnnnnnnnnnnnnnnnnnnnnnnnnnnnnnnnnnnnnnnnnnnnnnnnnnnnnnnnnnnnnnnnnnnnnnnnnnnnnnnnnnnnnnnnnnnnnnnnnnnnnnnnnnnnnnnnnnnnnnnnnnnnnnnnnnnnnnnnnnnnnnnnnnnnnnnnnnnnnnnnnnnnnnnnnnnnnnnnnnnnnnnnnnnnnnnnnnnnnnnnnnnnnnnnnnnnnnnnnnnnnnnnnnnnnnnnnnnnnnnnnnnnnnnnnnnnnnnnnnnnnnnnnnnnnnnnnnnnnnnnnnnnnnnnnnnnnnnnnnnnnnnnnnnnnnnnnnnnnnnnnnnnnnnnnnnnnnnnnnnnnnnnnnnnnnnnnnnnnnnnnnnnnnnnnnnnnnnnnnnnnnnnnnnnnnnnnnnnnnnnnnnnnnnnnnnnnnnnnnnnnnnnnnnnnnnnnnnnnnnnnnnnnnnnnnnnnnnnnnnnnnnnnnnnnnnnnnnnnnnnnnnnnnnnnnnnnnnnnnnnnnnnnnnnnnnnnnnnnnnnnnnnnnnnnnnnnnnnnnnnnnnnnnnnnnnnnnnnnnnnnnnnnnnnnnnnnnnnnnnnnnnnnnnnnnnnnnnnnnnnnnnnnnnnnnnnnnnnnnnnnnnnnnnnnnnnnnnnnnnnnnnnnnnnnnnnnnnnnnnnnnnnnnnnnnnnnnnnnnnnnnnnnnnnnnnnnnnnnnnnnnnnnnnnnnnnnnnnnnnnnnnnnnnnnnnnnnnnnnncatctcttagtgatatttcaatttgaaaattatctaagaacaaagctgtttttactgcactctgcctggcagcagagggtttgggagaccctggtcttccttcccctggacgctgaagaggaggaggtagtgccagatcaggagtcccctcagaggtgtctcatagcacattcttggatcattcactggaatcaggtagagggagtatgtgtggccgactgggatgtgtgactctcaaaagcacctggagattgaggcaggcacgttcctgcaacatatgtaaggaaagatggctgagtagccagttacagcaacagcctgcttctcctggggggatgaggtgggagcagtgagttgtcctcaagtgaggatatccttagatgaggcttaaatcaactgatgtgcttaactgaattcctacagtgtcccacacagattgtactagagcacatatttgggttcctattgttatttttacctgtgataataaagtttctgactgtaaaacagaacctgcagatatctttttaacagagatgttagtatattccatttttcatcttgagccactcactttcagtcttaactgcttattcttggtatccaacagccaatggaaccctggcattttgccctataaacacaggagtaccatctgtggtgaaagagagtaactataggctatataatacatggagaaacaattcatggtttgtttgctttgccattctgcttcctagtgcttttttaggaatgtattgtgaaagtgagaataggctgtatagccagagatttgtattcatggcacaaagcagaaagctgctaccatcttggtggtagggcagcatgctctctggtattagcaagggacagggaaaaccaagacaagaaagccagcatcccctttgaaatgctcatttaagtcaagctccagattatacttaaagaaaagtcatggccagacgtggtgggtcgtgcctgtaatcccagcacttcaggaggccaaggcaggtggattgcttgaggccaggagtttgagaccagcctggccagcatggcaaaaccccgtctctactaaaaatataaaaattagcaaggcatggtggcacatgcctgtaatcccagctactcgggaggctgaggcacaagaatcacttgaacttgggaggcagaagttgcagtgagcaacctctgcctctgcactccagcctgggtgacagagcgagactgtctcaaaaaaaataaataaataaagaggaggagtcataacatccattagtttcaaggtcctgggctgtgccagggagatacatgatagctactggatatttattttttgagatggagtctcagtgttacacaggctggagtgcagtggcgtgatctcggctcactgcaacctctgcttcctgggttcaagcgattctcctgcctgagcctctggagtagctggtgctacaagcatgtaccaccacgcccagctaatttttttttttgagacagagtcttgctgttgtctgcccgggctggagtgtgatggcatgatatcgactcgctgcaacctccacctcccaggttccagcaattctcctgcctcagcctcccgagtagccaccacacccggctaatttttttgtatttttagcagagacagggtttcactgtattagccaggatggtctcgatctcctgacctcgtgttccgcccgccttggcctcccagagtgctgggattacaggtgtgagccaccgcacccggccaatttttgggtttttaatagagacggggtttcaccatgttggccaggctggtctcgaactcctgacctcaggtgatccacccacctcagcctcccaaagtgctgggattacaggcgtgagccactgtgcccggcctttttttttttttttttttttaagacagagtcttcctctgtcaaccaggctggagtgccagcggcatgatctcagctcactgtaacctctgcctcctggattccagcggttctcctgcctcggcttcctgagtacaggcgcgcaccaccatgcccagctaatttttatatttttaatagagatggggcttcaccatgttggccaggctggtgtcaaactcccagcctcaggtgatacgcccacctcagcctcccaaagtgctgggattacaggcatgagccaccatgcctggccagctatttagatattttatcagttattcatcagtcccactgtatattaaatggcaagagagaatcccaccaattctagtcttctagtccttttatgttgttcccaaaccagtcctgcgtcaaatatgtgtggaaaatggctgagaatggacaggatagctaagcaactcgctgtgcattacacagagataccaaatcctactggacagaagaaataatataaggacatcctcagatgaggcttaaatcagccaatgtgcttaattgaactcccacaatctacttggcactagagggaggacagattcaaaataagtagacatagtctttgcacatagggaatacacagcttaacgtgggaagcagtaaatacacagacttataaaagaagaaaaactccacaaggtagtaagtgccacattgagtggttaaggtcattcaaagtaaggccttgatgtggcatgccaggaaataataggtgtaacactgggatcagcttttgaaccaggacttcagcatgacagccgagcaaagaagcaaatcaaaggacagtgtacctgtgttctggggcaaggcatattggctagttatatctttttcagccaccactatactcacagttggtaagcatttaatcagcaatagtttcagtcataaaggacagcaagataaatgtgtggcataaatttaattcagaatctgggccaaagcctgataccaaacctttaaagcaaagtgtcatctggagctgaaggaaaggctgcctgagcaagaggcagaataaaggctagaagactaggaagacttgggaaaggtttaaatttcatgaggtgttagtagtatgaccaaaagtcactactacaaattgccaaggttggtgagagctgttcttagctgggtaggtcgctcaggggtcctcaggagtctgtccacctgggtgggttgaggcaggaagagtagggaggaaggctagcgggtggcttgactgaagttgaaccctaaggttgagctagcccttcttcctggtgtgtgaaccctctaggtcaggggtagggctcatctggggaacctactgagagtgccacgcctggctcattagtggctgtctggggaggccttttgaagatgaaacacttcataagcactcattgtttctgttttttcggacaaactagtactttggtcttcagggactgttgatctggctcagttgcactagtctggaatttgctgcaaactgagaagggtggtgggggaaatgtcagaagtttttgtaaaaacaaccaaactcccaccaaacccccatgcgttagcttgtaaataggattcctccccgtccacctttcacattcttgggtttgggcgcactttgtcttgacctgtccctttggctgctgagtttggggtgtgtgtgtgtctctggttcccagactctagagaatgccagcagctggcatatggtgattgctgaataagctgcccgctgacacatgcctcctgcaggcacagagaactggtttgtatgggtgattctgaatcctcattttattattgtttcaaagatgcatttctgtggctatcctgtgccatagagaagagagggaagaagaaagggaatgaatgaatgaatctgattctgtctgttggggcaatggctggggtgagcagatagacattttataccttcataatgattcttttggtcctgttcatcctttcagcaggtatttgttgttgttattactattattattattattttgagatggattctcgccctgtcacccaggctggagcgcagtggcgtgatctcggctcactgcaacctccaccttccaggttcaagcgattctcctgcctcaacgttccgagtagctgggactacaggagtgtgccaccatgcccggctagtttttgtatttttagtagagatggggttttaccatgttggctaggctgttctcaaactcctgacctcaggtgatccacccgcctgggcctcccaaagtgctgggattacaggcgtgagccactgcgctcggcctcagcaggtatttgttatgtgcctaccatatgccaggcatagcatccagtctgagtgagctttcagtaaagtcagtagagaccctggggattagttcagtttttgaagtactgtgtgctaggcactattcttggtactggagacagagcagtgaacaaaacacataaggagctgatatcttaggcagaataaaacaatcagcaagaaataaatatataatgtatcagatggtgataaatgttgtgaagaaaagtaaagtgggataaatggggtagggagtggtgtgtgtctgtgtgtgtgtgttatacatgtggttgtgggaggcctctttggtaggtgacattgaaacagacaactaactgaaggaggtgaaggagtaatctatgatggttatctggaagagaagcattccaggcagaggtgatagcaaatatgaaagctttgggccaggcatggtggctcatgcttgtaatcccagtgccctgggaggctaaggcaggaggattgcttgaacccaggagtttgggaccagcctgggcaacacggtaagacctcgcctctttaaaaaaaaaaaaaaaaagctttgaggcaggaaaggaaagtgttggggaattggagtggagtaagcaaagagagagtagtagatctcatgagagaagtaggggagtgtaggtcttgtaggaccttgtaagccatggtttgggccttgggttttactgaaaaggagctatgaagccacgagtgggttttgaacaaaggactcatatgacctgagtttggttttaaaaccaccctagatgctatatggagaataggccgaaaggcttagggaagaagcagagaaccaatgagatgactgcctcattgcagcgaccatgtgggacagccccctccttggatgggccacagtaagccaaggatgcacctagctgaggagtaaaggggtagccccgccataccccacctctctactgccagtgcactgttgtttgaacagggcacaacattagcagctggcattccacagagtgtaaaggatcggcttcttttaagagtgcggctttcttattcctcctttattttggtgtggaagaaagatggagttgcaaaaatataggaagggaagaggcagagtctcttgattaaaggagaaagcataaaccttgggaaactggcaagcctgaaccttgtcaggagtcacagagagccactccttattccgctccctcctctcccacccttgccagaagtctcagggtaagtaaggttaggggagggaggggcattaatgatcttacaatgcctttgggtatagggtagaatgtcagaactgaagggacttcagaaatcatctagttcaatcccccttccatttacaggtgcagatatggaaaagtgaagtaacttgcccagagtcacatggttagattactggcagagcagggatccttagtgtttactgctttgtctctgttcccaaagactcagtatgtatctgagtgggccttggtatttatagtcccctcaggctctccgtttgtcatgaatgaactctagccatgaccttgggaaattctatttacttggaagtcctgacaagcaaatgatggtatgattttacatttcctttgtctaggatcaagtcttccataccagggaccaggccaaaaccagactgccactgcccctacttgggccccactgtccccagaaagcagctgctgtgatcatgggcaatatctttggaaaccttctcaagagcctgattgggaagaaggagatgcgcatcctgatggtgggcctggatgccgcaggaaagaccaccatcctatacaagctgaaactgggggagatcgtcaccaccatccctaccattggtaagagcacagcttggatgtgggctttcacgccggcagctgaggcagggcagggacctattcctggttccccaacctggcctcttctccccaggcaagtccatacaatttgtggggttcagaaaagagggcggtgttgtttagcttactaccaggtgctgaggctgctgtttgcccacctaacctggctctccctgatgcgggaacttccatggcctggcactcaacagctgccctcaggcacggagttggtttcttctctgtgttgtttggaaagcaggtaaaaggctttgatgttcctgccaaaggcttggaattacttgggtttagatctttggtggccaatcttggttacagtttgctgaagggaggtctccctacatttgctatgtagatgggggctccagtcagcattgtcagctggctctgcctttggggctccaggatgccagcttacttccctttcttcactctgcctctcaggccccacatcttagctgaggccgactctggtagccaaagtaccagagcagggctgagtcattttgtaggagggagcaccaaagactgagtggaaaagtcaggaaagttggcccacgttacccaggcaactgtgaacctctcaaccaacttcctcatcctctttgacttctcttaggttttcattttggccttcaggctgctaggttaacgattatcaggtctgaggaagccttagcttttgttccattgttggtgttatggccaccactgggggaaagcagaaccaaactcattgtggtggtgtttgcggggctagtgtttgaggccaagtggccattgcctgttttttttccaaagggttcaatgtggagacagtggagtataagaacatcagctttacagtgtgggatgtgggtggccaggacaagattcgacccctctggagacactacttccagaacacccaaggtatgctcaggcctagcgtgggttggttgggtatgagcagagagtgtggctgtctttgttaatgggtggccaactgttaccctgctgcagctcctgggggcagaagaaagggaggaaagggagcaaatatttggagggtgtcaggcaggtgtggtcttttggttggggggagggggttacctgtcatcttagtgcagcccatgctctgccttcctagggttgatatttgtggtcgacagcaatgatcgggagcgagtaaatgaggcccgggaagagctgatgagaatgctggcggaggacgagctccgggatgctgtactccttgtctttgcaaacaaacaggtgagacttcttcccacccctgaatttgggagacagcaaactggctgtggaaattgttggctcttgggcctattatatggttaacccttttagtatgctctcaatgttagaagcgtgggaaactgagcacttggcttctttatgcccctcttcttgtgccccaccccaagctttatttagcaacatttcagtcctcaggaattgtctcaaatctttctttcatcttgcctgttatctactttaggagaattggcctcactcctgctgtcagacagacctgattctttggtcagtctgaatcacgtctcttgcttccccaccatcctcgtatttggtttccaattcttcagtacagtgacctctagtgctttggatcttgagttctaggtgactaaatccaaagtagctccttaggatcttgttctgggtttcctaaaataaaggaggaggggaaggtgctggtacacatttctttggtagatgggtgttctagaagcctttaaaaaatcctgaggcttctttttatgtgtctcccacgtgctccaggatctgcctaatgctatgaacgctgctgagatcacagacaagctgggcctgcattcccttcgtcaccgtaactggtacattcaggccacctgtgccaccagcggggacgggctgtacgaaggcctggactggctggccaatcagctcaaaaacaagaagtgaaagccagacagccctaacaaagcaccccacccacccctgacatacctactgtcaccctgccccagtcctaccccttcctctccatgcaagtgtggccagggccctgggtatcatgtccacatgcccagcaagagccttgcctcccctgcctcccctcctttttcctgtccacctatatgaccaatccctaattgctgtcctgatgatgagtcattccaatttactggatttaaaacaaaaagttgttacggtttcatggggtggcccctctctctctcaccctctgggtttcgggaggtcgagtggggtattctctttgtttggcagtggttgctgtcctcttggcatctgagtcctttccctgtccccacaagcccttctactccctgtttgcctttcctttgccaccctctccctgttttacatggaaattgcacgggcctctctgtgtttgcgtgcatgtgtgcgcctgtatatacatgtatagagagatatatttgtgggggccggggggagcggggagggggtggagtgaagctcagggcttgcagccaggacactgcccactggagcctgtcatctgccccttccgtgttggtgagattaagggaagaaggtgggagggcattagtcaagccggactgccccagtctttgactggttaccctcctctctgcaggtaggtttttctggatgataggacagatgatggattcttcaccaccattttccttgtactcttctctccacccttcttagggctggaggatggcatttatctctagatgactgttcccaaggagatgccactctgctctgccttactgttgggaaggagagaggaacccactcactcttatcagcttagagtgttcaactgatccttccccaccatcttcagatctgttcctctggagcttgactggggggtggggatggcaagtccatggtgtgtgttagggacccagggcattgggggaagggaggcgaaggcctgaggttttccatcttcattctcttttgttattaggagaaggtgaggcatgggccaatcccattcctgccttccagtgccccaccacccttctgatcttaggggttggatgggtcatctgtccttggtcagaattttctcaccctagtactcctactggcctgaccagggctgactgggtattctaatgaggagctgggaagtggggtgacatagctgaccttagtatcaacccccctcttctccaactcttgttttctagtccaggatatgctaaaggacgaagattttctattgtttccaggccctcagaccatccttgctgtcccttcaccctccatgcccctgccatcctcactcacttctcataaatggatctgggggttagagtggaggaaataaaatcctgaagtggttgtcagtgcttgtgggatgcagtggtcttcaggattctccccgcattattatgtagttgttcagaagctgttgctactgcgtctctctgtctgcagggggcacttgttcctgaggtcctcgcctgggtcctgacttctgtagtttctgtgaagacgtggctgtcctgtgggctcctgtgtgtgctggctgcgccctgagctccgagacagctgcccataacctgctaaggtcagggcccagggccccccacagcatggctgagggaccccttcccagtagggctgtcccaagccccactccatggggccaggtttcctggccacttttgttgatagcagatggatcaatattagtaaccccatccaagattgaactgtgaaagagaggttccaggggtatctccctcagtgccagttacttagtgatgtgttacccaggatgcagcaggtgtgtgcaggtatcttgctctctaggcctgtgtgtgtgtgtgagtgtgtgtgtatatgggtgtgggtgtgtttgtgtgtggtggttgtggggggggtgttggaggttctatttcatttaaaaatgtattcatttccctggccccacagatgcttccctccatactttttatttgctctgtttcctcagatttattttgtcttgccccattgcctctccttccttgaactctttccttttcaatctcaactcattcactgctgttgctcatttgcccttttccatgtattttttcctacttaggattttccactctatctttgtggttcatgaggactttgcctcttctcctgcctcattccctgactttctctagttagatgtcagtcctaaataggttttcctcacttcaggcctcacccctcaccttgtttttttgggggctccagggaccaatctggggctggaaatgttaggaggttgccttggtgctgccccagatctgtccagcagggggcagtaagtgatcttggtagtatccctggctgctaagcccttggcaggggtggtcctttctacattcccattcacttaacagctcttttgggattgggtgtttcattccatttctgcccactccctctcctctcctctctggtaggtttaattttatgctttccctgattccagctttctgcttcctgaggactcccgctccccccaccccaaagtttgtctgtggtgttatagtggtaactgcagttcctcctctggaatgtagactgtatatgtttaataactcaccttctctatccttgctcaaaatgtgggataacgcgatgactgtgaccctggttggaaattaaacttgttttatgcagctttggagccgaccttcatctttgctgtgcagcagccgtgggacagtagtttcatggtgaggggagtcctgtttctggtccctctctccatagtgctccttctttcagcaaaggggtaaaaggcacacttgattgatagagagtaaggttatggaggaacttagtgccactccacactggttatttcttcccatcataccccgcggcgggggagcccaaatgaattgggcatcagagtgtgagggcttcgtgactttcctcctctagttctaaagggtttaaacctgaaatcagctgtatttctcacctgttggtagactgtatggacttcactggctgaagggccctgaacttggagggccccatgtgcctctactctcagatctcctcagccttgcacatgaggtgcttctagtttgaacagagaccccctcactagtctagttctggactttggcagtgaataaacatgaaggataaacgtctgggcagtgtaatgaccttaatccttcttacaactgatggccctgcatcagctctacttcaggcgtgtggtttttcattgtcaggatgccaagcctcatccagagatcccacaaatgtcttgaggaatagaccttttccataaagcctccatcctcccatcgcactcccaccactattctgttcctcccctgctaccagtgtctggctccaggcaaagaaagggatggtgctacctttagggtgggtgaggtctgggtgagccaggcaagccttccccaatcttaatattttcttaagctttgaggacagaggtcttcccagcctgcttttgtgggaaagggataggatttaggcatataataagtttgagagccccaagtaccagtgtgaagcatataatttatattcagttacttccctgctgcctcccctgccaattttccttttcagcacttctattattaataggccatcaccctcaaggaccagtgcttccacccatatataactctcaaactactccaaccagacatgtcttatcaatcccaatgactttgaacattacccacctactcctcaagatcagatgacactttcctccttccaggcttctccaaagttctgcttggtgacagggtgctgataagagtatctttcccaagtgttttctttcttcttcttcttttttttttttttttttttgagacggaatttggtcttgttgcccaggctggagggcaatggcacgatatcggctcaccacagcctctcctcctgggctcccgggttcaagcaattctcctgcttcagcctcctgaggagctgggattacaggcatgcgccaccacacccggctaattttgtatttttagtagagatgggtttctccatgttagtgagactggtcttgaactcctgacctcaggtgatctgcccacctcagcctcccaaagtgctaggattacaggcgtgagccaccacgcccggccaggtgttttatttctatattagcaaatagatatctttcagagctacaacctctcataatgataagggagaggactttagctgaatggtgggccactggggggtctttggacccctgaacaacttggggaagaggatgacctattcccatctgtcccttagtactcaatttagaatgccaggaaggaagtagaggggagccctcttgtggcagttgctgaagccttccagttcttttgaggggataggggatgaagaggagactgaacctgggaggtagatacttagcacccagctcttaggacaaacagcaatcccatcttccagaacatgcatagcatcagtcatggactggcggaagacttggacccagggtccacttcaggataatctgggcaagggagcttcccaaatgagcctgtagaaagccagtggaagggcttaggttggctaaggtgggatggagggcaaaaccctccccttcattgcagagtataggggcagtggcagagaatgaatgtatgtgtgggtttctcagccttgaggtataaggtctaaaggctctggggattcactgcatacaccacttccagttcaagcgcctaggttggttacagcaggaagttgacaagtatgtatttagtacattcgatgtttttaggcatctgctaaaagtaggtcaaaccactgaactcagggagggggctggggatccatttctaggatgctgtggaatccttttgggacatctgtagtataccacgttgggtagtgagagttgggggacaccccttccattgctgctgcttagtgtagggagtcatgtctttgggcagcagtaatattattaagaaaagctttttttttttttgagacacagtctctgtcacccaggccggaatgcagtggcgtgatctcggctcactgtaacctctgcctcccaggttcaagcgattcttgtgcctcagccttttccgagttgctgggattatgagtgcacaccacaactccctgctaatttttttttttttttttgagacggagtctcactcttgcccaagctggagtgcaatggcgtgatctcggctcactgcaacctctgcctctcaggttcaagcaattctcctgcctcagcctccgagtagctgggactacaggtatgtgccaccatgcccagctgatttttctatttttagtagagatggggtttcaccatgttggccaggctggtcttgaacttgtgacctcaagtgattcgcccaccttggcctcccaaagcactgggattacaggcatgagccaccgtgcctggcagaaaagcttcttttccagttctgaagagtgtgaaggtaggagagccagaattcagttctctcactttccaacccagtacctggagagagagtgtcttgctggtcactggggagtgataggatccggatgcccgccttcctcttcaagtttttctttctgattgggtttcctgaccctgattgctggtatgggtaagaatgactctgaattcctgagaaaagggaagagggttaggacagaggaaatggaatcatttagtcaggtaaagggagcaaagccaccgaaggcagtggttggaggtgtagatgtgaggaagttgggttgagaccattcaccatcaaggcttgaagatgagtgtctgtttgtgtgtgtcatgttggctgtgagttgcagaagagagtatctggcctctagttgaggagcacttccggcttctgagctgaacatggtgtagaagagaggatactcaatccaaaaccctggctatctatgcagagggctgaccagttctacccatgtacccttccttccctcacccttcctcacaaaccaggcatattgagagctgtctggcagtcaatccaggcgaggcagcaggtttgagaatgggcttgtccgcctggcacctgcttccccccacttccaccttcacccctccatcccatatatcgttcagggtcctcccagcacagaattgaatagaaggacttttaaggcttggagggcttggcttggggctctaacccacaggaattctttctgagttctgaatatagtaataaagggcactcttggccttaggttatagataggagatggggaatctgttcttgtctttgccaaatcttgcatttatgggatgatacctctttgattagaacagccataggggaagagtggaggaagtaagtaagtgcttcattcttggatgaatatatgcataaacatacctgaaagaaaacatctagtcagctgggggtatgtatacccttgaaaatacaacaccaggccaggcatggtggctcaattctataacctcaacactttgggaggcttaggtgggaggatagcttgagcccaggagtttgagatcaacctgggcaacatggtgaggcccctctgctataagaaaaaaaaaaaaaaaaaaaaaacagattgttattnnnnnnnnnnnnnnnnnnnnnnnnnnnnnnnnnnnnnnnnnnnnnnnnnnnnnnnnnnnnnnnnnnnnnnnnnnnnnnnnnnnnnnnnnnnnnnnnnnnnnnnnnnnnnnnnnnnnnnnnnnnnnnnnnnnnnnnnnnnnnnnnnnnnnnnnnnnnnnnnnnnnnnnnnnnnnnnnnnnnnnnnnnnnnnnnnnnnnnnnnnnnnnnnnnnnnnnnnnnnnnnnnnnnnnnnnnnnnnnnnnnnnnnnnnnnnnnnnnnnnnnnnnnnnnnnnnnnnnnnnnnnnnnnnnnnnnnnnnnnnnnnnnnnnnnnnnnnnnnnnnnnnnnnnnnnnnnnnnnnnnnnnnnnnnnnnnnnnnnnnnnnnnnnnnnnnnnnnnnnnnnnnnnnnnnnnnnnnnnnnnnnnnnnnnnnnnnnnnnnnnnnnnnnnnnnnnnnnnnnnnnnnnnnnnnnnnnnnnnnnnnnnnnnnnnnnnnnnnnnnnnnnnnnnnnnnnnnnnnnnnnnnnnnnnnnnnnnnnnnnnnnnnnnnnnnnnnnnnnnnnnnnnnnnnnnnnnnnnnnnnnnnnnnnnnnnnnnnnnnnnnnnnnnnnnnnnnnnnnnnnnnnnnnnnnnnnnnnnnnnnnnnnnnnnnnnnnnnnnnnnnnnnnnnnnnnnnnnnnnnnnnnnnnnnnnnnnnnnnnnnnnnnnnnnnnnnnnnnnnnnnnnnnnnnnnnnnnnnnnnnnnnnnnnnnnnnnnnnnnnnnnnnnnnnnnnnnnnnnnnnnnnnnnnnnnnnnnnnnnnnnnnnnnnnnnnnnnnnnnnnnnnnnnnnnnnnnnnnnnnnnnnnnnnnnnnnnnnnnnnnnnnnnnnnnnnnnnnnnnnnnnnnnnnnnnnnnnnnnnnnnnnnnnnnnnnnnnnnnnnnnnnnnnnnnnnnnnnnnnnnnnnnnnnnnnnnnnnnnnnnnnnnnnnnnnnnnnnnnnnnnnnnnnnnnnnnnnnnnnnnnnnnnnnnnnnnnnnnnnnnnnnnnnnnnnnnnnnnnnnnnnnnnnnnnnnnnnnnnnnnnnnnnnnnnnnnnnnnnnnnnnnnnnnnnnnnnnnnnnnnnnnnnnnnnnnnnnnnnnnnnnnnnnnnnnnnnnnnnnnnnnnnnnnnnnnnnnnnnnnnnnnnnnnnnnnnnnnnnnnnnnnnnnnnnnnnnnnnnnnnnnnnnnnnnnnnnnnnnnnnnnnnnnnnnnnnnnnnnnnnnnnnnnnnnnnnnnnnnnnnnnnnnnnnnnnnnnnnnnnnnnnnnnnnnnnnnnnnnnnnnnnnnnnnnnnnnnnnnnnnnnnnnnnnnnnnnnnnnnnnnnnnnnnnnnnnnnnnnnnnnnnnnnnnnnnnnnnnnnnnnnnnnnnnnnnnnnnnnnnnnnnnnnnnnnnnnnnnnnnnnnnnnnnnnnnnnnnnnnnnnnnnnnnnnnnnnnnnnnnnnnnnnnnnnnnnnnnnnnnnnnnnnnnnnnnnnnnnnnnnnnnnnnnnnnnnnnnnnnnnnnnnnnnnnnnnnnnnnnnnnnnnnnnnnnnnnnnnnnnnnnnnnnnnnnnnnnnnnnnnnnnnnnnnnnnnnnnnnnnnnnnnnnnnnnnnnnnnnnnnnnnnnnnnnnnnnnnnnnnnnnnnnnnnnnnnnnnnnnnnnnnnnnnnnnnnnnnnnnnnnnnnnnnnnnnnnnnnnnnnnnnnnnnnnnnnnnnnnnnnnnnnnnnnnnnnnnnnnnnnnnnnnnnnnnnnnnnnnnnnnnnnnnnnnnnnnnnnnnnnnnnnnnnnnnnnnnnnnnnnnnnnnnnnnnnnnnnnnnnnnnnnnnnnnnnnnnnnnnnnnnnnnnnnnnnnnnnnnnnnnnnnnnnnnnnnnnnnnnnnnnnnnnnnnnnnnnnnnnnnnnnnnnnnnnnnnnnnnnnnnnnnnnnnnnnnnnnnnnnnnnnnnnnnnnnnnnnnnnnnnnnnnnnnnnnnnnnnnnnnnnnnnnnnnnnnnnnnnnnnnnnnnnnnnnnnnnnnnnnnnnnnnnnnnnnnnnnnnnnnnnnnnnnnnnnnnnnnnnnnnnnnnnnnnnnnnnnnnnnnnnnnnnnnnnnnnnnnnnnnnnnnnnnnnnnnnnnnnnnnnnnnnnnnnnnnnnnnnnnnnnnnnnnnnnnnnnnnnnnnnnnnnnnnnnnnnnnnnnnnnnnnnnnnnnnnnnnnnnnnnnnnnnnnnnnnnnnnnnnnnnnnnnnnnnnnnnnnnnnnnnnnnnnnnnnnnnnnnnnnnnnnnnnnnnnnnnnnnnnnnnnnnnnnnnnnnnnnnnnnnnnnnnnnnnnnnnnnnnnnnnnnnnnnnnnnnnnnnnnnnnnnnnnnnnnnnnnnnnnnnnnnnnnnnnnnnnnnnnnnnnnnnnnnnnnnnnnnnnnnnnnnnnnnnnnnnnnnnnnnnnnnnnnnnnnnnnnnnnnnnnnnnnnnnnnnnnnnnnnnnnnnnnnnnnnnnnnnnnnnnnnnnnnnnnnnnnnnnnnnnnnnnnnnnnnnnnnnnnnnnnnnnnnnnnnnnnnnnnnnnnnnnnnnnnnnnnnnnnnnnnnnnnnnnnnnnnnnnnnnnnnnnnnnnnnnnnnnnnnnnnnnnnnnnnnnnnnnnnnnnnnnnnnnnnnnnnnnnnnnnnnnnnnnnnnnnnnnnnnnnnnnnnnnnnnnnnnnnnnnnnnnnnnnnnnnnnnnnnnnnnnnnnnnnnnnnnnnnnnnnnnnnnnnnnnnnnnnnnnnnnnnnnnnnnnnnnnnnnnnnnnnnnnnnnnnnnnnnnnnnnnnnnnnnnnnnnnnnnnnnnnnnnnnnnnnnnnnnnnnnnnnnnnnnnnnnnnnnnnnnnnnnnnnnnnnnnnnnnnnnnnnnnnnnnnnnnnnnnnnnnnnnnnnnnnnnnnnnnnnnnnnnnnnnnnnnnnnnnnnnnnnnnnnnnnnnnnnnnnnnnnnnnnnnnnnnnnnnnnnnnnnnnnnnnnnnnnnnnnnnnnnnnnnnnnnnnnnnnnnnnnnnnnnnnnnnnnnnnnnnnnnnnnnnnnnnnnnnnnnnnnnnnnnnnnnnnnnnnnnnnnnnnnnnnnnnnnnnnnnnnnnnnnnnnnnnnnnnnnnnnnnnnnnnnnnnnnnnnnnnnnnnnnnnnnnnnnnnnnnnnnnnnnnnnnnnnnnnnnnnnnnnnnnnnnnnnnnnnnnnnnnnnnnnnnnnnnnnnnnnnnnnnnnnnnnnnnnnnnnnnnnnnnnnnnnnnnnnnnnnnnnnnnnnnnnnnnnnnnnnnnnnnnnnnnnnnnnnnnnnnnnnnnnnnnnnnnnnnnnnnnnnnnnnnnnnnnnnnnnnnnnnnnnnnnnnnnnnnnnnnnnnnnnnnnnnnnntttgggaggccgaggcaggtggatcttgaggtcaggagatcgagaccatcctggctaacagtgaaaccccgtctccactaaaaaaaaaaaaaatacaaaaagttagctgggcgtgatggcgggcgcctgtagtcccagctacttgggaggctgaggcaggagaatggcgtgaacccgggaggcggagcttgcagtgagccgagattgcaccactgcactacagcctgggcaacagagtcagactctgtctcaaaaaaaaaaaaaaaaaaaaaagatagaagtttatttctgcctcagttaaaaggtgtctgggggccgtgcatggtggcttacacctgtgatcccagcactttgggaggctgaggcaggcagatcacttgaggtcaggagttcaacaccggcctggccgacatggtgaaaccccatctttactaaaaatacaaaattagcctggtgtggtggcacacacctgtagtcccagctactctggaggctgaaacaggagaattgcctgaacctgggaggtggaggctgcagtgagccaagatcacagcattacactccagcctgggcaagacagagtgagactttgtctcaaataaatagacaaataataaatacacaaaaattagccagatatgctcgcttgaactcaggaggcggaggttgcagtgagccgagatcataccactgcactccagcctaggcaacagagcgagactcggtcaaaagaaaaaaaaaaaggtgagctgggcgtggtgactgatgcctgtaatcccagcactttaagaagccgaagggggcagatcacttgactccaggagttcgagaccagtctgggcaatatggcgaaaccccatctctacaaaaaatttaaaaattagccgggtgtggtggcatgcctctgtggtcccagctacttgggaggctgaggcaggaaaatcacttgagcccaggaggcagaggttgcagtgagccaagattacacaactatactccagcctggatgacagagacccccatctcaaaaaaaaaaaaaaaaaaaaaaaggtatctggcagctggtctgaagataggcatctcaattgttcacggccagttacagattgaactactctttcccccttctcactactgcacttgactagtcttttttttttcccccacaaagaatggggcttcagatagaactgaaaaataaaagtgtctggtggtaggcaatccagagctggcatggtggctctgcaattaacaaggacttatgcttctttttgcttcaccatcctagcgtgcagcttccatcctcatggtcatctcatggtctaatatggcttctagagcttaattcatctcatctgcattccagatagcagacagaaggaaggaaagatgattagggggagagagagcagcacagaaggacgctttctagttaactctttaaagggccttcttggaagtccaggacaatacttccaacacttctgtttatgttctcttggccagaacttagtcaactggccatatccagctttaagggagacttggagttttgtggtttttttgtttaacttaaaaaatatcttgatacgtaattcgcaaacagtgaaatgcacagattgtaagtatacagtttgataagttctgacaaatgcatacacccatgtaacccacatccttctgaaaatatagagcatttcatcacccctagaaattccctcctgctgaggggactttttttttttaaacaatacaaatgagagataatgaaggcttcttatcctgaggtgggagggttgtagctatgggaatggaagggaagagctggagagactttggaaggagaatccagagtagacccgttggatgtgggagatgagagaagaacgaatgctggtagcagagccactaacagaaacaggagatagggaggaagtctaggttgttgcaggtggattggaagaatgagtacagttaagactgttggctgggcgcattggctcacgcctgtaatcccagcacttcgggatgctgaggctggcggatcacgaggtcagcagtttgagagcagtctggccaacatggcgaaaccccatctctactaaaaatacaaaaattagccaggcgtggtggtgggtgcctataatcccagctactcgggaggctgagagaaaagaatcgcttgaacccgggaggtggaggttgcagtgagccaagatcgtgccattgcactccagcctgggcgacaagagtgaaactccgtctcaacaaacaacaacaacaaaaacttttaaaaagtgggctgggcgtggtggctcatacctgtaatcccagcactttggaaggccgaggtgggtggatcacttgaggttgggaattcgagaccagcctgacagacatggagaaaccctgtctttactaaaaattcaaaatcagctgggcatggtggcgcatgcctgtagtcccagctactcgggagcagaggttgcggtgagccaagatcgcgccattgcactccagcctgggcaacaggagcaaaactcctccccctcaaaaaaaaaaaaaaaaaaaagaaatctggtggctcacgcctgtaatcctagcactttgagagaccgaggcaggcggatcacctgacatcaggagtttgagaccagcctggccaacatggtgaaaccccttatctactaaaaatacaaaaattagccggg

SEQ ID NO: 717 - DNA, 3595 bp, Homo sapiens
ggaggtgggaagtatcccgggctgggggtgggggtacgccgcacagctccagtcgccgtcgcggcttccggtgctaggtggagggaaggaaggagggagccggggagtgggccagggcagcagccgggctgaagtcggcttggggagccagagggagcggagcggaacctgcggggcagaggcggcggccgcagcggcgcagctgatagcaggaacaggatcaagtcttccataccagggaccaggccaaaaccagactgccactgcccctacttgggccccactgtccccagaaagcagctgctgtgatcatgggcaatatctttggaaaccttctcaagagcctgattgggaagaaggagatgcgcatcctgatggtgggcctggatgccgcaggaaagaccaccatcctatacaagctgaaactgggggagatcgtcaccaccatccctaccattgggttcaatgtggagacagtggagtataagaacatcagctttacagtgtgggatgtgggtggccaggacaagattcgacccctctggagacactacttccagaacacccaagggttgatatttgtggtcgacagcaatgatcgggagcgagtaaatgaggcccgggaagagctgatgagaatgctggcggaggacgagctccgggatgctgtactccttgtctttgcaaacaaacaggatctgcctaatgctatgaacgctgctgagatcacagacaagctgggcctgcattcccttcgtcaccgtaactggtacattcaggccacctgtgccaccagcggggacgggctgtacgaaggcctggactggctggccaatcagctcaaaaacaagaagtgaaagccagacagccctaacaaagcaccccacccacccctgacatacctactgtcaccctgccccagtcctaccccttcctctccatgcaagtgtggccagggccctgggtatcatgtccacatgcccagcaagagccttgcctcccctgcctcccctcctttttcctgtccacctatatgaccaatccctaattgctgtcctgatgatgagtcattccaatttactggatttaaaacaaaaagttgttacggtttcatggggtggcccctctctctctcaccctctgggtttcgggaggtcgagtggggtattctctttgtttggcagtggttgctgtcctcttggcatctgagtcctttccctgtccccacaagcccttctactccctgtttgcctttcctttgccaccctctccctgttttacatggaaattgcacgggcctctctgtgtttgcgtgcatgtgtgcgcctgtatatacatgtatagagagatatatttgtgggggccggggggagcggggagggggtggagtgaagctcagggcttgcagccaggacactgcccactggagcctgtcatctgccccttccgtgttggtgagattaagggaagaaggtgggagggcattagtcaagccggactgccccagtctttgactggttaccctcctctctgcaggtaggtttttctggatgataggacagatgatggattcttcaccaccattttccttgtactcttctctccacccttcttagggctggaggatggcatttatctctagatgactgttcccaaggagatgccactctgctctgccttactgttgggaaggagagaggaacccactcactcttatcagcttagagtgttcaactgatccttccccaccatcttcagatctgttcctctggagcttgactggggggtggggatggcaagtccatggtgtgtgttagggacccagggcattgggggaagggaggcgaaggcctgaggttttccatcttcattctcttttgttattaggagaaggtgaggcatgggccaatcccattcctgccttccagtgccccaccacccttctgatcttaggggttggatgggtcatctgtccttggtcagaattttctcaccctagtactcctactggcctgaccagggctgactgggtattctaatgaggagctgggaagtggggtgacatagctgaccttagtatcaacccccctcttctccaactcttgttttctagtccaggatatgctaaaggacgaagattttctattgtttccaggccctcagaccatccttgctgtcccttcaccctccatgcccctgccatcctcactcacttctcataaatggatctgggggttagagtggaggaaataaaatcctgaagtggttgtcagtgcttgtgggatgcagtggtcttcaggattctccccgcattattatgtagttgttcagaagctgttgctactgcgtctctctgtctgcagggggcacttgttcctgaggtcctcgcctgggtcctgacttctgtagtttctgtgaagacgtggctgtcctgtgggctcctgtgtgtgctggctgcgccctgagctccgagacagctgcccataacctgctaaggtcagggcccagggccccccacagcatggctgagggaccccttcccagtagggctgtcccaagccccactccatggggccaggtttcctggccacttttgttgatagcagatggatcaatattagtaaccccatccaagattgaactgtgaaagagaggttccaggggtatctccctcagtgccagttacttagtgatgtgttacccaggatgcagcaggtgtgtgcaggtatcttgctctctaggcctgtgtgtgtgtgtgagtgtgtgtgtatatgggtgtgggtgtgtttgtgtgtggtggttgtggggggggtgttggaggttctatttcatttaaaaatgtattcatttccctggccccacagatgcttccctccatactttttatttgctctgtttcctcagatttattttgtcttgccccattgcctctccttccttgaactctttccttttcaatctcaactcattcactgctgttgctcatttgcccttttccatgtattttttcctacttaggattttccactctatctttgtggttcatgaggactttgcctcttctcctgcctcattccctgactttctctagttagatgtcagtcctaaataggttttcctcacttcaggcctcacccctcaccttgtttttttgggggctccagggaccaatctggggctggaaatgttaggaggttgccttggtgctgccccagatctgtccagcagggggcagtaagtgatcttggtagtatccctggctgctaagcccttggcaggggtggtcctttctacattcccattcacttaacagctcttttgggattgggtgtttcattccatttctgcccactccctctcctctcctctctggtaggtttaattttatgctttccctgattccagctttctgcttcctgaggactcccgctccccccaccccaaagtttgtctgtggtgttatagtggtaactgcagttcctcctctggaatgtagactgtatatgtttaataactcaccttctctatccttgctcaaaatgtgggataacgcgatgactgtgaccctggttggaaattaaacttgttttatgca

SEQ ID NO: 718 - protein, 179 aa, Homo sapiens
MGNIFGNLLKSLIGKKEMRILMVGLDAAGKTTILYKLKLGEIVTTIPTIGFNVETVEYKNISFTVWDVGGQDKIRPLWRHYFQNTQGLIFVVDSNDRERVNEAREELMRMLAEDELRDAVLLVFANKQDLPNAMNAAEITDKLGLHSLRHRNWYIQATCATSGDGEGLDWLANQLKNKK

SEQ ID NO: 719 - DNA, 838 bp, Homo sapiens
ggaggtgggaagtatcccgggctgggggtgggggtacgccgcacagctccagtcgccgtcgcggcttccggtgctaggtggagggaaggaaggagggagccggggagtgggccagggcagcagccgggctgaagtcggcttggggagccagagggagcggagcggaacctgcggggcagaggcggcggccgcagcggcgcagctgatagcaggaacaggatcaagtcttccataccagggaccaggccaaaaccagactgccactgcccctacttgggccccactgtccccagaaagcagctgctgtgatcatgggcaatatctttggaaaccttctcaagagcctgattgggaagaaggagatgcgcatcctgatggtgggcctggatgccgcaggaaagaccaccatcctatacaagctgaaactgggggagatcgtcaccaccatccctaccattgggttcaatgtggagacatggttgctgtcctcttggcatctgagtcctttccctgtccccacaagcccttctactccctgtttgcctttcctttgccaccctctccctgttttacatggaaattgcacgggcctctctgtgtttgcgtgcatgtgtgcgcctgtatatacatgtatagagagatatatttgtgggggccggggggagcggggagggggtggagtgaagctcagggcttgcagccaggacactgcccactggagcctgtcatctgccccttccgtgttggtgagattaagggaagaaggtgggagggcattagtcaagccggactgccccagtctttgactggttaccctcctctctgcaggtaggttttt

SEQ ID NO: 720 - protein, 164 aa, Homo sapiens
MGNIFGNLLKSLIGKKEMRILMVGLDAAGKTTILYKLKLGEIVTTIPTIGFNVETWLLSSWHLSPFPVPTSPSTPCLPFLCHPLPVLHGNCTGLSVFACMCAPVYTCIERYICGGRGERGGGGVKLRACSQDTAHWSLSSAPSVLVRLREEGGRALVKPDCPSL

SEQ ID NO: 721 - DNA, 3648 bp, Homo sapiens
tgagggctgaggagatagagcgcctcccgggccccgcccggcactgcttggcgtggggcggtgggattcttcccacccgagagctcagagagggtgcgtcgggccagcttcacgcctgcccccgcatttgaaggacgcagagctggggtgggggtggggggcgcacacggatttgtcctccgcctcgctcaagggggcgacctgggctgcagttaggttgtcgcctgcaggaggtgtgctgttgagggagaggaaaaccgtccgaggagaggatcaagtcttccataccagggaccaggccaaaaccagactgccactgcccctacttgggccccactgtccccagaaagcagctgctgtgatcatgggcaatatctttggaaaccttctcaagagcctgattgggaagaaggagatgcgcatcctgatggtgggcctggatgccgcaggaaagaccaccatcctatacaagctgaaactgggggagatcgtcaccaccatccctaccattgggttcaatgtggagacagtggagtataagaacatcagctttacagtgtgggatgtgggtggccaggacaagattcgacccctctggagacactacttccagaacacccaagggttgatatttgtggtcgacagcaatgatcgggagcgagtaaatgaggcccgggaagagctgatgagaatgctggcggaggacgagctccgggatgctgtactccttgtctttgcaaacaaacaggatctgcctaatgctatgaacgctgctgagatcacagacaagctgggcctgcattcccttcgtcaccgtaactggtacattcaggccacctgtgccaccagcggggacgggctgtacgaaggcctggactggctggccaatcagctcaaaaacaagaagtgaaagccagacagccctaacaaagcaccccacccacccctgacatacctactgtcaccctgccccagtcctaccccttcctctccatgcaagtgtggccagggccctgggtatcatgtccacatgcccagcaagagccttgcctcccctgcctcccctcctttttcctgtccacctatatgaccaatccctaattgctgtcctgatgatgagtcattccaatttactggatttaaaacaaaaagttgttacggtttcatggggtggcccctctctctctcaccctctgggtttcgggaggtcgagtggggtattctctttgtttggcagtggttgctgtcctcttggcatctgagtcctttccctgtccccacaagcccttctactccctgtttgcctttcctttgccaccctctccctgttttacatggaaattgcacgggcctctctgtgtttgcgtgcatgtgtgcgcctgtatatacatgtatagagagatatatttgtgggggccggggggagcggggagggggtggagtgaagctcagggcttgcagccaggacactgcccactggagcctgtcatctgccccttccgtgttggtgagattaagggaagaaggtgggagggcattagtcaagccggactgccccagtctttgactggttaccctcctctctgcaggtaggtttttctggatgataggacagatgatggattcttcaccaccattttccttgtactcttctctccacccttcttagggctggaggatggcatttatctctagatgactgttcccaaggagatgccactctgctctgccttactgttgggaaggagagaggaacccactcactcttatcagcttagagtgttcaactgatccttccccaccatcttcagatctgttcctctggagcttgactggggggtggggatggcaagtccatggtgtgtgttagggacccagggcattgggggaagggaggcgaaggcctgaggttttccatcttcattctcttttgttattaggagaaggtgaggcatgggccaatcccattcctgccttccagtgccccaccacccttctgatcttaggggttggatgggtcatctgtccttggtcagaattttctcaccctagtactcctactggcctgaccagggctgactgggtattctaatgaggagctgggaagtggggtgacatagctgaccttagtatcaacccccctcttctccaactcttgttttctagtccaggatatgctaaaggacgaagattttctattgtttccaggccctcagaccatccttgctgtcccttcaccctccatgcccctgccatcctcactcacttctcataaatggatctgggggttagagtggaggaaataaaatcctgaagtggttgtcagtgcttgtgggatgcagtggtcttcaggattctccccgcattattatgtagttgttcagaagctgttgctactgcgtctctctgtctgcagggggcacttgttcctgaggtcctcgcctgggtcctgacttctgtagtttctgtgaagacgtggctgtcctgtgggctcctgtgtgtgctggctgcgccctgagctccgagacagctgcccataacctgctaaggtcagggcccagggccccccacagcatggctgagggaccccttcccagtagggctgtcccaagccccactccatggggccaggtttcctggccacttttgttgatagcagatggatcaatattagtaaccccatccaagattgaactgtgaaagagaggttccaggggtatctccctcagtgccagttacttagtgatgtgttacccaggatgcagcaggtgtgtgcaggtatcttgctctctaggcctgtgtgtgtgtgtgagtgtgtgtgtatatgggtgtgggtgtgtttgtgtgtggtggttgtggggggggtgttggaggttctatttcatttaaaaatgtattcatttccctggccccacagatgcttccctccatactttttatttgctctgtttcctcagatttattttgtcttgccccattgcctctccttccttgaactctttccttttcaatctcaactcattcactgctgttgctcatttgcccttttccatgtattttttcctacttaggattttccactctatctttgtggttcatgaggactttgcctcttctcctgcctcattccctgactttctctagttagatgtcagtcctaaataggttttcctcacttcaggcctcacccctcaccttgtttttttgggggctccagggaccaatctggggctggaaatgttaggaggttgccttggtgctgccccagatctgtccagcagggggcagtaagtgatcttggtagtatccctggctgctaagcccttggcaggggtggtcctttctacattcccattcacttaacagctcttttgggattgggtgtttcattccatttctgcccactccctctcctctcctctctggtaggtttaattttatgctttccctgattccagctttctgcttcctgaggactcccgctccccccaccccaaagtttgtctgtggtgttatagtggtaactgcagttcctcctctggaatgtagactgtatatgtttaataactcaccttctctatccttgctcaaaatgtgggataacgcgatgactgtgaccctggttggaaattaaacttgttttatgca

SEQ ID NO: 722 - protein, 179 aa, Homo sapiens; identical to SEQ ID NO: 718

SEQ ID NO: 723 - DNA, 47435 bp, Mus musculus
  misc_feature (1)...(47435): n = A,T,C or G
gggcagagctcctcctgagcacctcctgaccagggattgaccggacctaaagtcaaccccactctgttctgagatgtgaactttgtgggcacagttcctaaagatatctcaataagcctaccagcctgcctctaacttggttaagcctcagtagtactaaatgggatgggtaacactccaagactaggttctgccaacagcgaggccaagagctaagcaactgcccagagattctggcatataaacagagcaagcccagtcacctttgaccttccttccctgtccattcaaaacactgggcacctggaccagctttctcaacacatgacctatagctcctggccaattatacaactcaacactcaatttgactagaatgcttgactttaattagccccccacccaactcagaggtccttgtgcaaaatctgccctctggcttgcacattgcccaaagtgcagctgcaacctggagtggacacagccggagaaccagaaaagccaaatgactatttcctgtagagacaggtggcttccatctcccatgggcaggtgtagaaaggtgagcttgcagaagtcccacccatgggactgtcagaaagatgtaagtagcgacagctgggattggtgtggccaaatggcaaatcttttagatactctatagtgatctatggtgattaatggactttctgttttcccaaaagggcacactggcaaccagaagggggaaaagaagggtaggtggagaaacaaatattttataaaattcctgctctagctaagttaaataaggaccactgaccaaatgtgatcaccttctcttaaccacgaccacatgggcaggagaatgtctacccacgttgaaaatgtatatatctgtgctgttccaactgatctagtggacagccaaaactgtatttatcatggtgattagtaagtctgatgctatagaggctgattaatatccttattgcaataatagtctattgaccatttagtatgtgtcaggtgctgggctcagtgcttcctatactacaatagttcattctattataattcttagatttatctatatgagtcttttttgcatgcatgtatgtaagtgtaccacatgtgtgccttgtgccatggaggtcagaagaagacatcagaacctctggatctggagttaacagacagttgtgagccattatgtgggtgctgggacctgtaccctctgcaagagcagccagtgcttttaattgctaagccatctctccagcccccatttccttcagttgtcttcaaacccccatgaaatgataatttctttgcagatgaggaaactgaagttcaaagagatccaaaaattcagttgccacgttggtaacattgacatctgaactcttagcctcaaagcctcaaaggtctttctattcctagattttcctcaagtgcctctccatctggcttctactcttagcaaggccacgcctgcctgtctatcagccacacctccagagaatgatcaggccagcccctatctcactggttcccacaagccagagggatagctgtcattcaaaatggagacaaagcctacccatttgctttagcttccttgagaaggattaaaacatggttcatagagagggatgcaagtgacagcgacatgtgggattctgtgggctttacttggactctagtttctcagagataatatccaaaggtgtggaccctggacctcttacctggggccagtcacaccccatacaagatctccctatgtttatgagtttaaaatacaaatgtgtccatgttgaggggaacttgcctggtgggaccagtcggcctctcaaaggtaagggccctccaggtttatcagtagcaggaaccctcagactccacttaggacataatggcaaactctgtgataagaagatgccagaaaacttcaggatagctttataaagcaacataatgacgcctgcttccttgcacaagtcggtgctcccactctacccctaaacagaaccaacctttaggaaatttcagggaacaatccatatctttgaactttagttatttattcatttattagaaacagggcctcactatgtagcccaggctggcctcagcctcctgagtgctggtttggcttgtgacatcatgacaagacctttgaacattttaatggcaaatacatacaatagtgggaaaaaataagaggttggtgaaaaaatattatttcaaaattggtaaaagaaacaattaaatttaaaaaaaaaaaaatgtccataatgagcaccagttgatgcgcaaaaaacccttgggagtaagaccagaagccagcattgtgggacactgtgacccactgtcagcttgcggcctcgcacgtgttttcccctaaagactgatgaaatctgaggtttttcagtactgaagtcttctcgaactggcaagatctacctttttgttcacagaggtgctggattgaaaaactcacccagtacttcctgtgccagccctctgtgactcggaagtagtagagttagccacaccctttctctcaccttgttacttccaacttgggctggtgtaaacaagatcccctgttaatccccagactgagcacagggtcagtggtcagtggcctgggctctgggctaagggatcttgtggaggaaattcaggctcagctgcttagccgatgactttacacaaatagtagaagctcagtgaacctcagattcctcctccataaaatatgtataataacaatccccactcctacgatggttaagcccgaggcataataacaatccatttttagcaggtcatcacagctcttcattgtccagtcggaatatcaaatcccactgagcctccgcccccttctctcacatccgacaaccaccaggtcaaaattatctatgggatgatgcggcgccctcaactgtcccccaaagtgtttatcgactcatttttcactgaagccttaactagggcttgctcatttttatattcactttttatgaataacatatgctcatttattatattcttctaagttttaaaattacataactaccaaattcagacactgatgattctgaaatccagataggctgcatctttaacttagtggccaactccacagtgattatttaaattgataggcatgataaaacacttactcagtaacatctctcttcagtttgtttttttttttctttttaattagcatgcaagatttagcagatttcctcttggtcttttcattcttactcatattcggttgttccagcccgggctctgttcctgtccgcatttccctggttcccgtccccaccctacccccaggctctcccacttccagcgtgcactgtccacttttctatcaattacccctcccacctcgtctcttaaagcctcttttccccccttctcatggacccctttctgtttctatactgactcatgtgtattatgcacatataaaaactcaaaactaaggggctgacaagatagcttagcaattaacactggatacttttctaaaggacccagggtcaatacccagcacccacactggggctcaaccatctgtaactccaggtccaggaattccaacaccctcttctaacctctgagggcacgaggaaggcatacacgtgacacatggacatacatgcagacgaaataatccatgtacataaaattaataagtaaattaaaatcttttcattaaaagctaagatccacatatgagaagaaatatacatacactatttgtctttctgaccctgggttacctcaatataatattttccagtttcatgcaaattttgtaattcagtttttctttacagctaaataaaattccatctatataacttttcattatctaatcattggttgatggacagctagtctgataccattttcttctcagtagcatcttaccaaaatttagctatttgataaagatagatctacacagatccaattactaatttctcccactagacccgtcctcttctcttgaccacagacacacctctgcatgatgactgcaggagtagagagtaaaatatagaatctaaaagccactctgatcacacacatcaccagattgcatgtgtggtccttcccccttgaccagggaaggaacaggctcaaagttcttgcagggagaccagtgtctcttgcagggagacagtgtaggagtccctgtgggaagatgaatctttaatgaatgtgattatctgttggtaacctttgttaggatgctttccagatcaactgagctcattggccatgcatggagagagaggcccacacaccagcagggccaccaataccagtacccatagtaactatacccaatggcaacaacatggactgaccacaggctcacctctaacaacactctcagaaagcaagccttatgcctgccgggatagtgtttaaaaagaactggggaagactgtcttcaagactgcttccttggagaacgactcagatctgtgcctttgcacagtcattaatgacttcagacttaacagcctgatcctgagagagaaatctgcaatggatgggcttctaatacctctactgacagagagagaaagacagtcttgcagggtggtggctatttcacaaacattgatgtaattaagcccttgtaaagaggaggtcagtgttctctagagttttaatggttttaaaagaatcagattctgttgtggatgcaaccctgtttgttggtagagcattcatctgaaatgcatgaagccctgggttccatcctcagctctgcataaataacccagagtgccatactcctataatcccagcatttggaagatcttgaatccatggtcatctttggctacagactgagttcaaaaccatctttggctgcatgagatcctttctcaaaaaaaaaaaaaagaaaaatatgaaattcaagtcaagcatggtggtgcacacctttaatcccagttcttgggagtcaaatgcaggtgtgtccctgtgagttcagagccagcctggtctacacagaaagttgcaggacagttagagctatatagcaaaaacctgtctcaaaatgaaaaaacaaattctgtaacatttattgcagtattgatcatcttcataacaccgtgggcagccactggtttcatcagagtttgagtgcaatgtcttcagtgctgaaaatatacagagacccatcacttccaaggcacaggcaaggaaagggatttaggagataggggagaaccgcctcattggtttgctcaactgaactggggttcttactcaaaaaggacacatgaatggctaaagatgggagaggatacccaaagataaagggaaggaaaaaaagaaatctcagactatacaaccaacacataaactgtttatgtgcttaacatatgtgcctatatatgcttaaatcatcctgtgaattttcgaggcctttatactcaattcaaatatcgtatcaaaaagttggtacatctcaactgagagtcatctccccagggctaccagaagctgggagttctgtgtgggactaggcaggttacctgaactctctatgcctgtttcctcatcagtaaattttaggtgttgatgatgacgcatccctcataagaattatgtaatcatcaaatgacttaatacagtatgtttagtctgtcctgagcacctaagaaatccacccagcaaaggacggctgtcaggattattcaatcctaacttgggacggcaaactcaaaagttgggggcctcaatcaacaactgtgtttccctccatcctaatgagatatgccatgtatcagcatgtaccatcgatgtaaatgcctcacagatgaagaaatagatgaagtcgacgcctcatctaatggctcccaggtgccaggtgccagcaatgtgttgtcatatatgtccactgcccccaccaaacatccaccaaaacacactttgacaggaactagttaaaacaatagagcttagaaaaattaacattctccgcagagtctgtcctgaaaataaagccaggataaaggagactgacccccacagcctggacactcacctgcctgccaaaggcctcttctaatgggctagtgatctaatggtctatgactttttcttttcaattcacttttgtttccagcctgggccgtctggttggggttcagaggcgggggcagtgaaagtggcagattttagggggttagggaagtgacctggagagaaagcagcagacacaagtctgttgggttcagtgaaggcttggatggggccctcctgcctcgtgtcaggtagcatgtcctttaactcacttgattctgtgtgtaggagagaggggagggggaggagagagagaacatgtgtgtgttagctgtcttctttaagaatttctactcagccgggcagtggtagtgtacacctttaatcccagcacttgggaggcagaggcaggagaatttctgagttcgaggccagcctggtctacagagtgagttccaggacagccagaactacacagaaaaaccatgccttggaaataaaataaaaattaaaaaaaaattaaaaaacacttaaagaatttctactctacactaagagaggagctgggctgcaaatgaccaggagatgtgaagactctgggccatagagagggaaacatccaaagagaacagtgctgaggtcagatcatcgagggaggccagggggagaccttgtttctatagtgtggtgtttacatccggtaggctgcagtccaacccagagctggccccaggccagatgagtgacatccactgagcaccagcccctctgttcccttatcttaaaaaataatatgatggtaactgtctcctagagttgctttgaaaaataaccaaggtaagacaggtgagccagtccagcccagttcgtggcatatgaaagatgcagtacagggtgggattccttcctccctacccaaggaggtaccccaggagcaccgggaaccgtcagaacctaagagactagacgcagaggcgaacggccaggactgcacagtgctccctcggcccctgctcacgcgcttcatcttcatcatctgagaaagggtgataagtagcgcccggggttgaaggtctgcacagaacataattaatgaaagaaaacagatcaagatcactcaattgcagagctgtttcaggggtttctcaggctcatccagccaccaaatggcacagcagtaattacagcccgaggggtctctttccagagtcacctctcagctactctgctacaatgatgcaatgactaatttcaggaatgccgctctgagaacctggaaggaaaatagtgagaaatctaaatgagctcagttcttcccccaccacccctggttcctgcccttcccacttccacagctcatcttcacccacaggcatagtgaagctttcccatagcttagtgtttgagatcatccaaacatccattctaatcaaattaagatcaaatgtgatgcttacgcttagagtgcaagttctcttttgtttttgttttatattaatcatcccttttaacgactggtccagaagcctctaattccccaggcagtcacccagagctgctacattatgtactcaggaccacaaagcaaaacaggaccactgtcatccacatcggctgctagattactttccactctcaaactcgggtcatagaaaaaatgcaaattctccaaaactgctttggttttctaaaaacatattgttttctaaagacagtagcagaatagcccgtttttcttggacacttttccttgggaagacagtgtgtgtgtgtgtgtgtgtgtgtgtgtgtgctcgcgcgcacgtgtgcgcacgtgcgtgtggttcagaaactggtaacgaggtgggacaaagctcagcagcagagaaaatcatgtgcaggacagaggagtcccccaaaaaacaggcttcaacaggacaagtcacagatgttaaaacttctgtgaggacatctgaattcggttatttccagattctggtcctgtgcagatacttttgttcagacgaaattttaccaagaagatttagagaaaagctttggggctcttcttgaatccctcttctaaactctcgaccttcaaacaggacactttttaaactcccgcctaagggctggagagatggtgctgtggataaagcacttccctccccaagccttgagttcagtcaatctctagaacccaaattaaagaaaaagccaggtgtagcagggcaggcctgcaatcccaggactagagaggcagagtcaggaggagcctggaagcttgtaacccagctagtgtagctaaatcaggctcagcaatagactgtgccaaaagcaaagaggagaggctggagagatggctcaaagtttgctgctcttgcagaggacccaggttcaattcccagcacccacgtggcagctcacaaccgtctgtaactccagttccagaggatctgaccctctcacatacaggatacaagtaggcagaataccagtatgcattaaaaaaaaaaaaaaaaaaaaaaacatgttttaaaaatgcctagtgatacagggtctcattgtgtggatcaccctgggtagcctaaaactcactgtgtaaatcaacctggcctcaaacccacagatatctgccgcctgagtgttgggattaaaggcactgttaaatccaacaaaatgattaaataaataaataaataacttaatcccgttttctcctattactgttgggagaattctgacccagaaaagctggctctcccacctaaggtcccagagccaagccagagcctcaacaggccacttatcttgccccgactatttttccatgatgacacatgactcctcacatgaactgccttttgtttcttcacgccgttcgggtgtttggatttgagtgtttgtgcctatgcccagtgttcccaagaaaacctaaccaaccagtcaatctctgctttccacttcaagatcacagagtctgcagtttgagcaccttggtgtcttggctgcctgagattgagagaggaacggaacccacgaaagggggttatgaacactcctcccagatgactgcctaggccgtcatttagatttgagagatgtcctaaaaactgggtagttctcagtgagacagctgacagcttgcaagccaatcaggaccccccgcccccgtgttgttctggatgtttgacactgcagctccacgctcccttcatatcgccatttctaaaacagaggacactgggaaagggggaaagctgtcacatggctcctgtattcaaacatggcgccctttgggtgcttagagtggaaaggccagtgaaagcactgctccctgactctctccctgccccctgatcggaaggtccccaccaggatcaatagaaggaaatatgtagcgcctaaggacaggcttccaggtgattggctgacattaccaagtatggccttcccagcaacccaaggacagattccattattgcattaatctgatggatcccggatatgctcattaacttattcacagtaatgcagccagaaaatgaccggctcagaatttgatccctgaagcacctttattctttaccacttcttggcactgctcttctttcctaacacaaactacatacagaggttcgggacttggccagcccaggcaaaggctgcaatgaacagacaccaggcctgaatttccttccctccagcttgctcaacggagactgctccagccagcactccacttatccccccgggggcaagaattctctgctcatttcctgggtcccctcggtgggtggtgggagctgggcacaaaagcaggagaaaggtaaactttctgcatgtgaaaaccaccccccacccccgaggagccgtgtcacaccgtatgtcaccgtcatcaaaggggctgtgcataaacctgaaaaaccaaacggacctgtctgtaggtgtcacttatatcacacggctacaggtgcctttatttctacagtccgctggtgctgggagcgcgcttgccttctcttgccttgaaagccttctgtctggacctagccaccacttgtcttcacgtaagcagcttttctttgctcttttgaatgaattgaaagggggtgtcggggctcagagacttagctggggcctgggactgagtctctgtttccagctcccacggcagcccctccgtgaggaagccagagtgcctcctccgggggtgtttgactcaggtttgacggcttgccggagagatttttttttgtctcctccgggaaggtggccacccaccctcttcaccggcccccacttcctctggttccactaaaccaaaggcagctgagagaatgtgtacaggcgcttaaatctctgcccatcctttagctgcctttaggaggaagccggattctgcacggatagccagctcaagaaaaacccaccacctcccccaaccctggcctcacccctcagttctttggagggcctgctcaccaagctgcccctcttgatacagagaatggtattcttactgtttaaggctttttttgtttttatttttgtttttttaaggagtttgtacaaaatagtttaaaggaatctcatttggccctcccacagccccttaggacagagtgcttccagaagagaagtggctagggtttttttccactgtattctcaaaccttatcagtctgtatgcgttcaggggtttgtgcgcatttgccccctactggcagcaactggaaacacatgctctcccgcatctgcgttaaggtaggagaatttaagacagaataggggtcctagatcattatgcacttcgtctccattttacagatggggcaactgaggcacaagaaggcccggtaatttatagagatggttttgtgtggtagtccaaagactcagacccaggctgttacacgtgctcatccacacggaaagcttcattctcctgccttcattctctcggcaagggtctttctatgattcagtgtattggggacagcagcttttacagtttggttgcctcctcttctcaaaagtcttcagagtgaaactttttagctactcaatcaatgttcactgattttattaaatcctcaggacgctcagcggactgtgtgttgagatgtccattttaaggattcggaagtaggttatcagagatggtcatgagtacttacagattagcagaccaggatggggaaaaaaatcaaaacttttagcacgcctgcaagaaagtcagaggttgcagcaggctaggcaggaattgtgccctccgtcgcttgctttgtgactaccgcaaacaacactcattctctgcgtctttaacctaaaacttgtgatcttccgatcgaagcccacagcttccttctatgatgttttagaaaaatatagcttaaaaaaaaaaaaaccaaacagatgaagtcctaaatgagctgaagaaaaatgaagtattgctcaataaggcactggcgagttggctcccacaatgcagtggttgctttcagaacaaatactcaagaacccaacccacaagccctccactgctgcaagtgttgaaacccccactgagccctctgcagccacccttcttaaagagccccgaagggtgggaaagtaacaccccctatccgtgaggctctgccgcagtgggcattcaggtgtcgtggagcgttaggaaagaaaaagtgtttctctcctcaacggcactgccaagatgataaaactgtgggaggattttcactgtctcactttcctcattttgcactggtttggcttagctcaaagacgttttgacagagaaatagccaatgcctgtgaacagacattccgaagatagaaacaggaagcttgcctcaagtttgaggctagcctgatctgcactgtaggtccatacatgagaaaaggtgaaggggaggaaagaaatggaaaggaaacaggggaaatagcccaggtatagatgcttagttgggtagatatttggtcacatccccaaaatgaccttgaggatctcggctcgggtcaaaggaagaattttcctcctctgacaaattgggcaaggctgggtagtttgcaccgtcaccattatttctgccattggtttgtaagtgggacaaaagcctatagccctggctctttggctgggtgggccctattgtctgcgtggtatgtgagcttgctcagaaaggagatagaaagttgctggaggctctcagttccaggcctgccctgactcactccaaaggtacctataatcgaccttctcaccagtaaaaaaaagagctcatttgattccaccaccttagggtgatcagaccaatctttttcgtaccgatcatgccttccctatgaggtggccagggtgataattaatctgggggaaactgcttccatctgttgttggtctattgaaagccagggcatgggagtataaggatcccagctcagttgtccagctgagcaggagagggaaggaggaggaggggagcacaggactttctggggctacaggtttaatcagaggtcgtactggttatattttgagtatttggtgactttacctgaccaaagtgcaaatgttatcaatgtggctacacgtgtgtacatgagtacaggtttggaagcgtttggctgatctaatgagaggctgcagaaaaatcacagagccagggctgaccttgaatgcgtctcctagtgttttcctgtcatgggtgaagaagtgaggtttagagagatgaaagaggcaggatcatctctccatgttcagggctctttccataatgacaagccagaggatagctagactagccggcccaggaaccttctaatatccctcttttggttctgtgcactgctaggcctacctaacctggttcttttctgccttgttttcattatcaacatacacacacacacacacacacacacacacacacacacacacacacacacacacaaaccagagccttctgccattgagaacagctgtgcaaacccagacctggtctttggatgttgctggtccagagccttcactgagaagagggcaccacactgattatccatctacattagaaaaccagccaaaagtgcccacttattgcaagcaccttccaaggcctagagagaaggtgttgctaaacacaaagcagctttattcctgagcttgcacacctagtgcatgctggctaagtagcctggccttttgtggtgagcttagacttaataacgcctcctcttatgacaatagcaaaacaaaaaaagaaagaaatgttcactgctttcataaaagacctccccacgcctcccccccccaacccccaccacgaagaagcaagaaataattatggaaggaaaacagcatggtaaatcccagagagagccctctatgcaaacctaatgggtataatttgccataaaaggaattatcggagggaaccaaatccatcattgtgtgtagcgctgaagagattaaagatcaagaaggtgtgctggggtgggggtgggggtgggggtgggggtgtggaatccttaaaggaggagaactccctactgataagatccagttcaattttaccaaataagtttcttgttaaatatgaaaggtcttctattgttagtcatggatgagaaagggcaaagtcaaggttagggttaatctttggagggtgcccccatagactttaaagacctggagactgcattctgttctcttccatttggggcccacctctcctttctccatatgcagtcatatagagtcattgaaggtcatatcagtggtgttcttagtgtccagcccaaaaagtatgagactctttcccatcctctcttcacacttaaaagacttttcagaagtcgagtttagaataagcgccatgtacagtcttagtcctccttgccgacattcccaccccgtacagattcaagacatcaagctggcccatccatgggaaaattagggcccagactcaggaagcctggacttctgattgatgggctcccaggtgagatccatggctatgataactgctgggccctttaaccctatggggtatcaagaaaaaggcttcctaactgggacctggggaatagacaggattctgtgtgttatacccagcatgcagttcttctgcacaccgaatggtcatcatgatggtagatttgtgagcatctcggaagatccctgtaacttttagtttccttatataaatgtgcctgggatgatgctataccttcagataggaaagctaacagaccatatgggaaacttagggcctccctccagcttaaccttgctgtccattggctgttgaccttgagcaagtgacacagattccctgggtctccatttccttccctatcaaatgacagagtgcatttccagccctgtactacagtacttgcaaggcaggaggtaattctgcccagaggttggcaaatccctcaaagggccaggttgtaaatattttacgatttgctggccaagagacaaaaatcaaggatgctaagtaaacatgtatttcgaaatctaaaaagatttctggtttcatgataaataaagaaaggagctatgggctggactggcttcgggttgaagataactcctgagttaggtggtgcattttaatgtacattaaaagaatactagccttccatttataatgataatataaagtttatccattaagacgcattcaaacaaaaataaagaaatggctatttaaaattttttaatttattgtatttagagaagcaaatggatttagtaaaattaccttggtgacaagcaaaagaaaaaaaaaacagtgttcagaggacactgtaccaagtgatggagaagcttttgagctttccagttccatctgagaatgtccctggacgtggaatctcatctctgccctggtatggtatttgccagtgcaatgattttgagctgctgtctccttcctgtgaactgagtttgaaccagcttatctcactaactttatttcaagcattaaagaaaatgatgcaaacagattttaaaaaataatttaaaacctttcaaacatcacacacacacacacagagagagagagagagagaatgaagcacagaagccgtgtttgggtgtgtgggaagcagcaaagctgaggttagcgggcacaacagtcttctgccagtctcagccagacacctttgcttaaccactctcctaccaccacgatgtgccggggcagcagagtgcagcagttaggatcaggaactttccaagctgatccacctgagctgccactcaaaccccatctcctgtcagcggggttgtcttgttcttgctacctggagtcccagagcccccaccatcaccatccttcatccataaaacagaacctttcccagcatccatcagagtggtagctctgaggaaagtactagaggacgtagcatggtactaccctctccacactcctggagcacggtatactggaacacacagaatgctacagtgtcaggagtgttagacagtatacatcctgacgaaaccgagctcctgggaggactcaggattgttctagcatcttaatattgctgcggggtatcatgtaagcgttcactaaatggaataaattacctacagatgtagcatgctgttatatatgtgtgcattcatatgcacatatctaatgtatacaaggctttacaacatcagttcagggctggttttgctggaaaataagattgtggcaaacacatgcacatgctaacacatagaaacttccagagctgtctgatttcagcattttaggatagagtcacacagggcagtgcttggcttgttttcccaagagcacttttaaatattatatgtcagagttcagagggtcagacacaagcaaagagaaaagtcaattaagagacaggactgcacaatcccagtctccatcctcaaaccccagctctgaaactttcttgttatgttactttgggaactgtctcagcatctctggctcggggtactcataggagcaatgggaataaacagggtgtggtgagaactgtagaataccgtctgtgtaaagcacttgatgaaagcgcctacctgctgcccttactaaacgataagggtcatcctctcaggagttctacacctggaagctcctggaaacttttgttccagatgttcttacagcccctctgatattccagggtgatgttggactccgtaacccatagcaccttcctgcccaacgcatccttctgtgaccccctgatgccttggaccgatctgttcagcaatgaagactactaccctgcctttgagcatcagacaggtgtgtacgtatggtgattcccattcaagggccgcagcatgggctcaggttaatgcatggacctagggcagctcagaaatgttagcgttcaatgcagatgttggtggaaagtcaggtggaaggaagtataggcttgtgcagaaagaagggcagtagagttctctctcctacttcttcctattatggtgtaaattctacagcctgctccaaagtaatgctcagtaaacatgggttnnnnnnnnnnnnnnnnnnnnnnnnnnnnnnnnnnnnnnnnnnnnnnnnnnnnnnnnnnnnnnnnnnnnnnnnnnnnnnnnnnnnnnnnnnnnnnnnnnnnnnnnnnnnnnnnnnnnnnnnnnnnnnnnnnnnnnnnnnnnnnnnnnnnnnnnnnnnnnnnnnnnnnnnnnnnnnnnnnnnnnnnnnnnnnnnnnnnnnnnnnnnnnnnnnnnnnnnnnnnnnnnnnnnnnnnnnnncagttttctgtacctaagaaggaagcttgaggtcttgtgtaagtttcattgcagagggaggccagctgagctttgccccagaaaccctctgaggcttccttgcctgagtaagtgcttggatgactgcacaccccagcaaagccagcttgctgctggcatggaaggtgcagacccacacaagtgacagacacaagcaccaatgaagctgtcagtcctcgaggagacttaaccctgagcatacaagcctagccaggtctgagtttagtgtctagaggtggacagtgagcaggaggggcccagcccttgacgtgctacacactgtcaccacaagggagcctctgcctttacagctagaggccagggctgcacacccagaattgaagattcctaaatcacctggtaatccacccactcctaccccctacacacatggtctcttccaaacacacatgcacacacaaaatagctcactgtcgaccgaaagacccatcaggcctgtccaacctatggtccgcagtccacgtgcagtgaaggataactgtaaatgtggcccaacacaaaaatcatacacattcctaagacaatatgagatatttcttttgcaatatttttttggaagtcaattgcacagagtgaactttgcagctgacaatgccatgtcacaatgttgaaagctgacagatcactgcgtttgggcttgactcaactgcatacatagtacaatcctcctttggtcccaagaagacgtgggttaccctgaaagatgacgagaaaggtaattcactttgctccctcaaacattaacctgaaaagaagacaatgaaggctttagcgtgttctttcatgttcccagtgcctgttgttccagatgacagggggtagcagttgggaggtggcctcaacactgcccacatgatgtcctggctacgggaacagtggcttctgtagtcaacaagagtctaagctacggctccatgtgaccttaaagtgaagggtagctttgacattagctgctccagcttaacctctcaggcccactctccctttgatagagaaataatgaagttaaaggctgcaacaacaaaatgcagggctgcttccagctggggtagaagaaagttcaaatgctgatgctatgctaatgtttgcacaatggtatgaacattctacttactgaagtggacaattttaaaagattaaaattagattttggttcggtatattttgccccaataaaaaaaaatataatccactagcagaaggcatcaccaatggaattgaccctggaaggtaattctgtacacgctcagattctcgggggggggggcagcccccatggactgagacctcagcagttctattagtgtaatgaaaggtgagacaaggtccctgctgcaattcctccagcagtgtctctgaatcctgcgcaggagacatcagaaacataaacttctctcagcactgaagtatttccgccaagaaatgaggccaaccaaaataaaatatccttatttctcttcccagtcaggacatcaccagccagagaaataacaagatctaaattacaaacaaaacaaaacaaaacaaaacaacaacaaaaaaaccccacccttctctccaggatcagagctggggtagtcgggataccctgaccacttccccctaagtcatgtctccttgctgcctcacatatctccatcttgaatctaggccttgtctagggagttatcctaataagaacttcctgttggtatttgccctcaagtattgacattgccactcaccagccaagtgacatccaacaagctatttgacacattttccttcaccaaaatagtatcccctccctacagctgggagtgtaaaataagagttaatattatcaggcgtttaaacacgggcctggcacttgtcagatgcttgcctcacagggacacctcgctactcctagagaggaaggaaatagctattgccttcctctccagtcaacctagacttcagtggtaacccttccaatctgggactgcaaaggcaaagggtgtgagggagacgtaacataccctggatccagacaagtgacggctgagagggagggaatatgatgctcagcctagcgaaacccagctgcttccaaacttcacaaatgccttcagctgagaaggcctgagcctgtgccctcattgcgctcaccacaagtgagtctggactgctctttgaagcagggcctctgcctaactgcactaaggacttggaagggcacagccacagattgcaaaatacactggaacgtcattaattcaccttggccttgacctcaggttcttcaaaatagagaattgtcagttagactatttatttagtagaaactctgtacttcatatgcataatatggtatgatatattatgatgcatatatgatatatatatatatggtttttttttgaggcagatctcactatatagccctgactgccctggagcttactgtgtagaccaggctggcctccaacttcaactacctgcctgtctacccagtattgggattaaaagcacatgccaccaggacatgtttcacatgcatatatattttttaaacattatagatccgaataagttccaatagtccacattctaaagttttttggtcttagctctacttcctggaacttcaccctagatatcctcctccacacacacctctttcctggccttcaaaatggccagaccaacatgtggcacctccctcaactgtggcattttgcttatgcttttttccacagcagagctttctagactgggaaagcccagggaactagttccaggaggcccctcaagtctagtacagagtctgggtggcagtggaaaagacttgatacaggttctcccctctgcacccccaccctaggccaggctcctccacttccattctgcatagcgttattaaggttaggctgtagctacctgagtctagctctgtcccttacccactgtgtgactttagaaagggttgtctcctgaggcctccatttctctatttgtaaaatggccatggcctatcttgtcaaatgtattgaagacagcagggaagactccgtaacacagtgcttagcagggtgattagtatgtaagagcactcaggaggtacaacagctgctgggccaggggtggtggtaaacaccatgaatcccaatgctagggtggcagaggcaggttgatctctgtgagttcaaagccaggctgatctgcagagtgagtgccagtatagccagaaatatatagtgaaaccctgtctcaaaagagagagggggaggggaggnnnnnnnnnnnnnnnnnnnnnnnnnnnnnnnnnnnnnnnnnnnnnnnnnnnnnnnnnnnnnnnnnnnnnnnnnnnnnnnnnnnnnnnnnnnnnnnnnnnnnnnnnnnnnnnnnnnnnnnnnnnnnnnnnnnnnnnnnnnnnnnnnnnnnnnnnnnnnnnnnnnnnnnnnnnnnnnnnnnnnnnnnnnnnnnnnnnnnnnnnnnnnnnnnnnnnnnnnnnnnnnnnnnnnnnnnnnnnnngaaaggaaaggaaaggaaaggaaaggaaaggaaaggaaagaaattataacagctgtgcttatccgatatgagattttacttcaaggagggctttttaaaagaacagtgccaaggcatcctaagtattaaaatcaaaggggaaagcatttaaatcacactggggcttttccaagtaagattcatgtgctgggcacagaaactcaagagcagccatgtgtatgggcctaagaactcctaaatctaaactagagaacaaacacgagttattcaaaggtctaagcagagtcccgtagcagaagttacgtcccagagaagtcactcctggctacctctgcccactgaggcttaaggagtggccgtagccatcacaactcagggcctggctctctcagcctctccctaactctccgtgacactttgcagacacccagccagccctccacttttcccggtccagtttcttatgctgttcatggtctgtgtcatttgaaggttaagacaagaagccaagagaggttataggtaggatggggccagcccagctaagaaaggaaccctgaaagtcatttatcaccacaggacttccctcataaagccagcccttccttcccgcgccaaagctgcaaatgatggtaccctacacttcactcgctgtctctctacagcgtcgccctgggcgaaaaactttcccaactccctatgctaataaatcatgctaattatggtcctaaattgtctaacttaggcttcctctaaagccgactgtctgtctcgctctttccctgtcctgaatttgttctggttgttccttaacctgcgaatgaacgcagagagttgggcagctcctcctgtccagtatggtatgaactttctgattctcatgtccctacctggagctacttcagccgtgggtatcacctccctattctgaaggccctggaggacatcagcccactgaactcaatacatccaactgggtagcaccatttgaaagagctcccccagagtcgatggcaactctctccagctcctcagcctttcttcccaaggcagctggccctcaagtgccctgacccacttcagacttcaaaggagctggcaaggcctgatgcttaatagtggcctctggactttcacatcaagctttctgggcataggatactggctggcttcggctaggatcctaggcaaacaggcttgataccaagcttctcctgaaagttcagtgtgtcttgtaaatgagagacatatcaaggaaaacactgtacctttccagacaatatgacccagtaagagagtataatcttatataaatagccccttgatttgctctatgttcattccttccaaattctagtaggttcttgttcatgttatttgctggaagcagagacactggcaccatcacctctccatatttctgacttttcagacgtaagctagagatagataaatagataggcaggtaataggtaaacaggtttactgacttctaattgtgtggcggatgtgcatccatttgcctgccttcatccaaatcttatttttgatatgtgtattctccaagaccaggaaatgtggcatgatgcaagatgtccacatggtgtccaatgaccttacttatggccactgtgaccctggaggggaaccttgtaacctcccagaacctgtttccttaccctaaggtaaagattgcaatcactggtgatctggtaacacttactgaggagtggtgggctgagggggtgggggatgggaagcaactcccagcactcccagttcagggtgaccagagttccacagctggggtctgaggtgctgtgaatccttctggaactttcttagcagggcaccctgaggggaagattctttgagagagtgtgaactgctgtggttcaaggagaacaggagggactcaagggtcagaggaatggggaaaaaaagcaccttccagcggagagcagggagtggcactggggcagataatagaggccctggggcaggatccctcccttcctcagaggtgctactaacacctcccacccccaacccctatcctaaagctgagaccatggaaacactccaccacctagtctctggatgctggctcccctcgtcctgcctccacgtccctgggagcaaccatttcctctcagctctggagactgtgggaagggctttggctgacaggaaagccagccaccattgtagttgggcccctgttgcctacaaagcctgctctataagtgagttccaccaaggagccagagagcgaggcactaggccagcaacagcttcctggtgccataaatgccctccccctaccccttctctagatccttaagggaagaaacaatgaagtcttccttccaaacaaaataaccatgccatagaactggagccgggaagggaacagagacacagaaaaacctttccatggagagaagcgtgctgtgtgctgcacagcagtgcaccgatagccatctcagtcaggccccagtgcgggaccagcagccaaagaatgtcaaggatcataaacagctcccatcagaataccaggaacagctaaagacctcttaggtttactcaagccagcaatcagtagatgaaaaagcacagaccgaactcaggaagggtctgttttctcaggagaccctgctctctgccagaaaccagccataagcctgatcagccagctccagccagcagtgggggatcacggaaagggtagttgggacaaaccattccctccatgttttcagccgccaggtaaaggctataacaccagcactcaccagcctggcaatgaaggttctttcatgtatgtgaatgcaaaattctggttaaagggctggtgataaaaaataggtcatttgctacacatgtgtgcagctctgggctcagctccagcccctcaaaaataaataaataactgtttgttttttaaaaataaaacaagtctaggatttgggctcaccaagaggctcatcagtgggaaaagagattcctagagcattctgagttttagagggaaactgtttctatctttacaaaatagccctgtcacacctatgaggtaggacactggaagaatgagaaacccaagaatgccaatcaggacttggcaactcaaaggcaatggacaagaggtagccccagcagaccagagctgtatcttagctgggttcatgagcaccacagctcatctaggcacaggaacagcagcagaggcaggggagtggcaatcacaacagcgccagtggctggggagtgtcactgcagaggtcactctctctgtagtccacagggcctgatccagtgacctcagccttgctctgttgatttgccccacccccattctttcttgatctctgcctacctccctcctcagatgtcaccttttttctgtgctgatcctccaaggacgagcacaataagatgagaggagggaagcgttcagattgcagttcacatcccaccttaccggctgacagtgggatctaagggaagagattctcctccaatcccaagctcctcatctatcagggaacaaaggctaaacatggctgtccaccatgaagtcttcccaggcaatatgtggcatcgcacagagtaggtggatagtggtaacattaataggattgttaaagcacatgtgggctcgtttgcgctgtagaacaactctgatataggtgatatagtcttctccatttcacgaagagggaaagtaaagttctcatttattggatgaatggacagacagacatgttggtgggtggatggatggatggttgggtagtggattgatacatgagtacttagatactatagtggctacaaaaattatttacattagagctggggataaagttcactggtagagtgtttgcctcagctgcacaggtagctgtctgcattgacaaagaacttgacaagtgccaagtctctctctctctctctctctctctctctctctctctctctctctctctctcacacacacacacacacacacacacacacacctctattcttatgtctgcctttctatttgtctctgcttgaaacattgagacaaggcttctgaacacctggacaaggtgctactggtacatcccagcctccaagtcaggacagcacctacaactgtctgagtgtctacacggctcctttgaaggagtaggcagtctgagctcaggagaagataaaacttaagccatcaccaggaacacaacgacatcagtacagtcaactcctccgtgacttcctttctccatagacatctgttattgtagtccaaggtctgccacactatgggcaatagctaactagcccaagacccttgtaaaagatgactagaggctatgcacaaatagacagccatcctagcacctgtccattaatgcccagagactcagaccagtttcagatagagtctagcagaaagaagacatgtagtgactattgaatcgattggtgatttcctagacaccactctccctacattatatctccaactctataacagccgtgtaggtcaaacagattacactcattttaacagcggcggaatcagaggcctaaatatctatgggccttacccaaaagacaagcggctaaaccaggatttgaacccaggccttcagaactccgagattttattcttgatatcatgttacctggagaatatttttgctctctttctttattgggtatatcatgttaagcaccagaaagagatttagtaatttcctacctgcctcataccctctctggtcccaacagccatctacagaatcccatctccctggtggtctctgtagagaagataacctggatccttgtaagtgcatgccagacctagagccctttctgaatagggaacctttaacgatgctaagataactggagtattctttgaggaccccttggtaaccttttacttctctgtgctctggtgcagcctgtgattcctactggacatcagtgcaccctgaatactggaccaagcgccatgtctgggaatggctccaattctgctgcgaccagtacaagcttgatgccaactgcatctccttctgtcacttcaacatcagcggcctgcagctctgcagcatgacgcaggaggagttcattgaggcagccggcatctgtggggagtacctgtacttcattctccagaacattcgctcgcaaggtcagtgtcagcctcgggaggagggcctaggactgggacctgatatccccataggtgcttccttaccccgactctcataatcaattggtatcagtgctcagtcaaaacctctccgtaaccagaagttctaccatcctagtgttgagagtttagccaaaaggaaaggcaagagccaagaaagcaaatggagtaggttttttaaaaaagaaaagtaaaattcaaagcacaggtaaggaagtccaaaaccacgctggaagcctcaaataaggatgctcaaaaataactaaaccatgaaagatgggggagggggcgctctgcttcatccctgactaagcagaaaggaagacaatgaaatagaccttttctcttcctatttccagaggagtccaaaaattaccactctgagtgcattcctttctgtcaaggacccaatggccagaaggtggcgccagtagcgtagacactgtgagcaagcgctgctttttcaaatcacaaagctgtgtcccagtgataaagcctcgggtctgagaggcttccctctgcgacagcgtacaggcctgcttcacaggcagtccgggcaaagtgaaaactcagaatgacccgctgtgttactgatacagtccaggctcttagataaggaagccataggattctttctgcaagaagcgccccctgtccgaatccccagaagctctgtctgctaggaagattgacgaccctccctgagctttgaaggatttggtgaatgattacctggcacgacataaaagtatgctctaagtagcaactatttgtatcactaatataaccaagaggcagaaaaacaaaacaaaccaaccaacaaacaaaccaaagcagacacatctatgcttgattctttacaaaaggacttttggaaaagtttaaagtttctcttggaaaggtttcttcaggatacagagaaagcaggacgttccctgccactggagaaccaagctgtctgctggtccctgctttacaaggatgctgtgtccaaagaagagattcccatttaggcagagaaacctcagagcaccttccagctctgggagtctactgcttctatttgttcctcccatcatgaaggactgaggacaagaaagcagagtggggcctggggggagaagctgaggcctgtgctgagggtgtgcactccctgcatctggacaaagctgaatgtgtcacaacctctctgggagaaggagcctggaactccattaaaaacctcccaagagccaggtatggttgtacacagctttaaacccaacacgtaggatacagaggcagacaggtttctgtgagtttaaggccaacctgctctgtatcctgagtttcaggccagcaaggtgatgtagtaacactctgtctttaaaaaggaaacgctcccaagaggacaatcttgctaaaaattccagggtcatggagagggccatattccaccttggaaggagctgaggttgcattgctaccttagccaaatgccacattaaccaagtttgtctcgaagtcccaagctcctgggctaagagcttccacaatggtctcgtcttttcctagattatataaatatatattnnnnnnnnnnnnnnnnnnnnnnnnnnnnnnnnnnnnnnnnnnnnnnnnnnnnnnnnnnnnnnnnnnnnnnnnnnnnnnnnnnnnnnnnnnnnnnnnnnnnnnnnnnnnnnnnnnnnnnnnnnnnnnnnnnnnnnnnnnnnnnnnnnnnnnnnnnnnnnnnnnnncacacacacacacacacacacacacacacacatatgtgccattgactcgggaatctgtaaaataaaaataagtaagctaaacactggctttagagatgctccgcagttgagagtacacgctgctcttctggaggacctgagtttgattctcagcattcacatggggttgactccaactccaggagatccaaagccctcttctggcttacacacacacacacacacacacacacacacacacacacacacacacactaaaaatcttaccctcctttatccccctttactatttttgagacaaagtcttactctatagctctggctgtcctggaactaacagagatctgcctgcctctgcctcccaggtcctggtttctgcctcccaggtcctgggtttaaaggcatatgccactatgcccagctaaaatatgaccaataaggaatccctgagtgccaataccaactccaacaatgggactttatgtcattctctacgtctaaaaataccactccaccaacctgctccaccctgaagctctccctttaggtccctcaggcaagtctgtgtacataagcatcgtgaccggagtttatacttcagcagtttgcccgggacacactggtctcactgtttatcctagaatagtcaccattagaactgtcttccattctgaggtttctacatttgaacaaaagttatattgtgggtaactatctagcttgtgccttgtgcacctcatagtctagggctctgcaagaacaggacacagaacaaggatacttcaaccaagggaggtgctaggaggacctccagagcccagactatgaatcatctgaatcatagatgttgtagaaagatgtaaagatctggaagcatggacgccctggtcaccataaggagagatcaagggaaagactggggaccacagaatggcttctacagtgtaggacaagaaatatctttcatcagtcccctacttggccctttggccagagtgttccaattatgttagtaaagagatagtactcttcatgatagaggacaagtcaagaataggttatccactgacctgtcctggttcctggaaacatgatctccagcccagctcaccattctacagagtaaggtaccaacacggtctccagagaactgagcattcaagcagagctatgtgccctttgagcttcttatccttctcttccttatggctatcacatcgcaggcattctgatctccaaggattacagtcccatgtcagaaaccatgggcccagggccagaagagagccaagtgggtgtttaagtacatattccactaagactgaccaacaatccagagagccagtgactggcaacgccatgcagacagcagcagttcagagcccacgtttcctggatcctaggcaagattcactctctagaatccagtcagtagatccatgcagcctcctagaatccctggcgtctgttgttctttttagataaccttttaaaaagtatgatgctgttgtatttggcttcagggtggctttataagggccggatggtgtccaggtttccctctggggaaaaaaaagtccctcagaaatgagagtcacttcccttcctccaaaatctcctctcctggtctggccagaccccaggattgcatgaaatagtttatgaatctctcttttcctttcttccccaggttactcctttttcaatgatgctgaagagaccaagactggcatcaaagactgtaagtatgacattcaaactgcccacagctgtgcccgcatactggccacttgggtttgatcctgatttaacaaccacactagaaggttgatgaaccaaaagcaagcacagacttggagaaagagtagagaaaatgggttaaaagagtgtgacagggaaggtggggtctgtgggacaataactcaagtcctccttaagactccctgtctataaaatatcagggcccttcagggctgtggtgagtttaagaagcaatgaaatttgtgcctggtaaagggccttgtaggtgcctgcagtgagaatactataaagccagtgcccattagccatggtgccaatggcttccagcgtttaccggtcctatggttgctgatatttcagaataatctaaacccattgctaagtcgttgataattaaaggatggtggaatagggggatctcaaatgacccacaatcccaacaattagttcatgtctggagatggaggcagggaacgggaacgttggagcttctgttttaaaaacatttctatgtgttctttgagaattccatacatgtatgtgatgtattttgatcatgccttccaatgctgatgtgccaactagaggccacagagtagccaaagaggacagggtcccatcctggaggctttggtagcaattgctagctatcatggttctttgctttttgggtttttctttttaaagatttatttgttttatatatgtgagtacactgttgctgtcttcagacacaccagaagagggcatcagaactcattacagatggttgtgagccaccatgtggttgctggaaaatgaattcaggacctctggaagagcagtcagtgctcttaaccactgagccatctctccagccctatcattatgtttctaaagcacttagcactgtgccaggtatagagtcaggagtcctagatatatgagctcacatgcatgccccatctccatttgcatctgaagaaaactggggtgcagcaactttagagtaatcacagacctgggactgatatgaacatacatgcatgcgcacacacacacatgcacatttgcatgcacgcatgcatagcagctcccaagcccttctatttgttcttctgcctacttggtagagatccaaggtacctgggagttgtctagctccgaaccttgcttgacagtgatccatcacaggggatcttcatttgttcctacccaaagcccagcaagcctcgaagccatccaaactggccaagcagcaacagtccagcccttgatcatttttttttcttctctttccacctgtcccctccctcctgcactacagaaatgtcagtagagaccacaccatacccaaggatagagcttacaagcttgagttcatggccagcaactcctgctcttgagtatctctgaggcatgctagtgtggggttgggagttttgaatggactgacagtgtcatgaacaggagtgagctcgattttgaaaccctgtcaccaggcctccatcttagcttctagaggacacctgattaggatttcatgatgataaacttaaaattttaagcttccagtatcaaggacaaccaggcccgcccaagcctcagtgacagtagcaggaatatgcctccccttgtgccacaccaggtacccccgctgcttgggtactgttgctgtaaggctggtgtttgcagacatgcagcattccttcacggtactgcaacaaaccaacagctcaccttggtgaagggtttaatcaggtgcctgccttgagactggcagcaatgacgccatctcctctgcctccgcctctatctcaaccattagattaatcaaaggagagagatttggaacctcctcaactcatgaaggacttcaaagtcacctgatctggaagagtaggaacagagtaacctgaccagatggatcttcacgtctcttgtgtgatccctctgctctgtgcccaccacctcccctcatcccaccaaacagactccatcccaagcacaagggaccacagagatgaaaagcttgccctttccctggctctccttgtagtccagtgaaggcttcttatctgttcgtagtcagtgactcagtgactcggctttgtttattgttatggctccacttgcttcccccgccccctaaaagattcagtaacacaatggggaagtctagagatggggataggcacacagcacaaaagagccagtgaccgctgctcagatcatttgagctaagtgctcactcggtgcctaccaaatacctcctgcaaaggacatgacctgcttgtgagtgtcagctctgggacctctgggacggaggtgacaggtggagaaagaacactgtactcaagtcccagcctggcacctgtacaaaaattttaaactctctgggttccaaactcttaaataaaatggcaataatgtgagcatcatccaccgttgctacaggactatgctgcagtgtatgaggcctctagtaaacactcagcacttaataaaatgccccatgaacataagaacataagtgaagaaaagctgagataggttttaaaggaagaagaaacacatgggtgcttttagacctccaggaggtagccgggggctctagcacaggacatggatgctcttagatctctagcccaggaggtggactcaggggaggcttctgaagaggttctgtgggaatgagagtctgctgggtagatgtgaggaaagtcactccgaccccactgaaacccgctaacctgagatgaaagaaaggcggggagcagaaagagataaggctagaggactggggggtccactttatgaaaggcctgcttaatgtgacagccttcattgtggtgatactacaagatgttcatgtggggagtgatacaatccagtagcctagaacacaggacctgggcaagagtgtacacgggacacccttttttcccaagatcccttgcgtattcctttgtttcattaatacatatcctagactattcagtctgcatgattagtgtagtgtagtggctgataataacagttatttaatacctgctgtatgccttgcactatgctaggtgctgagggaatacataggtagaggcaaatcctgccctctagtggacacagacggcaaagcacacaaatcaatgtgtcatgtaggtgctcaaaggccagaaagaagtaaatgagagatctcagtagaggcccaaaggcgccgatgtgcggttacaattttcaaagtgggaggaagccactcctggaaggtgaatcttagccctgactgagatgaagatgtgaatacccagatagtcaaggaagggacaaagggcgactgtaaatgccccacggtgtaaggtgcctgcctgatgagaaagcccgtgtagctgaagcaaagtgaccccagagctggaagaatagacagagacttaaggtgaggcaggagctgggtctggttctaaaattctctttaaaatccaaataatttcggacaatgcatgtgtgagtatctgagattatcaatcaaagcacaatgatatgcaatcccttccaatactgagttaactctcgcttcctgcatgaagtctcatctccttgtttttgctgggtcccttccaatctgttctccacacagtcacaagagggatcttcttaaaagatgggctgctgagatagaaatgtagctcagttaagtagtttgtgtaacatgaatgaagccttggctttcaccccagcataaactggaaaagccagtccaggcctgtattcccagcacttagtgaagaggtggaggcaggagggtcgggagttcgaggtcgtcctaaactacagtgagttcaagatcagtgcgagccatctaaaagcctgtctcaaaagaaggcagggcacagggatcgcagaattcactttaatataaaatctcaaaccaccacccagcctccaaaaacatcacctaccactgtctgcaacttacatgagtgtagtggtgcctcccgctctctccagccacagggtatgcaagcttcctaggcactnnnnnnnnnnnnnnnnnnnncctttctccttccttcccttcttcccttctctccctttccactctcccccctctctcctcctctccctcctctccttctcctccttcccctcttcctcctccttccactggttcgtaatgtaactctctcctcctgtgagctctaccctcagaaagaagacaccccttacctcattctctttacagcgtcatgtattgatcacatttgaagcgacaggtgatttgtctgtttcatctggggttcacctggctccatgagcagggactgtgcctgtgtcccctctcatgtatccctgtacgcacaggccccaggactgagcacttccatcccatcccgccatctcctaaccaccctaacgagcctcctctcacagagactgcagttaagttccgttctttggggtgcagcttgaggctcctcccctgccacgagtccttctgtttcagatgctgattccagttgcttgaaaacaagtggcatcaagagtcaagactgtcacagccgaacaagtaagggtccagacaccattccccttccctaaggcagttcacctttgaagctaagcgtttgaggggggcctgtcccctccccagggaggcagtggagaggctggtgtttgtttccatacatgtgaccaaaatcatgactttcacttggacttggaattttacgaattaaagaaatgttctatattctattactgaaggagggctttgtttcctgagccattctgcggccttctccttgaagtacccaggggaagaggataaagggatgggaatgtggggagttgagcggtccaggagcctttcccagcgctgagatctgcccggggcagaatctagccacttaaccattggcagtagagcaggtaccttattgcacctttgacacctacagcaactaaatagagtctggcattcccagagccaggaaattagggagtcatggcccagatcattcttatccatgccctaaaggcacaagaaaatgccagctccccgtgataagtgaactgcagcatagacatcttcacacaaccctcctgctcatcagcaaggactgagttcatgaggagctgcagggaattgggtaaatctggtgtctctgcacggggattttaccagtagttatcagaaaacagacttgtcccagcttggtaaggctccatgcagagtgctccaagtgagagttgtccagcccagcaacagttcttacaggttaattagttacctctctatatacatacatatagataaatatgtatatacatgtatatacatatacatccttccctcccaccccactgtcttttaacacctttcatttctttaacacctctcatttctttttattcttttaagattacaattacatcatttctcccttcctgctcctccctccaaaccttcccacatacacctccccattcttcttcaaatccatggtttcttttttcattaatagtcattgcatttacatatgtgtgtatatatatatgtgtatatatacatacacacacatatatatannnnnnnnnnnnnnnnnnnnnnnnnnnnnnnnnnnnnnnnnnnnnnnnnnnnnnnnnnnnnnnnnnnnnnnnnnnnnnnnnnnnnnnnnnnnnnnnnnnnnnnnnnnttgcctgtagttctttgtgtaacactgaggcatcgtgggctttccacatgtcatttggcctggtcattggcgtcttctttgttcataactaggcaatcatgccagtgaaattttatgggtattgcttccactggatattactaggagacacaatctctcttaaaacaaaaacaaaaacaaacaaaacaccaaaagacagttcaagtgggggctcactttattctgctccttcccccaaaggcctccaaagttctcacctgtgggaatttgtcagagacttgctgctgtcccctgaagagaactgtggcatcctggaatgggaagacagggagcagggcattttccgagtggttaagtcagaagccctggcaaagatgtggggacaaaggaagaagaatgacaggatgacgtacgagaagctgagccgagccctgaggtaagtgggcagcaacggacgcagtgaacctgcaaagacaagttatataaaatagcggggccggggaaacccacactctgttcaaagcttcccctcccccgcttcatatgaaagggtcacgagctaaacctcttcttagtttcagatgggattatgggtggtaaagtgacccaccatccttttttggccttggcagcattccctgggggggatcaccctaaacccaagctgtggtgcacaccagcacacaaacgcacgctcaactgactgtggagagagaggttcagcctgtgaagtgtctgggaaggaagggtttaagtgtaagctgataacaggtgtgaaaataccagggtaagtagagcccgggctatcacctgagagagccaggagtgtttatatatgctgttgtttttcttgtggtgcaaaccttctctggatttctctcctttgcttgctttcacagatactactataaaacgggaattctggagcgggttgaccggaggttagtgtacaaatttggaaagaacgcgcacgggtggcaggaagagaaactctgatggacaccggacaccaggctcatttgatggatttctgttgttggaaacaatcagatcaaactagacatttggaaagtctccctcctcctcctcnnnnnnnnnnnnnnnnnnnnaaggagatgcagttggcatcaagcttgtactggtcacagcagaattggagccattcccagacatggcgcttggtccagtattcagggtgcactgatgtccagtaggaatcacaggctgcaccagagcacagagaagtaaaaggttaccaaggggtcctcaaagaatactccagttatcttagcatcgttaaaggttccctattcagaaagggctctaggtctggcatgcacttacaaggatccaggttatcttctctacagagaccaccagggagatgggattctgtagatggctgttgggaccagagagggtatgaggcaggtaggtccccctccttcccctcctcttcttcctccccctcctcctcttcaaaacctacaaacacactgataaaatttctgcatgtctcagcttacatttgaattcagttgttgtctattggggcgatgccatcagcccttaagcaatcgtcttcatcccaagggggaggaagggatggtcttgtggcaacttggtgtgacactgtctccttaatgaagtgtttggagctaagggagccagtgttatgggtgctgtttcacaagaggacccgttgcaccattaagacacatgatcctcccgttccaggggttctgagcggtcgactgaggcagcttgcctgtggttagtttttaggaaagggagatgtaagacttccttgctttagatttgaaattatcacagttatattccatagaagaatttttaattaaaaaaattttagtggctaagccactaaactgggacctaattggatgtagcctaagttactaataagtctcttaaccagatcaccatttccaaccacttagccacagtcacttgatccacggccaatccttctgaacttaacatccttgtagttagtcaccttgggaattgctacctagattgttacccccttcacctcactggtggctatcatcaggtctacagtgacctgatcaacagacatgtgcattaatttctaaatcactgctgtgcctatgattcaaaccgtcagcgtgttcagtttattgattctctctgaggtcagaatttattgattctctctgaggctaagacattaaacctttaccaagcagagaacgtcctaacaagccacgatagccgaacacagcatcgatctcttctcttttctgatgaatactcaaactttccaacatattctcttcacaaaagtaaagacagtgaatttacatcaatcaacgttcatgggttaaagtctgcactgacatttcctcgtctgccgttgcatgctgttggcatgcaaggtgttaatgacctgcaacatggtggagtgccctgaaccctaacttccccagagttgggactgtctagtgaccggcactgaatagcaatgcaggctgaagacctccaggtttagaatttaacctcaaaagtaacttgtttttaaaaagaaatgtgaattactgtaaaataatctatttttggattcgtgtgtttttcaggtggatatagtttataaacaatgtgaataaaaaatatttaacatgttcaaatgtctgtgtcttgttcaattcagcaacctaggaacctttgatggctcattttctagtagctgggactttaaagagtcctccaaaatctaagaagtaagaatcctgactgctaccttcaggtatcataaaaatttctactactgaataaggctcataggaccaacaacattttttttagatttatattatttaatgtgtatgagtgtcttgcctacaagcagatggaccaagtgcgtgcctgatgcccatagaggtcagaaggcttcagattccctggagctagtcatggatgcttgtgagccgccttgtgggtatggcaaatggaactctggtcctctgcaagagcagccagggctctcaactgctgagccatctctccaaccccaacaaatacatttttgttttaagttcatgatgtttgtgctgtactttgcttcttttaaggttatatgttatttcttggtgggaattgtcttatttagaaattagacacacacaaaaacaacaacaacaacttccctagataaaaccaaatagatctgagccttagatttttcagtcttttttggcataaatttcttgaaactgagctgaagttgcatcttgggacaagcacttggtctcctcttcacacctcttagatgtgactcggtcagctactgttcatgtttgttctagttggttttgtttgtccatgttggttttggtgttgggttttttccgacattttaaatttggagcctgtgctctggaggtaagtactatgttaaggcctgaaacaaagccccaaattgactgtatcgtctgaggtcagctacagtatatatatacactctttgccaaataagggcacactggcggtttccaggatgtgcatttgggggttccagcactcagcccaccacactcgtggaagcaggtgtcctgtgtaaagatgtagtctaggttagactacatccaaggacagaaaacgggaaatcatccaagcctatataaacaatgccaatgagaaataagaaaaggtcaaaacaccaaccatgccaagtttgcttcatcaatagaacaaggaaagcatacttccactcataaggctctgcagtacagctacccacagcaagctgttagagtgctaacattacatttacatttgtttaaaatacaaagtatagcttttaaaatccactcatgttgtcctttcacacctttcaaagctctcaaagggagacctttccccttttgtccctcttaccctgtgatcacttcaggaaccgagaagccaagaaacagccgcacaggtaaaacttatttctagaccagtacagtggctctgtgggcaaaggctcttgccacaagcctggggaacggaggccaatggctgggtcccctgtggcagaaagaggaccaactcccaaacactgtcctctgatcttgacatgtgcaccacacacacatgcatgtatgcacgcttgtacgtgtgtgcacacaggtacatccatactcaaaaattaataaaaaaaaaaaaagcaaaagaaaataaaaactgtatcagaagagaaagtggggtgtgagttggggacaaactgtgagaaggccccgggggtggagagctggggcgagggtgggggagggtgtcctccagtgcagtgtagaatgggggtgctgctcagctctaactcacatcccctccacgcagcaaatgctcctcattccatggcctcagcctcagccagagaactaccagtgggcatgatgtgaaggcttgaaaagcactcccacgacccagatggctttcttgactctaccaccccactctgggtctcagcagagtagagatgtgtggcattgctgtaccagccaaactgtccccagctgacaccagcctggatcgggctgactgaacccagggctggcacaccaccactgttgtttgaaacccctggaccatacagtggccatgaccatgtgcctaggcactgatgtatactgtctcacccccacatcctccttaggattcaactgtgcagcaattagggtgtaacctcaatactccagaacgagacaggaaacaaaacctgatgagggaagcgaaccttctatctttgaaagtcaccagacgtttccacggaaaaactgaagatacttcatagcgttagcctggcagttctcaccctgtgggtcataaccgttagaaaacacgtatttctgattgtcttaggaactcccaaccataaatgtatttctgttgttactttataactgtaattttgctactgagaggtgtctctgttcctaagaccatcaaaaatacatactacccgacggttgtgacccacaggttgggaacgctgggacacatggctcttaactaccagcttatgtgagaaaataaactatagtagggcagaaccgtagctcctaactccccgacgccgtattataacccatatgcaaataacctccatctctactggctcacggcattcattttttttaagagtttatcttacagacttaatatacagagaactataagcaccttctccaagaggagttgggtgtaaacgggtagactcactttctgtgtctacagacagaccagtttcaggtctgctcagatacaggggtaagtggtggtaaagagacagttcgtatctatcagccagggacctcagagtcctctgaaggtacaggcagctgtgagctcacaacgcaggcactgggtaccaaagtcaggtcctctgtaagaacagcacaggtagttaacgtctgaagcactcgctccagtcccaagggggtttaattctcctgaaaagcaagctaaggagcaaaggatataagaacctccaaagtcaggacgttgactgctgtctcagtgcgccagcaggccatccaaagacagacaccatggaggctctggccgctggcgcttttattgttactgcagagagagctggtaatctctacttcacattccacattatacagagctgaaagcaaccaaacacggtccttccatgtagatcattttattgtaaaaatgtaagcaagtacaaatcatcctatgtgaaatcactgcgtattagcatcaacataatccaagtgggaaaaaacaagaatctgattagctgcacagcacagcacagcacagcaccgcacagcacaggaataaacattaagtttcaacagtgctaaagttacttttggaagacatgatgcaagtatggttttgcttataaggaccttagaaaaataaaaaaaaaattctgagtgggccatctttatcatctcttcatgtgtgtgtatgagtgtgtgtgagtgtgtgtatgtgtgtgtagtgtgtgtattgcatgtgtgtgtgtgtgtggtatgtgtgttgtattgtatatataccagaccatgaggtaataggagaatacactattctcgccaagatttttatcttgtctaatcaagtcatgtttctggctagaacacctttcttgtaatcattttaaatgtagtcatttaaatgaataatccaaacagaagtcctattagatccatgtttctgttaaatgattgctaagccctaacctttcatttcccttcaggaaacggcatcaaaagcatggttatcattcactctagaagcccggattatcgttttaaagtcatcagcgtgagtctgcgctccggcgggggagaatccatccagcgttgattacaggtgatcctcaggctcggcttcacgagaggtctcctcagcggaggctgagcaccggagttacaggttagcttttcccttcgcagccatgtgagagccggcctgcgtgtaggtgtgaattgcgttctgtgtcatgggaagaaaacacaggaccagtgagttaggaacctgggatttctcttaaaacgactcagaaatccatccactgtgaatgaattcagtgttgcgtaggggctaaaatgaagcgttatatgttgtgccagtaagtcaaagaaaatgcctagtaactgctgaactgaggcgataatggcactggaaaccaagctgtgtctgacccagcccagcccaggctcctctcccagccacaccactcagggctcaccttaggcttctcagcgttgtacttgtccagaagagcctggatgcgggccccatagtcagggtggacgtcagtgaaattcttgacctggagtcaaaaggaacttacatattagcatctcctcacccctatgtgaactgccagcatcttgtgcttactggtcaggggacgaaggacatttcaacaggtcatatcaggttctggagaaagacctggggggtccagtataaattctccaggctatgggctgagctgcctcagagaagccacctcacctatctgagtttccgtgtccccctctgtaaatgagcaagacaattatacttatgtggatcatagagacacatctggtctttatcctccattcctggcacatggatcctgaagcctgtggaatttactgtcgtccgcgtaccactgagatggttcgtgggaggctcagtgaacagcaggacagagctggtaccagacacaacgagcataggatttgaaggtgggacttccaatcccaccccgagcctatggatggtgtccagtcacctcataactgatgacctggtcagccatgcctatgtagggagaaccccatgaaagtccttgtatgacggggctcccagagcctcttggtaggtgtcgggaggctggtacggctgagaggcatgaaagctggtagcccttcctccccatatcgagctcaggcgtctcatccatttggtgagtactgagatgccctttatgatgaacagataatactacataaggcatttccctgggttctgtgagccatgctagcaaataaccaacttggcagaggctcctgtgaaccctgagacagcagtcggaactttcatgtgccagcgatcttgcgtgaaatctaaagtggaagggttcttacaggtttgacccctaaatctgcggttatgaaacaagttccagggactcctgtcacaactggactgaactgtaagacaaccaaacaccaccacaagggcaagaacctcttattgagggagaaagcatatgacagacctcacaggatattacggggaaaacacacctgaacaacttgtaccagccgccaataaacagctgacctcacagtggatacccaacaagccagtaatctgtgtgaaagggcagacttggcactgcctcgatttaagacgatgcacaaacagcacagaaaggctactcagtttatattgaacgttgttctgggacaacccaaaaaactagaagccagagagagggctccaggtagcccaatgagcagtcagcagacacaccgcagcacctcgactcagcccgcttcggggaatagctccgttcttgctctagaagaagcaagcttctactctgtctgaagaagagtcgcagactcatgacggtgaacctggatacaggcttcaaaccacaaaaccggaaacaatacctgtcatcctctgaaagcttccgggagacaaagcagagccacggctgctgtcacacacagaactgactacagctgaactgcacagcacccacaagaattcactctaaactcaactgaatttctacacactggaaaaccagataacaatgagtgtatgtatcacgccagacaaaacgctgagacaaggtaatcgaactttgactgagaattgctgcactgtctacaaagtcatcttagctcaggtaaactagaaactgcttttccttgcagggttctcccacacggctgcactacctccatgagccagcaggtgtcaccctctagccatcaaagccagactcaccgctttcttctgaatgaaaagctgagcgtccttcaggtggccggcaatgttctcacacaggcgtttcctctcctcctcgttcaacacctttgtgtagaatgtccgcacctgttcagcaacaagagagcaataaataaataaataaataaataaataaataaataaataaataaataaatcaaccatttttccatgaataaaactccaagagtctacattagaaatgcacaattaaaaatcacattaatattataatgaaaactgtcatatgtgatgaattaatttcttttgcattcatttgttggtaatagcttgtaactggttttcttctctgggtgtctgtgcagnnnnnnnnnnnnnnnnnnnnccaattttctcaggattggttgctgccacttagcacccacatgcttccaaggagcatgctccgtctagtgggcagtactctttcctggtcatcggcactacgttgagaccagctgtagctttctgcaacccacaaaacctaggacttgaactttaacttctcggaggcataacaccttcactagaggacacccccacaggacgcatacttcccgaatacctccacttgctacggggactcgatctcattactggaacctagagataacgtgtttagctgagctgcagtacctttgcaaaacatttaattcagtctgtctatggaggtaggaaggtaggcagggctggagagagggagggctggagggagggaggaggcaggccatctatgacatttttctttacatttatttatttactgaatgtggagaagcctgtgcacacatgtgccatgtgtagatgtgaaaggacaacttgcgggtatcacttctctcttctatgtgagttccagagctcaaactcagtttgccaggcttggctgcaagcgcctttaaccactgagccacctcgctgcccaaaaagtaatttctggaagcattcctagtggttcactgcagccagcttctcacgggagctcactgccaatctttcagggattcgttaccaagctacagagcttaccgcacacacacaactttattttttttctgcagcttttctgagctcttggtcactaagcccttgctttgtcctccaaggcgtttcttttttaaaaaaagaaaaagatttatttccttttatgtatatggatgttttgtctgcatgtattagaaatatacgccacaagtttgcccggtgcccagggaggtcagacaagggtgtcacctcccatgaaacggaagttttggattgttgtgagccacatatgagtgctgggaattgaaccctggtcctctgcaagagcaacaagtgctgctaaccacggggccgtctctccagcccctcttcgaagcttttaatctgtctttctgatgttcttcatgagaggatagatctgatatgagcaagtcctctgagccacaaggccaagggaatcatttttaagggaaaaaccatgaagttttctgggtactggtcacaggacttttattattgtaccacttcgctttgaacccataataccaggatcaagactggttaaaaatgcgagtcctacataatgataagaaaacttctcactaaaataagaaaacatagcataacacaaagctcacatagcaaaccttaacgtacaaatggcagtctcgtttctaaaggagttgtgtgggtttgctttgtaccaatcttgacctcatacaagcaaacccttgactgccaaggctatcctgcagtacatcgaattcacccatatctctaaaaataacctactataaaaggcttacctaaatgtgctatatatcccacaataaaatagcactagcccccccctctttcaaacaaaaacatcttcacagtgaatccagctatgtatttataaatatttcacttggaatctacatttttaaactgagaaaataaaaataggttctaactgaatttaaatatcaatttacagaaagctcccacaagggcaactaccttctcattctttggctgggtgtggtggaagttacactgagcgaatcccagcccacacccgggctcccagagcatccacgggaaaagccctcggggcagccattcataactggaaacagggtgagcacctgagccagggcagctagcagtagggtgatccgagactaatgatacagtctggggtaagaagactatcggattctctcaactatgacgggactagagtgaagggtgctcaaaaagagaaaagctaagaaaaaaaacagcagaaaagagagtcggccaggtatgggcgtggccaaacagcagaagttgagaggcagaggagaaaaaaggggggtgaggaggcggtgcagtgggaacaagcagccagcatggaaagcggaagtgaacaccccccccccactccccgagaacagcagagccgggtgcccaggagccctgagcggaacccacacactctcgatgccagttttgttgtgagttttccaggattaggattcaaacccaaggccctgtctgtgcaaggctagcaaagtaccattttcctggtcgtcagtggccgtctcggatcaccaggtctagtccctggaaactgagttcctctgccaatagacttgctcatttcttaagttcccaggagatcaccgtccccagcatcgcccaatcatttcaataaaggctgggggtgggggctgagaacgagtcctgatatgtgaaatggacagagtagccagtcagctctttggctctagccaatagagactgatttgttagagctaagtcttctttggattcaattcaaggtgcattagacactgtgatggtttgtgtatgctcggcccagggagtggcactattagaaggtgtggccttcttggagtgggtgtgtcactgtgggtgtgggctttaagactcatcctagctgctgggaagccagtattctgctagcagccttcagatgaagatatagaattctcagctcagcctgcaccgtgcctgcctggacgctgtcagctcctgccttggtgataatggactgaacctctgaacctgtaagccaaccccaattaaatgttgtcatatgtaagacttgccttggtcatggtgtctgttcacagcagtaaaaccctaagtaagacagacaccttaagaagtggccagtaagtccgatgtgatggcatgcgcctttagtcccagaacttgagagagagaagcaaggagggcacataggagtcaaggccagcctggtctatataggccagcagagctatataatgagactgatgggactcggtaatgaggtctgacaagaaaaacagccaagctcccaggaggagcccagaaagccattacctgagtgacattgtcttcattagcactgttgaagcgtttcacatctacagcgcactggacgctgtgctccagggctgagcgctgctgctctggtgcgctgaagctgttggggtaatagttgggggcaccacctttgaaaagaagcagagacatccttagagatgtcatcttagtcatccttagtgagtcatcaatctgggaaggagaggcccacagcagtaatcaaacacacatacattaggtgcccatgtaaacacatcacatactgggaaatgattctctctcctcaggtctaactacaggctcggggacactgccctgcccacaggcacgtgtgggctgcctgagtaaagagatctcaaatgccagtcaacacttcagaggtccttgtctataacaccgcctggtgcttacctgcaccaggaagtttcttcaaagatgtgacgtagttgtcactgagatcaggcccagagacaccgggggatctgatcgtctcatttggatgtaggctccatctaatcgttgactcaactgtacagagcaacctagttctatcccctccttccctggccaaatctgaagctctgagatgttcatagctggtaattgttggtggggcagggctagaagcctgcacttctgtctgtttcaatgaggaaactcgacaaaactcttcctcgcacgcctttaaggctttggaacatctctccttagctgattctaatgttcccctcaattctatttttactttccccacttggaaaagttaaaaaataaat

SEQ ID NO: 724 - DNA, 2204 bp, Mus musculus
atcacacggctacaggtgcctttatttctacagtccgctggtgctgggagcgcgcttgccttctcttgccttgaaagccttctgtctggacctagccaccacttgtcttcacggtgatgttggactccgtaacccatagcaccttcctgcccaacgcatccttctgtgaccccctgatgccttggaccgatctgttcagcaatgaagactactaccctgcctttgagcatcagacagcctgtgattcctactggacatcagtgcaccctgaatactggaccaagcgccatgtctgggaatggctccaattctgctgcgaccagtacaagcttgatgccaactgcatctccttctgtcacttcaacatcagcggcctgcagctctgcagcatgacgcaggaggagttcattgaggcagccggcatctgtggggagtacctgtacttcattctccagaacattcgctcgcaaggttactcctttttcaatgatgctgaagagaccaagactggcatcaaagactatgctgattccagttgcttgaaaacaagtggcatcaagagtcaagactgtcacagccgaacaagcctccaaagttctcacctgtgggaatttgtcagagacttgctgctgtcccctgaagagaactgtggcatcctggaatgggaagacagggagcagggcattttccgagtggttaagtcagaagccctggcaaagatgtggggacaaaggaagaagaatgacaggatgacgtacgagaagctgagccgagccctgagatactactataaaacgggaattctggagcgggttgaccggaggttagtgtacaaatttggaaagaacgcgcacgggtggcaggaagagaaactctgatggacaccggacaccaggctcatttgatggatttctgttgttggaaacaatcagatcaaactagacatttggaaagtctccctcctcctcctcgtccccctccttcccctcctcttcttcctccccctcctcctcttcaaaacctacaaacacactgataaaatttctgcatgtctcagcttacatttgaattcagttgttgtctattggggcgatgccatcagcccttaagcaatcgtcttcatcccaagggggaggaagggatggtcttgtggcaacttggtgtgacactgtctccttaatgaagtgtttggagctaagggagccagtgttatgggtgctgtttcacaagaggacccgttgcaccattaagacacatgatcctcccgttccaggggttctgagcggtcgactgaggcagcttgcctgtggttagtttttaggaaagggagatgtaagacttccttgctttagatttgaaattatcacagttatattccatagaagaatttttaattaaaaaaattttagtggctaagccactaaactgggacctaattggatgtagcctaagttactaataagtctcttaaccagatcaccatttccaaccacttagccacagtcacttgatccacggccaatccttctgaacttaacatccttgtagttagtcaccttgggaattgctacctagattgttacccccttcacctcactggtggctatcatcaggtctacagtgacctgatcaacagacatgtgcattaatttctaaatcactgctgtgcctatgattcaaaccgtcagcgtgttcagtttattgattctctctgaggtcagaatttattgattctctctgaggctaagacattaaacctttaccaagcagagaacgtcctaacaagccacgatagccgaacacagcatcgatctcttctcttttctgatgaatactcaaactttccaacatattctcttcacaaaagtaaagacagtgaatttacatcaatcaacgttcatgggttaaagtctgcactgacatttcctcgtctgccgttgcatgctgttggcatgcaaggtgttaatgacctgcaacatggtggagtgccctgaaccctaacttccccagagttgggactgtctagtgaccggcactgaatagcaatgcaggctgaagacctccaggtttagaatttaacctcaaaagtaacttgtttttaaaaagaaatgtgaattactgtaaaataatctatttttggattcgtgtgtttttcaggtggatatagtttataaacaatgtgaataaaaaatatttaacatgtt

SEQ ID NO: 725 - protein, 254 aa, Mus musculus
PPLVFTVMLDSVTHSTFLPNASFCDPLMPWTDLFSNEDYYPAFEHQTACDSYWTSVHPEYWTKRHVWEWLQFCCDQYKLDANCISFCHFNISGLQLCSMTQEEFIEAAGICGEYLYFILQNIRSQGYSFFNDAEETKTGIKDYADSSCLKTSGIKSQDCHSRTSLQSSHLWEFVRDLLLSPEENCGIWEDREQGIFRVVKSEAKMWGQRKKNDRMTYEKLSRALRYYYKTGIRVDRRLVYKFGKNAHGWQEEKL

SEQ ID NO: 726 - DNA, 53601 bp, Homo sapiens
aaaagccttcttgctgcctccattcagcattacatcataaagaataagatattttactatttgcagcacacggtgaagactttaaagagttaattatggctcactggagtccgtccccaagatcccaagacccagaaattaaactgattattttcaaatgtcagtcttcaagagagcattccaggcaacctcctctgtggaatctgaggttgacgctggtttgcaaggtgacccaccaggatacacaagggtgggttggaggaggttatttgatttcggccttcctcttgtatttggccatgtattttcagagatcgcatcatctgtacaggcttggagagaaaagaaaagcaaggagagctggaattctacttaccttcttggttccgtggggtgaatccacctaaagccatctgtaatctctgagctggagagaccagcaatgtggccagagttcaaagggagttcagctgtaatctggatgttacaatctgagccaatctaaccatgcaggctctgaggacattattatcagtcaagtgtaattatagataaaatagttttattaatcggcttcctaaggggactgtgtttatctgatggctgtgtgtatgatgtgtgcatgggagaagagggaggggtctgtgctgtgtgtggttggtctgtacggtggggaggacagggtgtctgtggggagagtgtggtggatgtagggggtgtgtctaggtgctaggtgaactctctgtatgagggatggaagtgtatgtggtagcactgacagcatgcacacatgcatgtgtgtgtctgcttgcccaggtttattcagctggacttgaaattgtgcctgttttatccactataccttggatttgtcatcacccttttcccaaaaaagaggcttttctatatctgtacaataattagctagagtctatagagttcctagttgcaaactccacctgcagatgccctccttggctgctaactgtcagccaaattttcaaatcttatctccagacctatcatggtttgtcttaaatgtccatcaccttaaaaatgtttgtcagttgcaaagtatcttgaatgggtagggctcctcctgaatattgtttggtctggcctaaagtcaacttcactcagcactgggtaggaaaaatgaactttcagggcccagaactgcaggtttgatttaaatttgatcaggcatcagtggggaggtgggtatccagtaacactccgaggctaggttcccccacagtgaagctgaaggccgagaaactgcccagagactgtggaacaggcacagccagcctggttgcctctgcccttcctggcaatctacctgaatcattagtgcctggaccaggcctctccacacacagcctttttctgctggctgactgtgcaacttgctgctcaccctagctggaacacttgacccaaattattccccacttcagagggccttgtgcaaaatctgccctctgcctttaacttggcccaaaatgacagctgaaacctggggtggatacagcctgaaagccagaaacaccaagtggctgcttccttcctgtagaggtagatagcatccattctcccatgggcacctcaaaaaggcaaactcaccaaagccccactattaggacttctgatgtcacacctgttggccactctgcagagtgatttgctgggattcctggagtttctttgctcccagaaaggcacataagggcccgggggaaaaagaacagtttagataaggaaataaacattttataaaactactgctccatttaagatgaaagaggactgttggccaaataaagtggccttctcctaactcccagggtttgtaaacttttgatggattccaaataaactaaagatgaaaaaatggatgaatgaatatctaccatgtgccagacacatacacctttattatttcaattgatctagtgagtagttaatattattttcattttgctaatttagaaatggagacatcacagtaataatcatttattgagtatttaatatatgccaggcactgggctaagtgcttcatatattacatataccatgttatctcatttaattgtcaccaaaactgtatgaagtgacaatttattttcagatgaagaaaccaagtctcaaggagataagtaacttggctaccaagggatagaactgagatttgaacctacatcaattagactcaaatcccagtgctctttctgttactggtttttctttaactgccttcttatgtagcttatgttccttgcaaaaccatggatatctttttaaattattgcatcactcaaaaatattcagccaagttccacatctcactggttctttggaaccagagagatatcactgtccatacaacatgaaacagaatcctacccatctcccttcacacattgagaaagaattaaaacatagtttcatgaacagggatgtgggtaagagtgatgtccaggacattgaagacacctgtccaattgcttcacaataatttccaaaaattccaatcccagacacttaccttaggggtggacaagttctaaggggagcccacttaggcctacggcttggggtacaagtgagtccatgttgacatgaacctgtgggtgagtcttggcagcttctcaattttgaggcctctccccttggatgtgtcagtaccagaatcattggatttctgttgagatatgatgttaaactctgtaataaagtgacacatcagaaaacttcataatagttttgtaaaagcataatacctaaattcttataccattctgtgtttgcaacagagactttctctaaacaagttcccaaacagaaccaaactcaggaaatttcagtgtatgatttggacacgtaaactttttaatggccaatgaaactgtggaagatggtaaaagattgcaaagacatggataaaaacaacaacaacaacagtacgggccgggtgtggtggctcacacctgtaatcccagcactttgggaggctgagaagggcaaatcacatgaggccaggaattagacaccagcctgggcaacatggtgaaaccctgtctctactaaaaatacaaaaattagctgggtgtggtggtgtgagcctataatcccagctacacaggaggctgaggcatgagaattgcttgaacccaggaggcagaggctgcggtgagccgaaatcacaacactgcatcccaggctgggtgactgagtgagattctgtcaaaaggaaaggaaaggaaaggagaggagaggagaggaagaagaaatgaaaagaaagaaagaaagaaatgaaaaagaaagaaagaaagaaagaaagaaagaaagaaagaaagaaagaaagaaagaaagaaagagaaagaaagagagaaagaaaaagaaagaaagaaaagaaagaaaaagaaagaaagaaaagaaagaaagaaagaaagaaagaaagaaagaaagaaagaaagaaagaaagaaagaaagaaagaaagaaaacagtgtgactcccagaaaaatgtaggagtcatattttattttttgggggcaagagtaagagcagaatcaaagctggtgacaaagtctcattttgctgccccacacaagtttgctcctaaatagcagacaaaatcagaggccttttcaatattgaggtccccattaacagtcagaggtccccttgttcataggtgctgatattccagacacatgattcacaacttacccaggactgtcacatagtgacacatgtaagacttcctactcccatgagtaggaagtagcagtcatgagctatccatgcctactctctccttccatgcacggccaggtttcctcttgattgaaagcgcccccaagacactgcagaacacagtggccaatgggcctgagctttgagttaggttatcctaggattgaatcccagctctgctacttaggtgtgtgacctggggcaaattactaaagctctttgagcctcagttttctcttctgtaaaatgggtataataacagccccactcctacagctattgtgcttggcacataataagcatccatttctagcaggtcaccccaatccttcatcacccaactcaaatgccaaatcccacagaaagtttttttctggctgctccagcactattagctcctcttctctgaagtcctacagcccctagttcaaaatttggcttgaaattaattaatgcctctcaatatttcttcttgaattctctgttaggttatctattccttgaaggccacaactaggtcttactctttttcacatccctcttattgatattaaatactgccctattgggttttttattgttgtatttatcaaattcacattttaacatttctgaaatcaggacaagctttattatctatctgcatatttaacatagcgcttcctctaagacaattgtttaagtcgatgacgtatcttataaccaacaacatcttagcattaagtcttgtttgactgatgaggctagatctgcgtggatccagcatcacttctcacctcccatgctccatcttcacatccttccactcccatcttttgaccaaggacatgcctacgggtgacagtcagcaggagtgaggtgtttagtctagagctatggaagccaatgtgtgtggtcacacatgttatcaagctgcacgtgcgatcattcacactggacaggtgaggaaacaggttcagaaagttaccttctctcagcaagtccagtgttcgcttgcctgcaaaaagagtaagtgtttaataattgtatgattgataatctattgataaccttcattagcatgaatcccagattcgtcaagctaattagcctgatcgggagggaccaccccattcactacccaagattccaatggcaacactgttagcccagtccgtcctctaacaacagtatgggctggccacaggagtcgtccattcctcagactaccatcccaaacaactctctcagaaagcacacctcatgtctgccacttcctatgtgtggtaggaaaacatctaaagaaaatcctgtcttcaggaatccttcctatgagaagggtcctcttggctgtgcctctcagatctgtgcttttatagaggcattatggcttcagattcacggggcttacccaaaatgtagaaacctctaatagattgacttccagtgtctttaccggaagaagaaagaccagcaatatggtcatgcagttgcatcaactatttcacaaacattatcataattaaacctataactataaaatcatatttttgttacagattttaatgaaatcaaattctgtcattttatattacaatattccccattgactttgccattgtttaacctccagggtgccttcagtactggaaataacagagacctttactgtcctgaggctcatagccaaggaagggttattaagagggccacctaactgttgcttcgattgaatcggggcttctggtcaggaagatggtagcatgaacagctaaagagtgagttggatgtaggaggatgagggaaaacacccaaagaggaaacaaagcaaagaaagaaatctgaccaatcaatcaaccaattgacaatcaacgaatgagaattgcttaagcacctacttttgcacaagtctgtgcaaggcatttggggggacaaaagattcatgactcttgtccttgctttcaaggatcctaccagcaatttgggatgtttaagaaaattggtatctcttcaacttagattctgcctcaccgagaggtaccaaatggtagcataatggtaaagcttgtggactctggtgcataggctccatatatggtgcattggtgtatcctgcagaggctccagtactgctttaagcttcatgtgctatgtgatattgggcaagttacttcaactctctatccctgtttcctcatcagtaaattttaggtgataataatggtacctacctcggaggaatgatataaggattaaatgacttaatacctgtagcatgcctagacagttctttgcacccggtaaatgctcagcaaatggtagctattatgattattcattgtggaagaggaagggcaacattatcctacttgttatggtaatgcccaaaggttggggctctcaaccaatatctgtgtctctctctatagcccattacaataactgccatttattgaaatttaccatgcaccaagaatcatagtagtagatacttcactggtgaggaaattgtgaccctgaaaagctgatagctcatctaatgtctcccaggtggcaggtgctaggagtttgttgttatatacacccactgacagaaatctttttgttcccaaatatttgagccaatagagcatagaaaattgcattttctccaacagactcttttctaaaaataatatgagaataatagtgacaggggtctaatccaaagccagtgcatttcaccatcacactgtaaatctctccttccaatggtattatctgtgaatttacctaaacttgtttttctaactcgcttttgttttcagcctgtgctgcctcttgggatggtggtgaagttggcaggttgagggaaaaaataaatgacaaagaaatgttcaccttggttaaagaaagcaagctctaggaaaagcatctgagatgtgaagcctgttatatgtagtgaaaagaataggatggaagcctccagcctctgtcagatggtatgccctttaagtcacatgattttatgatccatgtaggtattgagtgcgttcttgatcccaagaacgatactaggcaccagattcagtgaggtaccagaatttccactctatactaacagacagattgtgccagcaataaccatgaatcctagaaatcttgagccaacagagacagatgggccaccttttaggccagtgttgaggccagagcaaaagaagagaggccaacttaagctcctgtttccacagcttgcctttaacattggtcaggcctgagttcaatgcaggtttggccactgaccaactgggtgagcctcagcaatcatggcacctctgtttctttgtcttaaaaaagaaaatagtgatggctacctcccacgataattgtgaaaaattaccaaggaaatacaagtgagtcatcccagcacaatacttggtacatcatagatgctctttaggtgtgattctctcctccctatccgcaaagaactgccccaggagcacccagaaactgattagcacaacagttaagaggatgggctccagaggcaggcagcctagactaaaatacttgctctaccacttagctgtgtgaccgtgaacaagttacttaacctctctgtgcctcagtttcctcatctgtaaattagagatgatcagtaacttccttgtcgaatatgtatgaaaatttaatgtaaggaatataacaggtcaaaatgtaaataagccacacttagttagggctccttctactccccaagttttcactcatttaattcacacaacaaccctacaggaaatgtattccttttttcccattttacagatgaggcaactgggatgcagagatgttcaataggcttcccagactcacccagacagcaaatggcagatcagagattcaaacttgggaagtctccttccagaatctgttttcttagccactacgttacaattataagcccaattggtgttacttaatattgctgtatagccaggacaccagaagcaggataggctgggagttctaaaatgtctcattccttcttctgccccctccctccaccctagtccttttaccttcctcttccatccccagtccccattcttgttgtcattcaacactcataatgaagttcttagatgcttcatgttcaatatcatccaagatctccattccaatcaaatttaagtttaaagtgatagttacacttaattagagtcaaattcttcttttattttgggtttatcttaatcatcccttttatccactgatccagaagcctgtaatttcacacacgggcacccagaaatgctatattattcatttgggaccgtgagacaaacagagttcatggtcttgtacatccattgtcagaagacttttatactcaaataattgagtcagttgggcagccacagcccctggggaaaaaattgagccaaaagagtatagaaaaaatataatttctccaaaagactcttttttttttttgagatggagtctcactctgttgcctcggctggagcgcaatggcgttatctcggctcactgcaacctccgcctcctgggttcaagcgattctcctgcctcagcctcctgagtagctgggattacagatgtgcaccaccacgcccagctaatttttgtatttttaatagagatggggtttcaccaggttggccaggctggtcttgaactcctgacctcatgatctgcttgcctcggcctcccaaagtgctgggattacaggcatgagccactgcgcccagcccaaaagactctttctaaaaacagtatcagaataacatgttttccctaaaaacctctccactgagaagaatgtatatgttcagaaagaaacactggtaacatttcagaaatcaatgacaagataggccagtgcccaacaatggaaaacacagtgtgtgggactatcacagtgcacagtcccctagaaaccaaagaggaagagaagtacagaattttaaagcttgaaagaggcccaaagaccatgtaatccagttacttgcaaaccctttctaagggcagattcttttgttcaaatgaaatcttacccggaagatttatataaaagctgagatgctcttattgagtcaggaaggaacggggtggtctagagcctaacccactctactccactcccatcctctcacccgcaaaagtccttgtaagggctccagggagcccctggggttcctcaagtcacagtttgaaaaaaatcactatttcaatcccacttcctccttttgccactggggaaaaatgaagcccagagaagtccaggttacccagccaagataggggtctaggcagtcacctatcttccttcaacaatttttccatgatgacaccccgaatcctctcacgaactgccttttgtttctgcagactatatgcgtatttgtatttgtgtgtttgtaaccatgcccggtgatcccaagaaaacataacaaaccagtccttgctttcgctttaaagcttggagtctgccatttgaatacaacatctcggctgcccaagatggctagaagcagaatgcaaaaaggcacagggttataaatacctgtctcatagtgacctgggacactgtgctttgcagcctaaattaggcagagtttctgttgtcacgaagaagtactaaaaagcgggcagttctcagcgagacacctgagagctggcatccacatgaggagaggccccatcacttacattacactcatgaagcccagagatgttagctacatttttctaggtagcacagctaggaaatgatggacactgaatttgaatctaaaggcaactagctgcaaaacctgaggtcttaacactgggcctataatgctcttccttctcaccacatgggaaaaacggagaaagacatgatcttacaaaagcactgggctcagccagcctgggagagaggcagcgcagaccggcaccagggtggaatctctgtgtttcccctccagcttgcacagaggaaaattcctcagcaaacgcacgatccccgcacagctcccagggacaagaattttctgcttgtttactgagtcccctgggctgggagtggggggttgcagggcaggggtgagctgcgcacaaaagcaggataaaggtaaactttctgcatatgagaaccatttccccccctccaaggagccgtgtcacactgtatgtcaccgtcatcaaaggggctgtgcgtaaacctgaaaaaccaaacggacctgtctgtaggtgtcacttatatcacaaggctacaggtgtctttatttccactgcacgctggtgctgggagcgcctgccttctcttgccttgaaagcctcctctttggacctagccaccgctgccctcacgtaagcgccttttctttgcttttttggatgaatcgtaaggggtgtcagggctcagaggctcggcctggggcctgggtctgctcgtccatctccagctccagggccggcacctgcgctgggtgcagtcccagggcctccgggagctgtttgacacggatgtgacggcttgcctcagagagacctgcttgcctccgcaggccgtgtggccaccagccctcctcacagccaccactccctctggatcccttagctgaaccaaggggaattaagagaacgcgcccaggcgctcagttctctatcctccctaaagcttctttaggaagggaagctggattttactcagaaaaatattcagcttcaaggaaagccccccacctacccttctcccctgactgaattcctttccccaccggcctgcccactgtcccccaccccctcgatacagagaactcccttattatagtttggggcattttcaggaatttgtacaaaacagttttaaaagaaacccatttgccctctgacatctccccagaagagaatgcttccagaaaagcaatggttagggtttttccactgtgttctcaggccttgtcagactctgcagtgtgtggggtttctgtggggttgccccctgctgacagcgacaggtagcacaagctccctcctcaggctgaagccgggcctgcgtgtggatgccttttgtacgcccgaaagtgtgtcagacatcactaggtgcaatcgcttcatgttacagatgaggaaactgaggccagaaaggctagatgacttagggaggcagctctgtggttcagtctagtccagagacccagggaaaggggtggtttgcccatccgagtgaacgcttgattctgttgtcttcgtgttctctgcaatactgtttttcataatctaaggtattctcgggccggagttttcagtttggtcatctccctttttcagaagtcaccagagtggcaaatttttagatacattgttgatggctgatttttccctctaaaacaggattgaatatatgtattatgccccgtcctttgcatatatcggattgcatgatttaaaaaaaaaaaaatccccattttagagatgaggaaaccgtagttcgaagaggggcatgaatatttatataccacatctatatgaaaaaaagcttaagaatttcagcagtctgggtagtaagaaatgtgccccacgttcgcagcagcagaggtaggatttaacccctgatatatgtaatccaaaactggtaagctttgcatcgaagcctacagcaaactacatggcatacctttttggatcttcgctgcaccttcagaaaaacagctacaaacaaacaaacacgcaaactccctaagcgagctaaagaaaaatgaggaatcacttgacaagaggtcagcaaattggttctcacagttgctagggttcctctcagaagaacaaaccctcaagcacccaaccctcaatctttctttagcagtaagtgttgaaatactccactgggttctcctcagtgggccccttcttagggaggtccaagggctgggaaattgaccctcccttgctcacaagtcttgggacggagtggacatttgggtatcactgaggctttaaggaaggaaaaccgattttcttcccaatgataccactcagagggtggggttgaggaagcccaatcttggccacttttttctatattttgcaccctatggcctagttctgcccagtgatgatttggcccgtaaacagccaatgtgtagatgcttaattgggccaatttttggtcacatgcccagagtgaagttgatgatcaccaccagagtcaggaaggaattttcctcctctggcaaactggccaaggctgagtggtttgctccttcccctctctctgggaggctgagcaggggtgccgggttgctcaggccatgggagccacacctgttattgctgcctctgatttgtgtgacactgagaagcccacaggcctgtccctccaactcggtggaccctctctgtgtgcatttggtgtgtgagccagctctgagaagggttcagaagccactggaggcatctggggacctcagcttccatgccatctctgcctcactcccacaggtacctgcagccaactttctcatgtgtgaagtgagcccacctgattccaccaccttgtgttaatcattcttgagcttttcctacttactaggcagctagaatgatgactacatttgggggaaactgattccagcttccacggatctatcggtgggcagtgagtgagggtccagagtgtttaaggtacccagctaggctgggcaaagaatatccagttgtcctgaggtatctacctccaactggggtagaaggcagtgggcacaggagaaaagggagaagaggaaatcagggagctttttcagcactaaaagttcagtctgtgtgtagtggttggattttcctccaatttggtggacttgcttgaccaaaaaaatgcaaatataatcaatgtgtatgcatatgtgtgtgagtgcccaggtttggatgtgttggctcaatcaggtgggtgtctgcagaaagtcacagagttagggcagaccttgggggctgttttatctgtgttcttgtttagtagttgaagaactgagatttggagaggggcaagaggcagaatcataactccaggcccagggctccttccatgatgagccagctagtccctcacaaaatgaaaagtatgtccagaacagcaggccaagagacctcccagcagatccctgtctgtactggcgctgacactaggtggatctatcacagcgcttctccaccttttttttatcacttctcctaaggacactttttaggtcattttttcttaatcatctccccaccagaaatgtgagtaccagagataaactatacatctactgtagacctttggagcatgataaaacactgtaattaataactcagttttttgatccccaagaactcatctttgttccctaaagaggggggcaatatcaccccccttgagcaggcctggcctaacctcaggcctgtgttcacatatccctgggcctcagtgttacttctgagaaagggggctctggacatctgccttttcacacctatcctgctctacctccactaaagaagtccttaagagctaaaatgttcaattattgcaaggaccttagagggcctagagaagagaggctactgaatacaaagcagccattattcttgaactctcacacctactgcatgctggctaagtagccaaggtcttttgtggagagcccagagttaataacacccactcctgctgtaacaggaaaaaaaaaaaaaaaacacctttttctgcttttataaaagatattttttccaaaagcaagaaataattacagaagaaaaatagcatgctgtacacctgagaaggccctttacaaaaacttaatggatataatttgccttagaaggaattaccaaagggaatcagatacagcattgtgtatagcactagagagattacagatcaagtgagtaggccggtataaagaggagaaagaataacaatattaaaagaggtaaaaatactattgatcaaaaaatatttctagtttttatataatgccattcaatttaccaaatgacctttttttttgttaatacccaatgacttttgagagcaattagtgaggcatagatgaggaagatctcattcccactgtcgtgttttgtatttgatggattccttatttgacactgaagacctggggactgttttctgttttcttccgtgtggaattcacctctcctttctcccaacccaaagaaggtcatatcacaggcctgccatcctcttctttagttttctgagccttctggcccagaagaaaagggatatatttgtcttcagccctcacttaaaggaacttttctgaagtccagtccagaaagcagaagtggctttcagctcctgaggcccttcccttcctcataacctctcaccccatccctcagcatcctaccccctccctgcccccctcactcaggatataaaaccagccaatccgtgggaaaatcacagcccaaacccaggcagccttgacatctgtttgattgggctcccaggaggagatccatgcccacgataatctgcagagcacattaaccctctccaggcatcagcaaagagacttcccagcagagtctggaaactcttgggtgatggcccagaaaaggtgcctaagtgtcagaattcaaactcggttatatatttacatctggagaggagttctcatgcacgtttttgttgttgttgttgttgtttttgagacagagtctcactctgtcacccaggctggagtgcagtggcacgatctcagctcactgcaacctctgcctcctgggttcgtgattctcatgcctcaacctcctgagtagctgggattacaggtgtgcaccaccatgcccagctaattgttgtgtttttagtggagacggggtttcgccatgttgtccaggctggtctcgaactcctgacctcaagcgatctgcccaccttggccttccaaagtgctgggattacaggcatgaaccaccgcacccggcgtctcatgcacatttgatggtgatgatgatggtggttggagattttcaagcatctgcaaagaattgacctttggtttcagaatcacacaatcctgcccctcttagtactgaggtttgatttgctatataagtgtgccttggggctcaattgtgttttcagaaagagaagcagatgggctgagagtcagaaaactaaggacctccctgccacttaactctggcatccactggctatgtgaccttgagctagttacacaaattccctgagtctcaacttcctcaactgtaaaatggtggaggcgaggagggaaattggactaactcagtatcttccaacacgtggtactcacatcaactggcaacatgccagatgaatctggttaggggttgcaaactttttcttaaagggccaggtattttaggattagcaggccaaaaggcaaaatcaaggatatgatgtaaatatttatataaccacttaaaatgtaaccacttaaaaatgtaaagttttttttattttttattttttattttttatttttttgtgagacatagtcttgctctgtcgcccaggctggagtgcagtggcacaatctcggttcactgcaacctctgcctcccaggttcaagcgattctcctgtctcactctcccgagtagctgggattgcaggcatgcaccaacacacccagctaatgtttgtatttttagtagagacgggggtttcaccatgttgaccaggctggtcttgaactcctgacctcaagtgacccacccgcctcggcctcccaaagtgctgggattacaggtgtaaaccactgcgcccagcagtaaaattatttttaactgcaggctttacaaaaataggtgagggactgcattttgcctataggatgtagtttgctaacccctgatttaggtggcgcatgaaccatttttattcaaatgcttaaatatttatttttatgtatgtttaaaaaatcctgactttccatttatattgctaatataaagttttccttttaattagcatatttatgttaaaacaaaaagggagttgatgatttttttaagtattttaagtaaataatagtgctcgtagtatatggattgagtgaaattatcacagtcgtaggcaaatgactgaagtttaggaaacactggactagatgaagaattcactcctgccaatcttaaaattccatgtgtttaatatcccaagacacttaccagtggtgtgatcttgagcagctatgttccctttgcaaaacgaggaaagaactactctatgtcaacattatttcaagaatcagaaaaaagaattcgggtgaacagattgttttaatccaccaaacacagattattattttttctgaattgcggggagatgggattcagtagagagtggcatgtgggaacatgggaagcagcaaagttgagaccagcacaggcaagaatgtgtgcaagcgggggccctaggcctgttcttttctgccttccttccagcctcaaccacacaccctgccccagagctccttgccgccaccaaagtgtgtggggactggagcacagcaattagaatgggctttttaaacagacacacctgagccaccacccagcttcgctggctttgcatgtattacccggaatctcagagcctccatccctcacctatgaaatggaactgctgccagtacctatctcagagtggttgttctgagcagaccaggaagaatatagctaaagtgctaaagtactcagcatgaagcccaaagtgaagtgcttgttgcaattaccacaggtccacactcgtctccaaaaccttgggccgcacatgctgcagaattctgaattcttcacagatttaggaaggcgagatagtatatatacagtggagtacagattacccctcagggtttagggtttgctctaaacattaatatttctgcactgcatcataagaatattcactcagtgcaataaataaaactgcaaccatagttataaaactgtataacatatatatgttgtatgtatgtgtatgtatgtatgaaacagtatataaaactatataacatcaattcaggactgttttgtgctagaaaataagattgcagcaaacacacacacacgtacacacacacttcctttcagttttcagagctttcagatttcagaattatggattaatcacacacagtaattcttacctcatttttatttatttatttttttcggccagtttctgtggctcacacctgtaatcccaggactttgggaggccaagaaggggagatcacttgaggtcaggagttcgagaccagcctggccaacatggtgaaactccatctttactaaaaatacaaaaattagccaggtttgatggtacacacttgtagacccagctactcgggaggtggaggtgggaggatcgcttgaacccaggaggcagaggttgcagtgagcctagatcacaccactacactccagcctggcgacagagcaggattacatcttttaaaaaaaacaattttattttatttttattatttcaacttttagtttagattcagggggtatgtgtgcaggtttgttacctgtgtgtattgcaccatgctgaggtttcaggtgctattgatctcatcacacaggtactgagtatagtatccagtagttagtttttcaaccttggcccccttccctgcctcctccctctggtagtccccagtgtctattgtccccacctttatgtccaggagtactcaacatttagtgcccccttctaagtgagaagatgaggtatacggttttctgttcctgacttaatttgctcgggataatagcctccagctgcatctgtgttactgcacagggcatgatcttgttctttcttatggctgcatctcacgctgtttctagaagcatattattgaacatcataagtcagagttcaggggtcagatgtgagcaaacaggaaacataaataaagaggcaatattgcataatcagagcctccatgctccagtcccctctttgccactttctagttatatcactttggcaattgtctcaacccttttgcctcagttttctcatctaaaatggggatagacaggatatggcaagggtggaataatgtcactcgtaggtgacactaggcggtgcctgctcctagtgagtgacatatttgttatcatttttaaaaaacaagtatcgccctgctaggggctcctgcacagtgtggcttcaggagtacctcaccccagcctcctcacgacctctcctgctgttgcagggtaatgttggactcggtgacacacagcaccttcctgcctaatgcatccttctgcgatcccctgatgtcgtggactgatctgttcagcaatgaagagtactaccctgcctttgagcatcagacaggtgcgtacatttgaaggagcccatctgagtgcagccaggatgggctagggcaggaggtggtgctggccgcaggtggaagacaaagctgtgctggggcctaggaacaccagagttcagggcagagggctggagggctcctggatggaaggaagggcaacctcttgcagataaaaggtgctggaaccctcacccccaaactccctagttctgtggcctcgaggccgtgcacggctcagctaacctctctgagcctcgttttgctgccaagtaaaatgtacgtctcttggagttattatgatatttaaacaatgtagtagaaagaaagcccttagcccaggacctggtatgctgtgtttgcttggtcatggtggttttagccaacatttactgaacacgagctgtgtaccaaaccttgtgccaagcaccatctcatccttgccaaagccctatgagatgaacaattattatccccattttatacatgaagaaactgagatacagagaggctaagtgacttgccctgggcctcacagttaagctccatgcaagttgacccatcttataattgatatcacactgtggttattgatattaatatatcattattctctgagcttctatttctttttccctaaaccaggggtgatgagagctactataaggactaagggagccaaagggtgtaaatatgtagcctggcacaaaacaagtgttcagtaaatatgagcccctcactgttccccaggcctccttccccaccctccctcctctttctcagcctggatttctccacctgagaaggcagcatgggaccttgagaaaatcccatgccggagggaggccagccgagctttgcccccagaaaccctctgagggcctctgtcactgaggtgcttgggtgaccacatatcacagcacacctggctgactgctggcacaacaggagcacacgctgctcagcggtcatgcaagtgccaatcaagctgtcagtcctcactgagtgttaaccccatgtaggagtccagactcagtgtccggaggcaggcagtgtgcaagagaggccatgcctccagggactgcaaaaagtccactaccagaagcccctgcctctggggccagggaccaggccacactcacagacttgaggcacttacctacataatgcaatcccacacctgcccccaccccacatggacacacatacacacacgcgtgcacacacacacacgcacatgtgaaatctctcaccctcatctgtaaggtctagatcattgcatttggacttgaatcaaacagatacatcttacaattctcctttaggcctaagaagcaccttgtttcccagaaagacatgagaaatgtactgtgtctccttcccttgaactttggttaacaggttaaatctgaaggaggaaaatgaaaactttcaagtcgccgtgccctccctatgtttcccacagtggtggggcccagctccaggctctctctctacctatgcataaggccaggcctcacttaacccagacctgccatcatgagagccccctctttctgcctattctgctgggaagtagttggggtggcagtgggaggggcgggctacaaccagctgccccaggcaatggcctgggcagtgaagcagcggctctgtgtcatgaagacctggtgtgtcccaaatgggaagtctggctctgacactagctgtgtcatcttaacctctcatgtcccagttagtttctcatctgtaaaatgggaatgaccacaatgctaccttgtagagttgttatgctaatgaaatgagttatcatatgggaagtgtttaggacacagtccggtacctggtaagcacacataactgtttaaaaaattgaaggattagctggacgtgatggcttacacctgtaatcctagcactttggaaggccgaggcaggattatcacttgagcctaggaattggagaccagcctgggcaacatagtgagaccttgtatctacaaaaaattgtttaaaaattggcctggtatggtggcacatgcctgtagtcctagctacttgggaggctgaggcaggaggatcccttgagcccggaaggccgaggctgcagtgagctgcagtcacgccactgcactccagcctgagcgacagtgagataaaaaaaaaaggttggggagcaggcatggtggctcctgcctgtaatcccagcactttgggaggccaaggcaggcagatcacctgaggtcaggagtttaagaccagcctgggcaacatggagaaaccccgtctctacgaaaaaatacaaaaattagctgggcatggtggcacgcacctgtagtcccagctactcgggaggctgagacaggaggatcccttgagctcagaaggttgaagctgcagtgagctgtgagtatgccactgcactccagcctgagcaacagggggagactctgggtcaaaaaaaaaggattagtttcagtttgggataatgaacaaattctggaagtgaatagcactgatgactgtgcaacaatgtgaatgtacttaatgccactgaactgtacccttaagaaaagttaaaatgattaagtgttatattatgtatgttttaccacaattttaaagaatgaggttaacagaagtgatcaccagtggcattgccagagttccttaaatccaaccaagtcttagacattcagacacagctctctggccagaggcttccgcatttccatcaacgtcatgaaaggttagaccaggccattgctaggatcccttccagaagcttctgtgattcctgcatcaggcaatatcgaagacacagccttctcctcccaccacccactgagaaaacagaaattcccatcaagtcatgcggccagtgaaaataaaatagccttcgagactggcccaggttcctaaggctccctgagggatggagccaggctttcaagtagccaccggccctcgggatttcaggggaagctcagtatcactgacctccaaaaggtcgaagttgggtgtgaaatgttcacctggagtaaacacctctcttggagctgcctgggcaccgggtgagccttgtagcccctgctctcctccacaggtgggaggattagcaggaggggccttctgtcttttatcaacaaggacgttgccacccagagaggtgcagccatttggagtttctacaaaagccccctctggcaggggtgggtcaggagacagccagctttgcctctgggcactgctcagccaactttccctgctccatggccagcaggctctgagatacctctcctgaggtccttacccacctcccaggaaatactatctggaattctgggccctcctaaagattgttgcagtggcagcttcctgttcacccaggttcatgggcaggcactgccacttaccagccatgtgacctgcagccagttttttgagatatgctttcctctgcctcctggagttggggagattgaatgatattttgtgtacgaagtgtttagtcacgtgcctggcacttgggaagtgctcaccctagccaagaactcctcaccactccctgttgggtggaaaaacagccttccctctcctctcttcattgtccatattgaacaaaaataacaacaaaactccatctcaagcttctcagttcagaatttttaacagcttagatatttgagacctgagggaagggaaggaaaaggagaaaaaaaaatgatgtgccttctagacaaatgatgtctaggagagggaagggtggaatactcagcctatttaggaaaaccagctgttctcaaaaacccttcaaatggcttgagcagagtgccgctgaatctgtgccctggtgtggtaaccacaaaggattctgacctgctctttgaagcaggacttctgcttggctgcactgcaggcaggaggttggacagtccagattgcaaaatactctagaatttcatgaacttaccctgccttgcctgtggctttttcaaagtaaagaacgatgactactggaaaatgtatccaagtgggcgggagagttggttgggggggaggctgcatgtagttcacatgcatatgatatttttaaaagatggtttctccagtcgagttccagtagccaaccctccagtagtcattgagtaccctggccttgccactactttctttctggaattctttccttaacctccacagaccaacacccctcccctgacagccaatgtgccacgcacacatgcagcgcctcctttgctttggaatcttgcttatactttgtcagctgcagaggtttctaaactgaggttcctgagaggctttaggggtttcccagaggttccttagggaccaccagagaagggagtggaagtgacagttgagaagatggggcttcagtccttctctgtccacctccatccctaagcatgcttctccactttaattctgaagacggtagagcacagtgaggctgggctgcaggagccagaatacacccagataacccactcctagctctgccacttacgggttacgtgagcttgaaaagggtcacacccgtgagccttactttctccctttgtaaaatgggtaacatgacagaggacttcatagcattgtgttagggacaacatgagaaagcacaaataatttagcatgataacgggcacatactaagtgctcaataaatatgttagctataatattattgcacaatgtgagattttatttgaagaaagcactttttgtaagaaaaaaaaaagtgcaaaacccactggtcagagaaagaggcatctgcatccccacatgggctttcctaagcaagattcatgttttatgtacagaagcttgagagcagatacaaaggaaagaatctaagaacttctaagtcaaaaccagatcaacaaatacaaaatcatctgaaagtctgaggtgagccctgtggcagcgcccacacctcaggaggactcactgttggccacctctagcccagtggacatgcacctgagccttctgggtggccatggccccaggactgctcagggcttggctctcttggccccttcctaactccacgctcccaaggccatggctactttgcagccagcccttctcctgttttctctatacagtttcctatgctgcactggacttaacttttccatctcatggtctctttccataggctatgctggaaagccaggaaggggtatgggatggagctggactggctctgggaggaaacttgaaagccatttatcatttcaggttttccctcataaagtccttcctttcagtgacaaagctgcaattgatggtgcccctgctatccagttcattcaccacctctcttcagtgctgccccgggcaaaacactttcccaactccctatgctagtaaatcatgctaattatggtccaagtttgtctaactcgggcctcctctgacccagactgtctgtcttgtcccagccaagccctgagcttgctttactgtagtttttcctcagctagattgaggaaggccccgtttccctgagaacaaatgtattcccaaaataataaccaataacaggtgacttatactgaaaacttactgtcattcagatactaggctaagttctttacctgcatcatttcctcttcacaacaaacctcctaagatataggtactattgttatttttattttaccagtgaaggaaactgaggtccagagaggttaggacagtttgttagagttgcacagctaatccattgaagagccaagatttcaaatcaggaaggtccatctccacagcccaggctcagttgccacacccaaccctgtgacttccattggaaggtcccttccactccaacaggctcattggctgggaacaagaattggattcttgtacagaattcctgtagctggcaggttcatctagcttcacaaactttcttaccactgctccccaatcagcagaggaaaaagatcaagttctgctccagagggacataactgaaagctctaagctcaaacttcttttagaacctgcaaattttgcattctgctgcatatctattttgttgtaatataaaaatcaggccaggcacagtggctcatgcctgaaatcccaacaatttgggaggctgaagcaggaggattgcctgagcccaggagttcaagaccaaccagcctgagcaaaatggtgagaccctgttcctacaaaattaaaaaattagccatgcatggtgttgcacaactgcggtcccagctactcaagaggctgaggcaggaggattgcttgagcccaggagggtgagcctgcggtgagccatgttcgagcaactgcactccagcccggatgacagagtgagaccctgtctcaaaaaaaccaaaaatcaaaattttccctcaaaatttttgctttgagtgaggctccaagaaaatgaacagtgtgggttccaggatctttatataggaagggcttagggacaacaatccatttggaagagatggccaaaggacatgtctggaaatgattttttttttttggaaatggagtttccgtcctatcacccaggctggagtgcaatggcgccacctcggctcactgcaacctccacctcccgggttcaagcaattctcctgcctcagcctctcaagtagctgggattacaggcgtgcaccaccacgcccgctaatttttgtattattagtagagacagggtttcaccttgttggccaggctggtcttgaactcctgacctcaggtgatacacctgcctcagcctcccaaagttctgggattacaggtgtgagccactgcacccgacctggaaatgattttttaagaacactgcataagattgagaagacatcagttatctataacaaagaaggaagtgggggattaatggactcaccctctgatctttctcttgaagatgcataatgaatattatgtgactttcaattacctgctctgtgcaccctggggatacagcaccaccaccatcaccctctcctctgctcagtttcagaagcttgagtcttgtgtgtgtcctgatgattaagaattttacaaagtcacacagactcgcctgtgtccccagcttttaaaccaaagatggcagcattaagggacctaactcaggctggcaatgcaaagacaaattagctaggtttggtttctaagcttggtttctaatataactcctatttttttatgaagaaaataaaccgaaggtctagaaagggacaaagcagctggcttacacattaaaaaaaaaaattagaagtgtttgaaggaatgtaattaaagtggtgacacgggaagcccaggaggtaaccctaatattgacaagtataagtggatgatatttaatgagcacttgccatatgcctggccctgttctaagtactttccatgtattaatttacataatccttttaatagcccagataagtaggtcctattatttttattttgcagacgagtccaaggaggcaggaccactaagtgtgagagaccatgtgccctttcaactttgaaggggaattcaaaatataggaatcctggtttcaagtttgagaacagtgattttcaaggagcttcctggagctaataccttcacctccactcccagtaaaacagggttgcttttttccagataagttttaacttgaagaaaatattattcaaccataaaagaatccttcaaagtcttagcatgcccactccaaacaataatcttgaaggagacaagtggccaaaagcctgtcagattgttcatcacaaagtgatggccaggagtgatccagcccatgaagacattttgactgggcttcccgtggtgttttgtaaaaaccaagccagttgccacacttgaaaatagaaatcaggagatttcagttagcaatctggtcctggcaacacaaggcccacctttccacaaggcaaggggtcgggtagccattgtgcactttggcatgaactttccaatccccactgtctccacatggggccacttcaggcatagacattatctgctgaccctgcgggcatctggtgcacccacccagctctgaaagctaaagtcctccttctgaatttaaatgcatctcagattatagcatcacttgtgaaaattcccctagaatttctgaaaactccctctagttcaattcttccttccaatgcagctggccctgaaacaagtgtcctgacccacttcagacttcaaaggagctggcagagcctgctgcttaataatagtgacctatgggcattcagatcaagcctaccaggcccatgatggtctactggtcgacataggcagaagggcctcatggctcaactttcccaaaatgttgagattattttataaatgatagaagcgttgagaaaaacactttacatttccagacaacacaacccattaaaaataatatattctgcgggtatataaccccttatttgattgccctgagttcatgtcttccaagtagcaaaagggtcttcttcatgtcttcattaaggttctaaacactatcatcttcagtctctccatcctctttctgattcttcaaagctagattgtattttttattttttctagtcaggctctgcttatccattatttataattacaattacacatatctaccttcatccaaatcttgctttagtcagtcttgagatgtgtgcccaacttggtcctcctcaaccaagaagagtggggcgtggtaagagggaaaatgccacttttccctcttcagtagctcctttactgacaggccgcgtgaccttacaggggtcccgtcagtccccggaacggcaatctcctcacgtgtaaagtggagagagtgactgtcagtcacctggtcagtcagtcacactcactgaggtaggcctgtggtgggctaggccaggctccaagcactcctggttcagggcgagcaaaagctctaggtctggaggggagggatgaggaggacgcctgatgggcactcagtgaggaggaagagacctctgcgagggggagtgaggatgagcagagattcctcaggagaaggcagatggggaccacgttccatccaaagagaagtcgctgtgggaagactctgggccgtggagcctcctgaaagagaagagcaggagaggggctggtgaggaggggctgacagcggcgtccctcgtctgggcagcctccgctctgccactctcctcccgtcctgaggatgggacccccggaaaagaggcctgccatggcacccagagcagccattttcctcccagttctggggctttggaaggagcttgcggatgaggagagggagcctccgcagggctctggctcccctccaggggccgaggccgcacacaaagccgctctgtgggtgagcttcaaagcagagcgccgaggagcagggagccagcgccagcaacacctccccggtgtggggccgactccccgcctgggcgtttctccgaatccttgaggcccccttggcttccgcaaacaatatggccctcttcaagtgccaaagaaaataacaagggggtggaagcagagaggggaggggagggaaacgggaacagagccttggcgaaacctttccatgaaatcaactgtgccctccgacggccgcacaccgatggccatctagggcagggcccgcagctgaaaaatgtcaaggctcataaacatctctcacaggacgccagtaaagtccaaaaggcccctcaggtttactaaagccagaaatcagtagatgaaagctcaggccgaactcaggaatggccccttgttctgccaggaacccctgcctgccctgaagagcccccacgggcctggtaagccagctccagccagtggccagtgagcaagacctgagtcatcggtctcaccggctccctggctcttcctatctgccaggtagaggctacgacatcagcctcaagcaccctggcacaatattgacgctttgatcttaatgcatataaaattctgaaaatttttaaataaaataaatcaactgcccctccacccacccttcggtggtaaaagagatctctggaagacctttgagttttaaggggagcctctatttccttttttgtggaatagcccaattacacctactggataggattgttgaggggacctgagaaacttgagacgacaagaacgcgtagcgcctcggctggctgagggtgctgagtgagtagtagcacctgacaggcagaggacccacctcctgcctggaatcatcagcaactgacaatggtgcgagttctactcacctttaaacgctgcaaatcgcaccactgctatttgctgtggggtataacatgtgagggaccctttctgtcatcgtcaccttagccactctctgctctctgcctttcttttcaggccctcgtgttgtgttctctccagctttccccgtgcctcagccactcttcacgttccatctctgctctgtgctgacccggtatggtggtgtggggagagcaatggctttcaagttcaggctagggttcaaatccagctctgccacacgctggcgtgggttcttgggaaagtccttcatgactttcaagttcctcttctgtgatctcctgggggacgggggaccaaacctgtccaccatgaatccttaacatacaacgtgtggctgcacacatagtagatattcaataataatgtttgtaatagcatttaaatcctccaggctctgttccaggtacttttatgtatattaagtcatttaatctgcagaacagcactatgatacaggtgctgtaattattccaattttaccagtaaggaaactaaagcttttatttattgaatgaaatgaataaatgaatgaatgttttccatggcagatacaataattgtttatgtcaaagagcctgaccaagtacctaataccgcacctcttccataccttatgtccaccccactttccatttctcctaagaacagaaggacagaactgttgaacaccaaatctctacccctgggccaggcagagccacatgccagcctcccagacagatggcactcacaactgtctaggcatgtacacgactcctctaaaggagtgggggctctgatctcaggatagaaattactctgaacaccaccaaaaacacaagaacaacaatacaaccaactctcccatgaccaccttcctctggaggtgcctactatggtgacgcaaggactgtcagactctgggcaatgtctaataacccaaggttcttggcacaagattgccagtaactgtgcagaaacaaatagccagcattgggcagctgccctttaaagcatagggaatcaaaaccagcttcaaatggtttctgacacacggtaggcatttagtaactattgaattggttggtaagtttctgtgtgccattctacatacattaaccccaaactccataatagtcctgggcattgagcatattatccccattttacagatgaggaaactgagacttcaatgtccacagaccttgccaagcggaaagtggtagaatcagaatttcaacccagcttgtcaaacagctgagtttgtgcttttgatatcatgttatctggaatcaaataactgaagggctgttttctttctttctccactaaatgcctttttttttgagcatcagcaccaagactggttctttcttgcccctgtcattccctctatgatgccaaagttcatctgtaggatccagtccctctggttttctctgcagaatagaaggtgacctgggctctgcagaacacccagggctggaggccctttcaacttattggctgaggaatgaggatgttacttaactgatgcatccttcaggggccctctcgaaggctgtcttgggactgttgtccctcacttctttctcctttggtgcagcctgtgactcatactggacatcagtccaccctgaatactggactaagcgccatgtgtgggagtggctccagttctgctgcgaccagtacaagttggacaccaattgcatctccttctgcaacttcaacatcagtggcctgcagctgtgcagcatgacacaggaggagttcgtcgaggcagctggcctctgcggcgagtacctgtacttcatcctccagaacatccgcacacaaggtcagtgttcagagggccagacctccaggggagggaccaggattaggaccaaacaactttgagaagtcctttcccatcgtgtgacttgcacagcaaaattttactaactggagttctcgttaatccaaaccttcaataactggaagctagtatgccagaattggggattttagggaaaagggagcgagttacaaaaatgcaaattgagtgcatttaaaaaaagagaaagaaaaacggacaccacgttcagggactgcccaggcaccaggctgataataatacagtatattcataatgatttgaaaccacacaggatggacaaaaaagaggtttgtgcttcatctctcattaagcagaagaggaataaaattaaatagactaccttcccttttctacaggagtccaactaattatcatttcatcacattcctaatggtcaaggatcaagtggccagaaggtggcgccaatagcattatttaactcttcaacaggccttttgcatgcagaatgtcgatgaacattttttcaatccagaaaggttctttgagaacatcgagctctaatgtctcaaagtcacacatagataaaggaactgatatcctgagacattaaatgacttcctcaaggtcacacagcaaacagggctgattcacagaaagtcagtacaaagcaagggcttggagatccgaaagacctgtgttccaaccctggctccaatactccgagctacggaacctctggcgagtggcttaagctgtctgaatccccactgcctcatctgtccaatgggataatgacacctccatgggctttttgagaggattcagggaaatattacctagaacagcatatgaagatggaaatgcagtaaatggcagctgtttttccatcatcattaatataatcaagaggcatattataggatgttaaaggaagcctatctcagctcagttttaagaaggatctttttaaaggttagtaccttcttttgaaaaggtaattcagaagatacaggagataggacgatccccaccactggagataatcaagtagtctaatagccccctgcttgaagaggaggatatgacagcgcctcttgtttgcacagaaaaaccacagaggaccctcctgctctgtgattctttggcctcctcttgatcctcatccatcatgagcgcttgaaggcagaaaagctaagaatggtggcccttgggcactacatggctggggccctgggagccaaaactccagtgacaatgacctgccaagagctgggatctgtgtcctgtgctcagagtgggcactccctgaaagaggacaagtttgaccaagtcacaacggctccagaagaaggagcttgggactccatttaggatcctcccaagggaacaggctcgcacaaaaatcctagggccacagagaggggtgtattttattctggaaaaagatgcagcttggcaatgccagcttggccaaatgtcaagtcaacctcatttgtctccatgctcttgtgcagcccctgtgctggcatctcccaccacaagcacctctcttccctggcaatggttgcatcaaaaaacaaacaaacaaaaaaaacctgttggccaggcacagttgctcaggcctgtaatcccaatactttgggaggctgaggcaggcagatcatctaaggtcaggaattcgagacaagcctggccaacatggtgaaaccccgtctctactaaaaatacaaaattagacaggcatggtggtgcgtgcctataatcccagttactcaggaggctgaggcatgagaatcacttgaacccaggaggtggaggttgcaagtgagccgagattgcaccattgcactccagcctgggcaaaaagagcaaaatcctgaaaaaaaaaaaaaaaacaaacctgtccctggttttattaccccagggccctgtgcaaaactaataggctaaacctaaaaaagccaactgctttttaataggtcatacattacctcttcttattgtaaggaattcctgcaatcacaatgccacctttaatggtgggatttcaagcactctctaggccaggagtgttccatattgagcagtaaaactatctactccaccaatctactccattctgaaattcctcttttaatgtttctcaatcagatatgtggattgtagattgtggagatatatatattgtgatcaaagttcacactgtctcccatttgcccaggagacatcgtttctgcctgtgatcctagagtaattattattaccatagcactacctttcatcctcaaaagtgtctccatttagatcataaattctacagttgactgggggttattacctcatgtatgccttatactaccccataggttttgactctggcagaacaggacacagaataaggcagttttatggaggagaggagctggaagggggttgtaaggcctcagcaccatccagctcggtaggtattgcagtaggatttaagggcctagcaacctggggacactggttgctgggaagcaaggtcagaggttggcttccacagcctaggaggggaatgagcccctcttcaatctcccatcctgttctcagtcggccctttggacagagtcaactgaggcgcgtggctgaccaaaaccaatgagaacatgacgccaagaataaaaaatcacaactgtgccctgctccagtctgcttagcaagtagagattagtcctcgtgttggaccaagctaggacataggtatccttcagcctaaactgctatgtgaaaacacaatctcaaactcctcattcaaccccagcccaccccattctacagaggagagaaccaaggtcctgacatcatcttccatatcctcattaaactcagcattcacatagagctttgcacttcttgcaacctcctatgcccattctccccactgaccagcacataacaggcattccaatccccaagggattagaggccatgtcagagactatagactcttagccacaggggagcttagtgggtattttatctcgtgatgtcaatgagaaaaaccaacaagcccagagactgagtgagcaaggctgcacagggatcagtagcccggcccagctcagagcccagccctggaccccagaccagagcttactccccagtgcctgctcagaaaatctgcagaggctgctgggaagcctggttctgggtgctccctccaaatgacctttaataatgaggaaattatcacctctcagggatggcttcagggtgacactctaagaccagatggtctccaaggttccctctaaattgtaaccaacctcaagagggacagtcactccacttccctccaacaccccctctcctggcctggccagtggaaaccaggattgcatggtatggtttctggatttctttttctttcccaggttactccttttttaatgacgctgaagaaagcaaggccaccatcaaagactgtaagtaaccaagctcaagccacccaaggctctgtcaaggttgtcattggtacatgggcttgaccattcttttaggatcatactgaaaagctgatgaaccaaaacaatcccagacctggagaaagcagtggggaaaagcgtggtggaaagagtgtgacagaaagagcgtgggtgtgggtctgtaggaccatagcttgggtctatggattgcttatcgtctgagactccattcccctatctgtaaaatagtgtgacccttgtgggtcgtggtaagtttgagaaatgatgcacacaaagagcccagcatgcgccaccagtgtagatgctcccaaaccagtatccatttgtcatacattaataatactattagaagccttgtggttcataatgcttaagaagactctgagctcactaagcaggtagagtttataattataagacgatggaggatctcaaatagccttgttgatgctgatgattaaccttccctgtttcacttgggcagatgaagaaggctcgggaaagggatctttggtgctttcatttttcaaagatgacaatgatgattactattagttactgagtccctggcccagaggccaggaggaaatgtggtcctgggcaaaccccattcccccatgggcttcagctcagtcatctgcagagagggagcagagcgcatggtgatttccaaggcctctgagggctgcaagctggaggggcagacacagagggactgttcttatgggttatgattttttcctccttacagtcccaaacaatcaactgaggactcacgttacttggatcctagttaacaaaagtttttggaatttcgtttttcgttttgtttttggtgctttagcacaggaatggccagttcgtggaccacacgctacgggcttaagcaggtgcaccctgctctgcagaccgcagctgccctcacacgagcagctctgcattctgccaggtttcatcactcggggccccggggtgtagcatctcacccacctgtgaacaaagctcacacactgtttcctggtgctggtagaatcccttgtgatccatctgcagcagcctgggggatgtaaatcccagcttttaccaccacacctaacccagtcaaagcccctggaagaaatgagcctgtgaagcctgggagacattactgtggccaaaggcttgagccacaggcaggcatttgctttactctctaagtagtagtgacctagacctgaccaaccctttctccaggggtcagtgtcttcacctacaaataggaatcacttaccagcctgccttccacacgacaaaaggaagctaatacaatggaaagagaaggtgtgtccagtaagttcttttgaagtaggtgtaacctgaatatataactagccacagttagattcaatgtgctgatgattatgatgatgaggataaggatgaggatgacagctagcatttattgagtgcttcctatgaaccaggccctgtgctaatatctttatagacattgtgtcaggtaatcttcccaatatgagacaagccctagtgctatagcctttttataggggtagaaactgaagcttagaggttaaaggtgacatgcttagaaggcaacagatgacccaggtgtgtctaaatctaaagcccttcatgcctttgctccccttacccatttatttctctcctgtttccttcattctttgaacaaacatttattggacacttactatatgccaggcccagagctaggcactgtagctgtggtgatgagcactatttgagtcttgctctcattgaggcaaggtcggggtagagatattaaataacccaaatgataaatacataactgctcatcacgatgatattataaagggaaagatcagcatgttttgtgtgtaatggggaaagagtgcatttaaactgggtccagggacagctatttggaggaagagatagttgaattaaagcatgagaagaagttacccaggaaaagagagagaagaaaaggttccaagcagcgaatggccagtgcggaggtcacgaggtggaacaatcttggtgtcttagagaaagaaccaaagaaggccagtgagtctagcattagcttggccagtacagtagccactagccacacggggccagtttaattacttaagttatattaaaattcaactcctcagttgcatagccaaatttcaagtgctcaatagccacaggtggctgccatcttgaaccgctcagattctactgagcggttcaattctgtgatagtggaggcgtaataacttgtataacactcacagcatcagtagtctcagcagcatcagcagaaggaggggtgggagctgaggccgagagcaggatagggccagatcactcaccactttgtgggcagcagagttaggatttcattctgagcaagctgggaagccactgaaaggtcataagcacgaaagtgatcagatcacatttacattttaacatctcttgggctgctattgtctgggtcagaaagcagtctagccaggatgctcctgcccagaggagtgatgatgatggtggcctggacccagcgatggggaagagatggggagaagtttctagaaatagaagtggtggggcaagggctctgggctagcatctctggagcatgaactcatggagacaagccctctgctgatggttggtgccatgggctcttccctgtctgctccatttgggagcctagaactagactgaactcagggttaagaagtttaagtccacctgagagccagccccagaggctttgccttattccagcctcaatgccctggccaggacaccatggccttcccccgagacccctgaggaccatctctggctctcccccaaccctgatgatcatgctttccccaaacagaaaccctaatggatagtttgatgggcacaaggggaggtatgaagacgacaggttggtagtttatacaatgagcccattccagaaagtccaggacacgtgatcatggtgcctatggctcaggtgatgtttcctgatctcagatattccctgacccaaaaatgagaggctgcctttcagtgctgatgtcccatccaaagaccaagacctggccaataaggaaagtggcatcctggggctttcagcaatgttcccattgggtcttcaacgaaaatgaatatagctgtctttaccatttattaagcacttactatgtactaagcataacactgtgccaagtgttctgcttacattatcacatttaatccttgttctagctccattagggagtgttattatctccatttgcatctgaggaaactggaggtgtaataacttgcaagtaagtgcaggggtgagattccaacacatttcctcaaagcctgtgctttttacattgtgtgctatgcacactcacacatgcacgcacacacacacatattcacataggcacacatgttcccatgcccttctattcactctgctgcccactaagttgagatccaaggcctggaaactcctcaagttctgggcccagcttgacaataattcaaacaacaggatgattttcaacttagtgcccactgaaggtgcccagacacacaagctacaaaactgtcagagctggccaaagtgaaacaacccattccctttctgcttggtctcttctctccacctgtcccactccccacccacctccactgcagaaatgccagtagagggtgttctgggcccaggaaccaagcctacagtcctgggttcactgccaggcacctccctgctcctgagcctcagagcttctctgcaccagcctggcatggggtgtgggctccatggctggactgctagtgtcatggggatacgataaacttgtttcggaaaccctgcaactcaggcccccaccccagcttctggagtgcttgcaataaacaattgaggatacatcctttggccacattttaaaagtgtccaggctcaaggccaaccaagcctctccaaatcccacagactgcagagagcctgggccatgtctcccctcatcccccaccagctgcagggacatagtcaagatgacaaaagttgtgagcaagggagagctgcaccctgaaacacaactggcatttacagagaaatatagtgggttcacggtggtgctacagatccaccacccagcgctggtggaggttgatttgggaacctgcctcagtattaacattgcagtaatgactttggccccctgcccctgccaccaccagccaagcaaggccttgactagtcaaccaatgagtaccttcaaagccatcactgcagaactaggaacagacagaacagggttatctcagcaagacccacggaagaaattcccatcagcctcataaacccctctcatgctgatctgtactgtgttcctcctaccaagccagatccccttcatccaaaacatgggagaaatcattaaaatcaaaaggacaatgtttttcctcccacttcttgccattttggcatttcagtgaacgcttgttgtctattcacacttaataattcacctttgtttatgactccatttgttttctcttctcctaaaagattaaatcaaaacaacagatcgatctgggggtagtaatagacatatctcataagggtggggaaggttgagtgagcatctgacaatagcaaatgctcaacaaatcttagctaataatggttcattaaatgtctattgaacacctgctgtgaaagacatgataaagtagtagttatgaacattagctttgcaatgagaactctctggttccaccatctggaaaagattcttaagctctctggacttccaatccctcctcaataaaatgaaaatcataatagtatcacccagggttgttataagtttgaaatgagatactctatgtgaagcccttaccaagcacttggcatttagtaagtgctccgtaaatatcagctgatagtggaggagaaaaagagatggatctttccagtaaggtaggcccagtgttgtgataccaaggaactcacaggtgctctctatggggctcataaggggtctaacccagagggtcagttcagagaaggcttcctgaagaggtcttgtgagaggtccgctgggtagaagtggagagtggggagtctgtgcaaaggtcctgaggcagaagaaagccttgcctcaatggaaccatttgacctaagggaagggaaaaagttgggaagcagaaagagataagactggagatctggatgggggtcagtctgtgaaaggcctatctaatgtgcagccttcatcctggaagaaatggggaaccactgcaggatgttcagctggcgaggtgacatgacccagtggcactgagagaggtcaccctaagcagcagtgtggggcacaggatgtcattcctgcccttccttcattcagcagtgacagtgtacatactagacgatgcagcagggatagttgtacagtataatatagtatagtatagtatagtatagtatagtatagtatagtataggtaggatagtatagtatagtgtagcacagtacagtatagttagtatactacagtacagtgcagtatagttagtatagtatagtgcagtatagttagtatagtatagtacagtacagtatagttagtacagtctagttcatatagtacagtatgtacagtagaatacaatatatggtacagtatagttagtatagtatagtacagttattacagtatagtgtggtatgattagtatagtatgctacagtataatacaatatagtatagttggtacagtgcagtatagttagtataatacagtacagtatagtatagcacagtacagtatagttagtatagtatactatagtataatacaatatagtatagttggtacagtgcagtatagttagtataatacagtacagtatagtatagcacagtacagtatagttagtatagtatactacagtataatacaatatagttagtacagtacaatacagttaatatagtatagtacagtatagtgtggtacagtaaatatagtatactacagtgtaatgcaatatagtatagttggtacagtacagtacagttagtatagtatagtacactgtagtatggtgttagtacagtacagtacagtaatagaatagttagtatagtgcagtacagaacagtgcagtatgatatagtatagtatagttgtcatggtatactacagtacagtcagtatagttagtatggtatagtgcagtataatgtagttggtgtagtatagtatagtacagtatagcatagttaatatagcatggtacagtacagtatagttggtatagtatgctacagtacagtatagttagtacagcatagtatgtacagcacaggatagttagtataatatagtacagtatggtgtggtatagtacagtatagttagtatagtacagtatggtgtggtatagtacaatatagttagcatagtacagtatggagtggtatagaacagtatagttagtatagtgtggtgcagtacagttactatagcatagcacagtggctgctcgatgatactgagcacctactatatgcccggcagtgtgctaggtgctgcagggttatgttgggaaacacaaatccctgccccctcgtgtgcacagacagacagtgaacttcatgaataaatacaccatagaatatgctcgaatattctatgtaaaatgcggagcagtggggaggatgtgcagacccaacttgagtggtcagaggagacctcactggaaggtgattttgaaacaggattgagatgagggcgtgcaccacaagtatccaagggaacaacgtgcaggacaagtggaagagcaactgcgaagtccctgatgtggaatgtgcctgcacgtttccggagagcctgaagccagggtggctggggcaaagcaagcagggggctaagagaagcggtggagacgagtgtgagctggaggggcagatctggtgccaccattttaaaaactcatatactactctggcaatgcttgtcctggtgtctcaggttgtgactcacagcctgagttattagttaaatcagcacggagttaacgtcttgctttctacccttcataagctctagtctctttgcttctacttgtgtctcttccagtctgttctccacacaggagcaagagagatcttcttaaattgaggatctttgctctacactttgatataaagtcccaagtccttaccatggcctcctaggaaggccctgcacggacctcgatcaaaaccagatttatttattctcatcagggtggggtgagattgaatacaagtgctcctcaaaggcacatcttaaagcatcttgacacctgccacctagtaatcacccccaaagtgcctaatgtggtgtcttctactacaaaggcattcaattagtatttgctcatttgggtatgacttgaggtctgaatgtggcctctatatccctttccactgctataaattattctatttcagatgctgattccaactgcttgaaaacaagtggcatcaaaagtcaagactgtcacagtcatagtagaacaagtaagtgcaggatgccagttttcattctaatttcttaaaaccattcctcagacaaagtcatctactttaataagctttgaaactaaatgtttgagttggaccagttactccccaaggaaggtagtaaagaaatcagtgattgcttttatacgtattatcaaagtcagattgatttcttctcatacgagtgggtgagattaagcatctgacaatagcaaacgctaaacaaatcatagctaataattatccattaaatgtctattgaacacctactatgaaagacatgatcgtagttgtgaacattagctttggaatgaaaaccccctgggttcaagttctggctccaccatctggcgccagatccaatcctgggtccactgtggcttcatctcagaggaggataacaaagaaaacaccgggaattggcaatcctattagcttccccagcactaagagatcggcccagagcagtgtcaagcttgtaatttcacaaatgtgtgtgtagaaaacaattgctatgtgctgggcataattctaaccacttggtatgtattaaatcattaaatcctctaacctgtcctaggagacaggtactctttattatcccattttatagatgaagcaaccctaaaagtttatggttataaaggtaggaagaggtgaattcaggacccagactcagataatgggactccagagctggtcttaaccaccatatcatagaataagagaaataccagcctttcatgaaaaacgaatttgcaggatcagtccacccagacagttgtggctgtggaatcagtacaaccatgctgcctgtcagaaagaagaatgaaaagatcatttgactgtcatttcactcattccataaaagttaaactgtagttccatagaacatctgtgagtcacagtgttgccagtcatgtaaattgggtgtctctgaatgtgtgtttcacaattgcttcgatgggagacacagacatgtcacagctcagtaagtttccaggtagagcaatcagtcataacaatgggaaatattccacaaagcagcaattctcatgacctagtgagaaattgtacatctcttctcttaaaattaaaaaaacaagctgggcacggtggctcacacctgtaatcccagcactttgggaagctgaggcgggtacaacacctgaggtcaggagttcgaggccagcctggtcaacatggcgaaaccccatctctactaaaaatacaaaaaattagccaggcatgatggtaggcacctataatcccagctacttgggaggctgaggcagaagaatcgcttgaacccaggaggcagaggttgcagtgagccgagatcgcaccattgctctccagcctgggcgacagagcaagactctgtctcaaaaaaattaattaattaattaattaatttaaaaaacaatggtaaatagttaatgttttccccttttcaaaaggcctccaaagttctcatctatgggaatttgtacgagacctgcttctatctcctgaagaaaactgtggcattctggaatgggaagatagggaacaaggaatttttcgggtggttaaatcggaagccctggcaaagatgtggggacaaaggaagaaaaatgacagaatgacatatgaaaagttgagcagagccctgaggtaagttaatagcataaaatactatgagccttcaagaagagttatatacaatggctggctgtagaaaattacactgtttttgcaggttttttacttgataatggaaaggtcatgagacaaaactttggttcttagttacaggtaggattatggtttgtaaattgacacgctgtccttagcattcttggcagcattccccagggatcactctgaatccaggccatctcacacgcccacacacacaaagaaaaacacgttttgagctgagaatggtgaggttcagtcttcaagatgtctgggaaaggtttaagtgtaagttgataacagggcatgaaaataccagggtaaccaaagaccagccttgtcacctgagaggaatgaggagacagtgtttgtgttctgttgttttcctagggtgcaagctctcccagaatttctcttctgcttgctttttcagatactactataaaacaggaattttggagcgggttgaccgaaggttagtgtacaaatttggaaaaaatgcacacgggtggcaggaagacaagctatgatctgctccaggcatcaagctcattttatggatttctgtcttttaaaacaatcagattgcaatagacattcgaaaggcttcattttcttctctttttttttaacctgcaaacatgctgataaaatttctccacatctcagcttacatttggattcagagttgttgtctacggagggtgagagcagaaactcttaagaaatcctttcttctccctaaggggatgaggggatgatcttttgtggtgtcttgatcaaactttattttcctagagttgtggaatgacaacagcccatgccattgatgctgatcagagaaaaactattcaattctgccattagagacacatccaatgctcccatcccaaaggttcaaaagttttcaaataactgtggcagctcaccaaaggtgggggaaagcatgattagtttgcaggttatggtaggagagggtgagatataagacatacatactttagattttaaattattaaagtcaaaaatccatagaaaagtatccctttttttttttttgagacgggttctcactatgttgcccagggctggtcttgaactcctatgctcaagtgatcctcccacctcggcctcccaaagtactgtgattacaagcgtgagccacggcacctgggcagaaaagtatcttaattaatgaaagagctaagccatcaagctgggacttaattggatttaacataggttcacagaaagtttcctaaccagagcatctttttgaccactcagcaaaacttccacagacatccttctggacttaaacacttaacattaaccacattattaattgttgctgagtttattcccccttctaactgatggctggcatctgatatgcagagttagtcaacagacactggcatcaattacaaaatcactgctgtttctgtgattcaagctgtcaacacaataaaatcgaaattcattgattccatctctggtccagatgttaaacgtttataaaaccggaaatgtcctaacaactctgtaatggcaaattaaattgtgtgtcttttttgttttgtctttctacctgatgtgtattcaagcgctataacacgtatttccttgacaaaaatagtgacagtgaattcacactaataaatgttcataggttaaagtctgcactgacattttctcatcaatcactggtatgtaagttatcagtgactgacagctaggtggactgcccctaggacttctgtttcaccagagcaggaatcaagtggtgaggcactgaatcgctgtacaggctgaagacctccttattagagttgaacttcaaagtaacttgttttaaaaaatgtgaattactgtaaaataatctattttggattcatgtgttttccaggtggatatagtttgtaaacaatgtgaataaagtatttaacatgttcaactgtctgtgtatcattcaattcagcatggtagcctcagcaaaacactgacaacctgtaaaacctttggtgattcttccatttcctagcaggtgtggttggagatttatcttttatttttggagatgggttcttgcttgttgcccaagccgtcctctaactcctgggctcaagtgatcctcccgtctcaacctcccaagtacctggattactatgaacttttgctaaatccacaccacacctggcaggctggagattttcaaagagcccaaaaaggtgcaagaaatatatggagtaatcttaccctccacctttaatatcataagacagaggttcccatgacaaaatggagttcattgacgcacatagcctacagatgcatttttgtttggtgcacatagtattgtctgttttcttgaggttttcttttatttcttactgttacttcattgcctaatttagaaatcgaaagattcacctaaaaatccaggtttctagcttctcttttaaaatcatatctggcaacactagtttctcagtctcttgtggtggtaatttcctggagctaaattgaagttgcacctttggacagaggatttggttacttcctactgccttctggacacgcaggttgtcagctgccattcaactttgttcttgcactattgatggtggttgttaaaacatccagaatgcctttacattttgaatgtgggacccacgtcctggccacctgaagatgtaagtaccatgttaatggaccacagtcaggatgaaaggaaagactgtccaggagaagagaaattagctaacaggagggaaatagggagttttcaggcaagagcttggcagtgacaataaagcagagccaagcatctcaggagcatggcagggactggggtgggacaaacaggcagaagtgggcaggactgcagagaaacacactgtctggatgtggatgctttccctcccactccctgggcaccaagcagttcagagaacaaaaacattcgttcttcttgctactcaagaaattttcattttataaaaccattaaactagcatcctctttgcattagctttctagggttgcctgtgacaaattatcaaaattggtggcttcaaacaacagaaatatcttctttcacccttctggaggcaacaagtctgaaatcaaggaagccataggctctaagaaagaatccttccaaaaaaaagaaaaagaaagaaagaaaagaaaagaaaaaagaaaaaaaaagaagaagaaagaatccttcccttcttcttcctcttctggtgactccaggcattttgtggcttgtggctgcaaaactccaatctctgcctcggtctccacataacctgctccttcttctcccctttggtctcttagaaggacacttattatttgatttaggccccacctgagtaatcaggataacttcctcttgatctttttttttttttttgacacaaagttttgctcttatcacccaggctggagtgcagtggtgcaatcttggctcacggcaacctctgcctcccggattcaagtgattgtcctgcctcagcctccctacctgagactacaggcacacaccaccatgcctggctaattttttgtattttttagtagagatggggttccactatgttggccaggctgatttcaaactcctgacctcaggtgattcgcctgcccaggcctcccaaagtgctaggattacaggcgtgagccaccacgcccagtttcctcttgatctgtaacttatgacattgcaaagatcctttttccaaatgagtcacactcacaggttccaaggattagaacatggatatatcttttgggggatcactgtccaattcaccacactctttaaagtaagagttttacttaaacatatagctccataatacaattcattgaaggacagaaaatacaagggactgtttaaaatgccacacttggcccagcaccgtggcacacacctgtaatcccagaactttgggagggaaagacaggcagatcgcttgagcttaagagttcgagacttgcctggccaacatgatgaaaccccatctctacaaaaattacaaaaattggctgggcgtgggggtgtgcacctatagtcccagctactagggaggctgaggcgggaggatcgcttgagcccagaaggttgaggctgcagtaagctgtgatggtgccactgcactcaagtctgagtgacagagtgagacgctgtctcaaaaaaataaataaaatattacactttgagcaaacaataccaaagcaaaacaacaaaaaattaaagcaatagataatgcaaaattcagttatcaaatagtcaaatgagggaataagtacttgctttgttaaaaggatctgcaatagaactttccatagcaaacttcccatatattaatatgtgattgtttacatttttcagaggttcaaaattatacagagctggccacgtgcagtggctcacacctgtcaatcccagtacttcgaaaggccaaggcgggcagatcacttgaggtcaggaattcgaggccagcctggccaacatggtgaaactctgtctctactaaaaatacaaaaattagctggacatggtggggtgcatctgtaatcccagctactcgggggctgagacacgagagtcacttgaactcgattcaagcgattacagaggtggaggttgcagtgagcccaagatcatgccactgcactccagcctgggcaggagagtgagaatccaccttaaaaaaaaaaaaaaaaaaaaaaaaaacgaattatacagaactttttaagttgacttccactaacccctcacatctttaaaagcactgatttaaaaaaaaacgttaaggccttcagtttggcttaccagagagtttaaagtggaatttggctctttgccctttggtaatgccacgaactaagaggcaaagaaatggcccaagtagcttgcttgtggcttttctcccagaaaaatgagtgctaagaagttcttaaaacacttccatagtacaaatcacaaatcagagtgatgccctttacccaggaaagaaaacattaatgtggttggtcttgtttttgttttttgtgattgagtctcactctgttgcccaggctggtgtgcagtggcacaatcttggctcactgcaacctctccctcctgggttcaagcaattctcctgcctcagtctcctgagtaggtgggactacaggtgtgtaccaccgcacccagctaattttttgtatttttagtaaagatggggtttcaccatgttggtcaggctggtctcaaactcctgacctcaaatgatctcccctcctcagcctcccaaagtgctgggcttacaggcatgaaccaccgtgcctggccgaattaatgtgtttttaaaccaaaatcctgacatttatttgaaacaaactaggcaatccttcacagtgcttctaaaagcccagaccaagccctccttttagaagagcaagtctcatgagcagcgtgaggtcagagatgatcaggtccatgcacatttgtgtctttccacaatgtctgactttcttgaagtaatctcaatcacaaaagccacgagctgcacggagttcctaaggaggcagtttgcctcagtgcttcccatttgctcgatagtcagagctgcagtcacacaggctcaagccactccacaagtcagtcaatgtggcagatcatacataatagtatacttaaaatataaatgttatagattaaacatgccacaacaaagtaatattgaacatcaaaagaagaaggataggaagaaagggttaatgaatcaattcagggagagcgactaaggcaaaaagaatctcctggtctgcgccaggcagtccgagagccttcagtggcagatgccaggtgattatcatgattaacagcaagatggtgtagttaagacggccatttcaagctgcgcaagtcctgttctttttatagccacagtcctctagtgaggactgagagtggaaaagtgtgcttgttgatgtcctcatctggttggatgcagtctttatttattaagcaaacatcttgtccctgttcgcaaagtgccctatgaaatataagatggagtctctaagatggagttacttatgtcaaggggcttgacacagcaaaagaacagatttttatatattaagagtctaatatttacatttttagatagtggtgtggcagagtgtaggtgaaaaacacctttttttttttttgagacggagtctcgctctgtcacccaggctggagtgcagtggcgcaatcggctcactgcaacctccgcctcccaggttcaagcaattttcctgcctcagcctcctgactggctgggattactggcgcctgccaccacgcccagctaatttttttttgtatttttattagagatggggtttcaccatagtggccaggctgctcttgaactcttgacctcgtgatccgcccgcctcagccttccaaagtgctggcattacaggtggcagccaccgcacccagccagaaaaacaccttttaagatgagaatgcaagaaatgaaaatgttatgtccacacaaaaatatgtacagaaatgttcataccagcactattcataatagccaaaaagtagaaacaatccaaatgtccatcaaatgataaacggataaataaaacatagtaaatccataaaatggaatattatttggcaattaaaaaaatgaagcactcatagatgctacaatatgtaagaatcttgaaaatattatgctaagtgaaagaagccagtcacaaaagaccacatactatattattccatttaaatgaaacatgcagagtaggcaaatcttagattcatgatggcctagggctggggactaggttaagaaagaaatggagagtggctgctgataggtacaggtttccctttggggtgatgaaaatgctccaaaattgattgtggtgatggttgcgcaattctgtgaatatacaaaaaaaatttactcgtacactttaaatgggtggtttttacggtatgtgaattatatctcaataaagctcttattttaaaaaagagagagaagaaaaaaggaagaaggaagaaaaaaaaaggaggaggatgagggcaaggacaagaagaagagagaggaggaggaggaagaaaaatgaggaggaggagaaagggacgaggaggaaagctgggcatggtgatgtgtgcctgtagtcccagttactcaggaggcagaggccaccctgggcaacataatgatatgccgtctctaaaataaataaacaatgaagaaggcagtgtgaacgaccaactgtgtcaaacaccgctgagaggtcatgtaagacaaggactaagaatggaccattggatttttttgtggggtaaaatatacacaaaacttaccatttagccatttttaggtgtacagttcagtagcattaaatacattcacactgttgtgcaaccatcaccaccaaccatctccagaagttctcacctttcccaataaaaagtgcagtggcgcaatcttggctcactgcaacctccacctcctgggttcaagcgattctcccacctcagcctcacgagtagctgggattacacgcacatgccaccacacccagctaatttttgtatttttagtagaaatggggtttcaccacgttggccaggctgatctcaaactcctgacctcaggtgttccacccgccttggcctcccaaagtgctgggtttacaggcgtgagccactgcacccagcccgatatatctattttctatgtctacaaatataacagtctcaaagcatactcaaatacggggggaattaggcaggagggtttgacagaggagtaaagaaatttgagctaaaagaccaagaatgagtttgtatctgtctgctagtggtctgtttcctgaagcccgtaactcaggaactcctgaaagtataaactggtttggttttttgtttttagttgttattgttgttgttttcagacaaggtctcactctgttgcccagactggagtgcagtggtgcaatcacgactcactgcagcctcaacctcctgggctcaagagatcctcccgcctcagcctccctagtaactgggactacaggcatgcgttaccatactcggctaatttttgtattttttgtacagacagggcttcgccatgttgccccggctggtctcaaactcctgagttcaagtgatcctcctgccttggcttcccaaagtgctgggtttacaggcatatgagccaccacacccggcacaaactggttttgaatatgaacggaataaagattttcaaggaaaacaaattttcatttagtattcagaactcatctttaaagtcttccatgtgattttcaaccatgataggcaaatatgggctttaaaaagaaggaagaggaaagtgaccagtggttctgagcccttgttttaaaaagtcaatcacaggtaagtgagcaaatggacaagagatttaagtaattttcaaagttggggcatttgctattttatcagtgtctcagaaggctgtccaaaggctatagatttaaacaaataacatggagtcctcgagatactggcatttccatttttaagggtaaacatctgaaaatgatgatgttcaaattaagagtctggtagcagtttacagttacatatggagtcgaaagaaagaaaataccatctctgttcttacgtacagattatttattgtaaaaatgtaagcaattacaaattgatctgttgtgaaatcagtgctgaattaacattaatgtaactccagtgaaaaaaatgaatttgatcaattattatcaggaataaacattaagccatgacggtgctcaagttatcttctgatgacactgctgtattaaatgtacttttcctatgagaaccttagaaaaataaaaatttctgagtagatcatctttatcttttctttttatatatttatagccatattttaatataataggccatgaggtgatatgtaaacatacataatttcaacaaattttgtcaaataaaatcatatttctagctagaaacttgccttctaatcattttaaatgaataatccaatcatccgtcaaaacaaattttttttttaaatgactgttaaatcctaaccttcattttcccctggggaaatagcattaaaattgttacacaatctgctatagaaagtgggattctctattttgaagccactagcttgcatttgcacatctagcacaggagaatcttcatccagtgatgagcgggttacacggatgaacgctaagcttcgctgcacaggtgcagggccccggcctcacagatttgccttctcccttgccgccaagtgagatccggactgcacaaaggtgtgaatcgcattctgttttaaaagaacaagatgagcaggttaatcacctcatgggcagcaacgtgatatttactcagttttaatatgtatgcaaatgaaaataataattcagaattcattcactttaactgtcttaaattgcccagcgctaaaatgaagagtatgtgttttgccagtgaattctttatctctcaaatgaatttctgcacagctgcctaagaaatctaacagtggcaggtaatggcccctgcagactgtaatgctaagtggtaactaagtcatgcctactccaacccagcacacacagcctctgcatggccaggctgctcccagcttaccttaggcttctcagcattgtacttgtccagaagagcctggatgtggctcccgtagtcagggtggacctcagtgaagttcttgacctaaggccaaaggaaaataaatgcaagcattactctaactccctactatatcactccccagggactgtggtttcccagtgtttattccataggggaggaaagacgtttcagcaggaggcagtactacaggtgtttaacaatgccagcctcagagttaagatgcaggtccagtgaacactctgacatatactggctgagcaacctcggataggtcacttaacttactgagcttatgtccctctgccgaaatgcgcaagaaaatgacacctaatcagtataattttaaaaatactatttggtctttgtcccccattcctgacacagatctaaaacccttcgaatgtactgtcttttatatactactaagatgattcatgggggcctacatagattcctgatggaggctcacaccaggaagaacaagcacgcgatcagaaggttagaacttctagccccacccccaaacctccagggatgggagaggggctggagattgtattcaatcacccatagccaataatttcatcaatcatgcctatgtcataaaacctccagaaaaacccacaactggcaaggtcagggagtgtctggattagtgcacacatccaggagctagaagggtggtccactcagggaggcacagaagctccgaggccttcccccatgcccctcttccatttgtctattcctgagttgtattctttataataaattggtaatcataagtaaatcattttcctgagttctatgagtctttccag

SEQ ID NO: 727 - DNA, 898 bp, Homo sapiens
caaggctacaggtgtctttatttccactgcacgctggtgctgggagcgcctgccttctcttgccttgaaagcctcctctttggacctagccaccgctgccctcacggtaatgttggactcggtgacacacagcaccttcctgcctaatgcatccttctgcgatcccctgatgtcgtggactgatctgttcagcaatgaagagtactaccctgcctttgagcatcagacagcctgtgactcatactggacatcagtccaccctgaatactggactaagcgccatgtgtgggagtggctccagttctgctgcgaccagtacaagttggacaccaattgcatctccttctgcaacttcaacatcagtggcctgcagctgtgcagcatgacacaggaggagttcgtcgaggcagctggcctctgcggcgagtacctgtacttcatcctccagaacatccgcacacaaggttactccttttttaatgacgctgaagaaagcaaggccaccatcaaagactatgctgattccaactgcttgaaaacaagtggcatcaaaagtcaagactgtcacagtcatagtagaacaagcctccaaagttctcatctatgggaatttgtacgagacctgcttctatctcctgaagaaaactgtggcattctggaatgggaagatagggaacaaggaatttttcgggtggttaaatcggaagccctggcaaagatgtggggacaaaggaagaaaaatgacagaatgacatatgaaaagttgagcagagccctgagatactactataaaacaggaattttggagcgggttgaccgaaggttagtgtacaaatttggaaaaaatgcacacgggtggcaggaagacaagctatgatctgctccaggcatcaagctc

SEQ ID NO: 728 - protein, 249 aa, Homo sapiens
MLDSVTHSTFLPNASFCDPLMSWTDLFSNEEYYPAFEHQTACDSYWTSVHPEYWTKRHVWEWLQFCCDQYKLDTNCISFCNFNISGLQLCSMTQEEFVEAAGLCGEYLYFILQNIRTQGYSFFNDAEESKATIKDYADSNCLKTSGIKSQDCHSHSRTSLQSSHLWEFVRDLLLSPEENCGIWEDREQGIFRVVKSEAKMWGQRKKNDRMTYEKLSRALRYYYKTGIRVDRRLVYKFGKNAHGWQEDKL

SEQ ID NO: 729 - DNA, 180026 bp, Mus musculus
  misc_feature (1)...(180026): n = A,T,C or G
ccgattccatacgcctgcttgctctgccacttgtttgcaatgcttcatgtgctcatttccacaggttgtgaatgttgtgtgtaatctgtttgtgcattggctcactttagatctttgatagggtttatctcataaaaaattaggccacacacaggaaaaaaaagataataatggtattattttagtgtgttgggtagcaactaagagaagaacatatatatagataggtgagtagaaaattttgggttgtggtgagttgcagcctggttagcaattcccaattcctagtgtttgtgataagttagaaaagttgattaaaattgtttgccaaatccagtgcacacatatgtgcttatcaggggttgccataaagccttcactgagaagttcaaaaatttcactatgatgtaacatagtctgctaagaaaaactgacaatagacaagttagcagggatgagaaaacactatgagttgttggtgaccagccagtaataattctggattccaagatgaagacgcaaagacagatgctgagtcaacaatccatttttgtgggctgtttcactgaagcagagggtgccatatagccatttgattggacagaaatggtctgagccaacaaaagatgatgtagtagaggatgcccacaaaatctatctgtccagattcttcttggctctcatttgtgacattttcccccattggggcatggaactggacgctttaagcagtggcatagggggaatcttaggacctataatccaaaaatatgtcagagaatttcttcttggacagtgctatgcagcactatggtggggatgtttagggagagcaatttagctttcatggctacatttgagggaaagggtctctgggttctctgaccatccctaaggaggaggaattctcacttctgagacttctttgagcagcaggaaagaggaaaggaaggaggtcagaggcaagtgttgcttcgaggccttcactttgaagtatgttttttttctgaatcccaatatatttgtaatacaaacatgcattttttatggcacagaattattattatctggtttgatttaagtattttaatgtagacttattgttctttattatgtcgcaacttgtcatctaaatttgtgtagaaagaccattgaggagggttaatataaaggtactgagcatctttcaaatactaatctctctctctctctctctctctctctctctttctctctctcctataggctgacacccatgacgtggtgaaaactcagggtgatgatgttctgcaataagaagaagctacttggtaaggcttgaattctttagatgacacaaaacaataggaactgtaatcttattttataatggacgtttgattcattccgaaaacacacacactgattggaagttaaaaaagcttccacaattgagtatacccgtgtacctcttgagggcttatgaaacaaaattcagaagtttctaacatctcactaagttcctttgtgtgttgctgtggttgctctctgggaattcccagccaccttctgatctctgtcaattttcttaactgtggctgcttccaacaagacctggtgttgcaagcctttgttatgttaagaccgtggtccaaaatccaggtctaattctatcaatatttgaaacaatttctgtgtacacatgaatgtagacatggaaaaaatgggcaaaactttatacattaaaatgaggatgtggggggagaaagagagggtggcagggagactagtgcttcattgggagggaaagcacatctagagtactggacttggtgaaggaggcctgtacctgctgtctctctgttcttgtacctgggtggatccaccaatagtttcttagtcacctttgcagaatagcattcaccatctccaccctcccaactgccaagcctttgtcattggtgaggcaggctcatgcttcaaatctgacctcactgcatcatctccctctagctttgcttccttatgtgtaaagcgaggctgggaatggcacgtacttaatagcattgttttgaggactcctgaaataatgcctgtgaaataccctaattgtatcgagattttagcaagtgctcaaatcagctcttgttattactgttatagcaaacattaagtctccagtcatgaatcatgtatagaaaacaacataacaggggctaaagattgtatttgtaatttatagtatctagtccaggtataccagaaggataaatttgctgtgaagctatagcagccatagagggaataaaacttccagtaaattgaattttttgactctttgggctggatggacacatttgcattggcttatcaaagagaaaaacaaaccccaaccctttagcacctgtttgaatcaccttacttgcttttcaaactcttttgtgaggacacacacacacacacacacacacacacacacaattgtgggaagatttctttttctggctttaattctctttacttatctatttaaacgccagttgatcccagaagccaccagtcactgctgcaacccaacaggagcactctgcttggggcacatctctcagttgtatcaggctgtgtccccgagtcaaatcagaaactctggaggttgggctcactgatttaaagctctaccgctcaccatccttctctgtgtttagattaggtttccaaccaacaagattttgttgaaagaaaaaaaattaaggaagagaaaggcttaagtgattgatttagtttgagggaatattgtgaaagtacctccctagaactccccaaacctaacaatctcaccgcttaaatagatacttcatgattggagacattctttggtctttggatgcactccaaactaacgtaagaatctcagcctatgttgtcaaggttttacacagggtccccaggttctccgtggtatgtcattatttaatgacttcagcagaatacaactaagtgtctgaacaatgtcttgaaaatcacgttggccagaggaagaacgcactgtaggtaactgacggactgtcgtgtttattccatctgtgtgcacttgagggtcctagaaggacctcccacttctccatcttatgattggtctgaatggtgttcctgctccccttagagcctaaggctgagtgtttaagatctgctcacagacaaactggttaaaaagagaggtctaactgtcttgcttacttttgctggctggaagtgagagagaaggagtctgtaaaagagcccagattaggaagatagtaaccatggccttcaaggactggcagcagggttgatgatcgatcattagccaattttcactggaaatgtttagaaaattacttcaaggccatcttgggcgacagtgatagcagcatttggatgactctcttttacctcttttgtttttatttattaaaaaaaaagacttcttgtatgcattttttcttgagaatttcatacatgcgtataaaggacttttgagataattttctgtttaaaggtgcaccccacacttcctagtttaatgatcaccacacaaaggcaatgctttgctgagaagtcatagttaaggaaaggctccgagctaaagtgggcttttagcagctgcaggcccagcccttgtctcagcgccttggcttaccttttcccacctgagggcttttttgtctttttaatttttttcccctaatctgactctcgttttatgggtcctaaaatcttatgtacatgaagtagcatcttaattgtagttaagcagtccaggcaaatagtgttctagaggtccctcccccagactgtattgtgccttcagtgattgacactgtgtctggatgctttgaagtgtgtcttcccacttctacttccaagcatagccaaagtattctttttgaaactgggagtggatttaataaattattagcctcatcagataattactttttggggttagggtgggattgggaactatacgctagctatcccttgtcgaggttgagtgtgccataattttcactcatttctagggccacttctgatccttatttggtcaccatggagagtgaaacacacacagggtgcagagataagggctcttccagcactgcattgctaatctatttgtttgaggaaaacatcacatattattagtttttgcaactttgggggagtgaagattattttattttactttatttttgttgttgttctttgttttaaacatatatacatataatttttacatatgtacacatgccactgtgcatgtgagaaggccgcaggatatgtatatatacatatatgtatatctttatatgtgtgtgtgtatgtgtgcatgtatgtttgcgtatgcttggtgcctgtggagatcagaagagagcattagatctcctggaactggagttacacatggctctgtttagcaatattactgctgtgaattaaacccaggtcctctgcgagaacagcaagtgctcttaaccactagttatctttcctgcaccagagagtgaagactatttctgtcatctacatggagtaggactttgaaagcattccccatttttatattctgcagtgggttcagaaccaagtctaagagaattcgtcctcttctgtggtaccttctggaatcactaagatacttctgtcacctgcctctgttacttttctcaatggccacaaaacatacaaacctagttatcagcttgacgtgtgtcatgtgggtcttacattcagccagcagcatggcaaagcagctcactagctgttttctaggatggccaattccaagtgcaggtcacgtagtgttcagcgtaagtgaagttgagcaaaaacagctggggtgattgtttgaagaacacccagctcacttattcatctgaataccccaagtacattccttgatttagttggaggagcagaaaatgagggcaaacgtccttctgggtcgtttgggatgttatcctatgagctgttatgaaacatctctaaaagcttcaccctcatgttatttatgtcaaacaatcagttctttataaggcgttattagaaattaatgtctgagtcatgaactattttgcttttcacgagaagtgtgttttttggtggttgttattagcagactgtaaataaaaatcaatcgtggggctggtgagatgtctcagtgggaaacgtgcttgcagcacaggcctggtgacctgagcttggtccctggtaccacataaacctatgaacagagagctgtctgcacaaagttgtcctgtggccatctcacgtgcactgtggcctgtgtacacagacacgtgcacatacacacaccatatgcaataataaataaagctgaaaagaccacagacaatttgactgtagagctgggggctcaccttgagcaggcacttgggtcatggctttgattggccaccaactttgcttctgtaccttctatacaccacattgctattgaattttaagctgttattattattattatttcttttgctacaccttcttaagcgattggcttggagatgatcttttatagagatcagcaagcctatttttctgagttctgattggaatctggtgggccttttactttgaggactaacatcttactctgggccagataaagtcctgcgtgatatggctgttttggctggaatcctgtagagatgggacacactcaggtctcaagagaacagcattggaaagatgaaagtgaaaactagttaagaacagatcagggagagagagtcagtcagttgggaggcaatgccatacgtgtagtacaatggatttgagttcaactgtaagctcctgcagtgcagtgcaagtcggcagaagcaactgaagccaaagaataagatgggaccagaagattggaacaactgacagttagtttgaggtcaagcagtaaaattcagtgaaaagctgagagaagccagatcgaatctgtccgcttggagaagaattggagtcagaacagttgagtgaaccagctaggtagagttcaggaagaaaagatatgcttattcagcagtaagcctctgcgatgacaattacattaggagaataaaagttgatttttcacgttgaaaaaaaaagtcctgcatgtttgatcctttccttttgtttattcggttatactcccttcttggttttcttttcttttcttttcttttcttttcttttcttttcttttcttttcttttcttttcttttctcttctcttctcttctcttctcttctcttctcttctcttctttctttctttcttttataatttccttcatcttacagtttggatatacatttaaatcaagttttttcaattttatctgttctagttcattcactaaatgtatattccagggggctggagagatgggtcaacacttgttgttcttgtagaggacctggatttgatccctcgctcccttgctcccacatggtggctcacaactgtaactccaattctagaggacctgatgccatcttctgacctctgtaagcttctgtgtgaggatgatacacataaactcacatcagccacacacacacacacacacacacacacacacacacacacacacacacacacactccagttccagagcacccgatgccctgttccagcctttgcaggcttcagcatgcagacggtacacacaaactcacactcgtacacacacatacatataaaagagtcaagatttttccaggtactttatcttcttttctttctctctctctcttttttcattgttcatattgtcctgcttctgtttcattgataccatgcattcctacatatatttaagacactcagtagaattaaaaagaaagtttaacctattctcccacctgccccagtatcttcttctcttccccttggaacatgcctttgaagtggtaatacaatttatcattcaaacctggatcctttctgctagtgctgaagttgtacctgggaccttatgcgtactgggtgagctctctactgttgggttacattccagctccaagcagagatatttttgagaacgaaaacaaacatgcaaacatgttgcatgcaaaacggcattgtcgccctgtttataacacactcccaacccttgtatctctgtcaggatctgagtttgcccttggcctccgtgggaggaaagctcttctaatgtgattggctagagttgcttctatttttttttctctagtcataccgactcctttcactttctagtttattatctaagctttcttcaaaattaatggccttctcccaacaatacttttcctcttccacacatattttctgtaacttcactgggacaagggaaggcatctgctttaagtcttttattaacacatgctgacctactccctttggagccagaaaaatttggtgattcattaaaaatttggtgtggggtgcttctgtaaatcctatattccctggtgaccaaactctttttatcactgaaaccatacctggaaacaggaaacattcaggtttaaatcattgcatgtcagagaagacactcccagcgggaattcttacagggtatttgtgtctagcttcctcttccaggataggactgccctgttgtataccatagcaacatatagaagaaagctaatttttgcaaagataattgaggcctagtgtagccaagctaagggcagagacctgtaaagatttagagtcaaagccagaatgttttagagtttaatgaaaagataccaaaatcttctgccagaatcaattcatgaaaacttagttggtaaagacaataatcaccaaaaaattgtagacacaatgattaagactcaagcccaaggacttagaagcaaatggagggcttcctggatctaatcaggtcttatggtgtgtgggcaacatctgattgtttagggagagctggtgggaatctattagaatacaactatagaagacatatatggctcagccagtgaaggtggcctgagtttgaatcctggacccatgtagaggtaggaggcgagagtacacagaagtgtccttggacctccatactcaggctgtggcaatgcagatgtctccccataccatacggtcacatgcagaatattaaccagattgaaaacattttagaatgtggctatctataattctaggtggataactccttggtttgtagggttaaggttgtggtgttggaataagtacagtttggcgctcttggatgtggaccacacaaatgtggactctgaagatgacagttccctggttgtgtatcatctaagccagggccaattaaaatttaaatgagtatgtataatttttgacttggagctgaagcctctaagtctcctgtagtgtgttgatggcccaggtcaacttttgccgtttgtaaagagccctttgtacaccctcacaatactactacttttttttttggaaagaagtgttttcttttttcctttttctcttcctcccccctctttttttttttttttttttttgtgttaaggtagcattgcacaaatgaatcacctcaatattttaagcctcactctccaagtactactttggcttttgtctttttttgtttgttgtgggacaattgagaaaatgaaatggccaagcctttagagccaggagtgaagtttctcttaggtgattggttgcttgtaaagctgcttcccagtgacaagaaggcacactcaggggttgtgaactgatcccatcagtccagtcttgctctttatcagcagctagaagacgcaggctggacggcaggaacaactacacaaacttgactttccaggcaagaagagaaccatacaggtggatgttagatgaacagtgcacctcacaagtgacttagttagtcatatctatatgactttatttggctatgctgtattttgtggttttgtgtgtgtgtgttgaaagtaattttcaaggtatgttggcttttagtgaatctttctcttctagaaatgacatgactccttaagagaaagggttatagacttcgatttttaaaaaccttcttttaataaaccagaaacttccacttcaaagggtctttgtggagctgaattgatgtacactagagaaataaaatgttttgttttatggattttattaaagaggaaatgcaaaatattgtagcttctcattttgagataaaaatgtgtgtgtgcattcttaggtgtttgtatgtgtggtatgtgtgcattcttttgtgtacgggtgtgcaagcacatgcattcatgtatatgtgcattcttgtgtgtttgtatagtatgtttgcattcttttgtgtgtgtgcaagcatgtgtactcatgtgtgtctgtatgtgtgtgtgaccattcttgtgtgtaaatgcaagcacacaatgccacagtacccatgtagtggtcaaagggcaatgtccttttgttttcgccctgtttgaggcaggcttgctgtgatttttctctgcatacaccaggctagccaggctgagagcttccatggattcccttgtccccgcctccatctccctgcaggggttttgagattgtagagacctgtgtggtgcatccagctttcacatgggtttgggtcactcaggtcctcctgatttttttccaagacagagtttctctgtatagtcctggctgtcctggaactcactttgtagaccaggctggcctcgaactcagaaatccacttgcctctgcctcctgtgtgctgggattaaaggtgtgcgccaccacacccggctccctcctgattttaaaagtcctgttacccagggaaacatttccccagacccatttagaactttctaactggtttgcaacattcaggttgaacagaaacctacgccctccaattcaaaagagaagaactcaacagaaaccaaagtgactctagttatgtcacttttacaagttatacctgtttctatgggtttaacattaaaactcataccttatttttctttcttttagaagtggagcgggtggtgaaagccaatgaccgtgactacaatgagaagttccagtatgcggtgagtacacagcacagcatgtcgggggcagccttgttcagggccagcagtgggattcctgccttcagagagccttacagcaatgaaaagctttccttgttggcccatcttacaggtgctggctgtactgtgtgcttgcacacatatttctcctctgctttaacaactccgtgtgcagggggaaggtgataaaatacattctttctcaagaacttatgcttagctcattttgatgtccacttaggtagtagaatgtgctggaaaagcctgagcataggctatgaaagtattggtcgatgagaaagtgagagtcaaggctgaggatcgatgggatgagtttgaggattttcttgaagcaatttttgggaaatgtggaaaacatatgcgggatgagattcctaagtgctgaatgactgagtttatgaagcaaatagtgagatccattagttcaagtgttcaagtgttcacggaggcgttgcctgtggagggagggttttggtcaaggaacactagtatttcatttctattggcagatcattggcagagtatttaaatgcaccagcactgcagtttggtgctgtggcacacttagcagaggtccccaacagctcttcttttatcctgtgtggtagtcatatagatctgtaatctaaatttgactctctgtgtaggtttccacacacagaatctggaacttgtttctatgactgctttctttctgtgaaagaatgtactgaggctctgactttattcatcagttttgtaagtggaatcaaagcagctttgccttggggaaggatccctctttcaagatgatggctatgcttcttagaaaggaagggcagggtgacctcaggcgatgaatgtcactctgtgcagtgacatatggacaccagcagacttaaccctgtaccctcacatccctgctttaggtaatcctgtatctgtagaggatagctccttaaagccttgaccataagatcccagtctgcttgtctgtctatctgtctgtctgtctgtgtaggtcagaggacagcttgtgagaacttgctctctctttccaccttgtggttctctgggtagaactcaagttgttaggccttgtggcaggtacctttatctactgaactatccagccaggccataggtatatatttttagatttcggggaaaatctgtaaatatatatatatatatatatatatatatatatatatatatatatatatggataactatgtatttaagtacctacctacactcaattatttcaatgtataacaagtacttttactccatgagtataagcaaaatcttattttataagattatacagctttcttctctggtattttttctgtaacctatgaggtatttcaatcataattatatggaagataacattaccctcttgagcctaccacccaggcagagtaagcattaacaatttgccatacatgtttgaggtctgtcctttaaaaccaatagtatattaatgatgtagaaatgatatgaacaaagctacaaatgtgtggctatgttttttgttggtttcctgctagcaccaaggtgttataacggtaacctggggcctgagcagagtctacatggctgccctgttttggactgaacatgtatcaagaagcaaaatccattaagccctcagagctaaggacaacagaagcttagagtgagaagctgccagtgtgggttatagagattcatttctagtgggcagtggacaagctcagagggacttgaggtgtctggcctttactggcctctctagcagaatgtgagctgtagctctctcagtctcattagggctaattaaaggcaatgacctcatagagctactgtgaggactaaggcatgaaaggacacagtgactgttcgtctctgtacatgtaggatttgaacctatgactttttactaactggaatacccttttagctaggcaactcccttaggtgtttgcccagtcttacccagctttaatggaagtggatttggaggatcccaggaaaaaagaacatatttattggagtgatattcccaccaaaacactgagaagaaaacagagtaaactcagtcctcttatgggaaagatgataggagaaataagagttctcaaatgtggtggaaagagcacttgaggctaagacgggaactagtgtgaaccttttctcccaggactagcttgtgagctgattggttcctctgagaatcatgtatttcatctacatattgtgaggaattttctgttagggttgcttacttaaggattaaattagatcacttcaacaaaatattcgataataggaacaattctatcacagtgtttctcaaccttcctaatgctgggaccctttaatatggttcctcatgctgtggtgacacccagttctgaaattattttcattactacttcataactgtaattttgctactgttatgaattgtaaatatctgcattttctaatggttttgggcgaccaacatcaaagagtcgttcaaccccccaaaggggtcttgacccacagggtgagggctgctgatctatcggatgcttcttgtgggccagccttagttatagatttttctcttaaacctaatggagctgtggacgggttccacagtgagtttgggagttcctgtagggcagtgatgctatcacagtggtgctaagaaaacacggagaaactcattaggcctgtgaagcactcacagtagatatcatgttccctgatgtaagaccgtgagatgccttaagtctcatgacaaaccgtgaacacgatgcagttgtggagaagggagggtgtcacacgacaagagctcagtggctgtggtagtggagtttcctccttggatgagccaatttgaaagaatgccaacccagtgaggtacttgccagcttcctgttctgtgcaaggcatcagcaaaggcaggacattttccatcagcctccctgtggatcgtgatagacactcagtggatagtgaaggcaaggatggtagccatgactgcttaacactcacggtgcttcccaactaaaggctgtggacctgcacatattactaaactaccatactcacacatgtgatctcctgacagcaagtactttcgtcgtcttgttttatgtgagaagacatcgaggtacggaatagtccatgtcagtgaccttctcaaacgtacatagaacaaatctgttggtactgctgtgaggtgattagcatatatttcagtcttccagagcatccactcagatgaaggaaatggagcagtgtctactaacccatcgcaaccaagaaatttgatggtgggaaggctgagactgcataaggctggtttccacagtctatgattttgtgtatgattaatatgtctttcttttgaaaagtcctagaaaacaaacaaacaaacagaaaaacaagtgtaataaaacaaaacaaaaatcaacctctctccccaaccaaacttgcccattctccacctcctcccttcctgtcatggaccccgtggaaactggtgatttgtttttattttattttattaaaaagtaaggctaactatttcatttttatttcaattcaggctctgataatgttaatgttggcaagttaaaaacttgtttttggaaggtgctgggaattgaagttgggactgggcttatgctaggcagtactctactactgagctatggccacaagtgaccttatttttgtactctaaagatgaagaaaggtagagaactatagatttttcaaaacaagtccatacaatgtgcctgtgtttctctgagaccaattagctcaggaataaaatgttcttgtggatatatagatgatttattgnnnnnnnnnnnnnnnnnnnnttcctagagtgcctgctctccacctagcaacatggacatttgctgctttactttacaaagaagatctgagacagtgtccaaactgaacacaaagctcaaagggattaggaatatgtgaggatatgggtgctggcttcttaaatgactgcaaaacacatgtgcaagggagctgttggcttatgatagcggtgtgttctaggccagtgggattatccagcaagggagtacagagtctgcttcccaacttcaaggagcgcatacatctacacagaaagagaagaccagcacaccagaataagccaatagtgagaatggagaggagaggctaaattctaattgtgttatggggtctattacatcagggagaggagaacgcaatgttagcgaacattttggaggaagttttgatagagtaaatgggaaatgatctcagtctcatgtgcttatttggactctcagtgttgggaaggacaacactgagcaagggtcaagtgtgccatgtgaagtcactgcagtccaggcaggcgagatgaagctgcgtgaagaagagtgtcacgctgggcatgtgatgcacgcccattgttccagacctctagggctgaggcagaatttctgcaaaggcaaggcaggccctgtagtttgtatatgggtgacagactcctagtagctggggagccaccaaataaaatagagttattcgtggcctacagattaaataaactgcagcttagtgctgagcagaaccctggtgtggcaagagttgtagatttagaactttgttgtacttaggaggagatgtgcgatattgaaagaaaaggggaagttgtggtgatggctggctgtgcagcgaggggcagacacttggggctgatgagacagaaggaaggagggagcctgcggaggggaggggagcaatgactgaggagaacagggaagagtaaggtggaagtttagggaagggagcagctcaggaaatgggtggctaattggttctaaaggtgggctccaaggggactgagagctacggggaaaccctgttgatcacgaccagctggaagaccttaagaaagtgattttaatcttcctcctctttgacaatccatcaggctatacatggcatgcaaaatattatttccaaattatggtgccttactttcaaactcatcactgaccttaggatatattctatattacccagccatagactgtcattgtctagcagtgtcctctacatcttaggaatgtaggaaactttgtatgaggtcagactttaaacatggaggtgcaactttacaggattagatgcacagattactataaacttggcatgttaaatgccaacaaatgttaacaacattgcaatgaatataaaatcatacaaaccttatatacacaggaagtatcacaggctcgattcactgcatgataagattggagaggttctgatggtcaacatcatgcacctagcgtgtagttgctgtactaaacacaaacttggttgcattggtaaagatcttgaaggcaaacatgcaacggtcacattcttccaactatctagcacatctctcaaagaacacataataacacagaaaaatcattcttcaaccctcctaatgctgtgaccctttaatacaactcctcatattatggtgacctccaactgcaaaattatttttgttgcctcttcataactgtagttttgctactgttacgaatcataatgcaaatatctgtgttttcagatggtcttaggtgaccactgtgaaagggttgtttgacctcccaaaggggtctctacctacaggtcaagaactactgatgtagaggttcatagtctaattgaactttgtgacctggtccaagactctgacagaacttgaccagtgcagttaagtcacacctgtagggaatgctactcttatgattagcaactacatttgggttctacttgctcaagactgcctcagcagccactgcaatgtgtcccgtataaagaagatatctggttcctcccacggatagtcattgggaagttgtacccagggactgtattgaattgtgataatgcagcaggatgatattgtgtgggttgggagacatcctgctgtgttagccatgaatcaccccttttgtaaagtaatgtttttgactttaagttacttcactttatacgtccaagtgtcaatgtagaagggttcctgtcattgttgtgactggataaataaatacccgaaagaaacaacctaagaaaagaaagctttcttttgggccatagttttagaaatcttaaaatattttctgtgagataatatacagttggaattagaagaattaggataggtgatccccgatggtaggatttcagagtcctgttagaggttggctgcttccggatggatttcagttaagacttaacaactgaaaagacgcaagaggaagaaaggtaaccgccccagtgaagagaaccacaaattcagttttctttgtagtcactgcccttatgaaacagggcaaaaccatcatgtgaaaaaagtggggcaacttagcaacaattttgaagctaacgggaaaaccactctctccaaccgtcaccaagtggtttttcatcatgttttgcagttttatcagctcaaacaatatggttctatgatcagattgctaaaatcacagtaactgtcatatcttatattttgtaggttgaagatcaatcaaaatattcatgcaaaaatctggtatctaattcagtatctaatcagtaactaattaggaaaccaatgcttagattttgttgtattgttcatgtgactatgtttcttctttgtaaatatttatgataaaatattttgaaatatgtttaagtagtggaatggttaaaccaagtgcattcacatataccttgtttattatacatactggtttgtggagagaaccgctgaaaatatacttctaaaaagttgtcatttttgttttttgagacaagatcttactgtgtagctcagattggcctggaactcactatggagactaggttggtctgaaattcacaacaatcctcttgtcttagctttctagtactgagcatatagttatgagtcagtctcctccccgccccccgaataatccattttttcatagacaaaataagctatttaggaattaaagttcagttttaatacttcacagatgagctggttcagaactaattgagtgtttatgtgtctttgtgtgacattactgttaatgacatagtagttgaaagggttagtgcggagcactccccaaaacattctggctcgatgagtgggacgttctttgaggaatcaagctcagtgtagcaaatgtgtagactggcaatttaaatctgtagctgctaaccccaggaaaggtgtctccagtggctctggtttcacatctcttcctggttgtgagcttaggagtccagctgtagctggtcaggtgccatggagatatgtaggagaggtgacatcaattcgcgtcaattaccagaaagtacagaggcagaggattgttttgaagccgtgtttctgtgtttggttatgtgcatttgtgtgtgggcatgttcacatgggtgcaagtgcctgcagaggccagacagagtgattggatccctctggccggagtgagaggagctgtgagctgctctgccaggtcctgggaacagagctcagatcctctgtgagaacagcacaccatcagaacggctgagccatctccccagacccagaagattgttttctataagtgacaggaaaagcctgacaggcctctccagtgctgccaacttagctcatgttcactgaatcttagtggggagttattttctaaacctttcccagctagctagcctaaagaattctaattctaactctagaatttatgatttatagaagtgtgtttataaccttctagaggaaggggagccactaaccctaaacactttgcagtctttggataatgcgactaatcgatgtgtattcactccaggagctatcttgatttataaggatgttttcacacaagtatataacacacattgactgtgtttcctgccaggtttcctaccttttcctctctccatgttagcctctttccttccccgacagggtcacttctactttcatgacataaaaataattttgtatgtctatataaaatgtaggaatcacaaatgatagaaaatatacaatatttgtctgagtcttaattcatgaaatgtgataatctccagttgtatccattttcctggaaacaacatatgttcttctgagatgaggtctcactagagagccttggctggcctagaactcactatttatatctggctggtctagaattcagtatgtagaccaggctaccccggagttcactatgtaggctaggctggtcttgagctttcagcagtcctgtctctgatgacaggtgtctgccatcacgcccagcaggagagtttcattactctctgtcaatcgaggcaaatacatatttgtttgctttattctcctctcttcttgatactttccattttgccttttgtttggaagccaaagcagaacaaatatttctcctagttcatatgacaatcttctgatacctgtgagtgaatggccaaacccgagtcccagaataagcacctgaaattccatctcttttcaaagagcttctgtctttttttctgtgactgcttgtggtagaatgttccagagtcaagcacagtattctagacactgtttgactagtttgatgtggaagaggaagtgttactgcagtggatttattaatgaggaggagagagtggcagtcttttggagatagttgacagtaacctcccacttctactaatagtgacagggattgacactctgtcattaagtcccttttgctattgtgtcctgtgcaggtttaccgagcacgacttccgggtctctatcaatagctacactatggaccagttgaatcagcaactctgtgggtggggtctaggcatttttaaaagtgccaggattctaatgaccaatcagggttagtgatcactggtctaggactggggagatggactagtggagaaagtccttgccacacacacagagcactagagttcagatccttagcactcaaaaaaaaaaaaaaaattgcaggcacgcctggtggctggcctgtagtcccagggcttgggagttacagacggagtatccatggaacatgctgctagctagactagccagatcggtgatctctgggttcaagtaagagaccttgcctcaatatataagttggggagcaatgagaaaagacacccaatgttgaactctaacctccacatcatagacacacatgcatgcatgtttgttcacacacaggcacctatacacacatggacagacatatatatgatgtataccacacacatatgcataaacaggaatccctgatctaagtgaggattaacactattttttagacataagtgcttcccttttcagcactagagagttccttacagatcgttcttggcccatggataatttcatcttgtttacttacaaattttaatttctataacttactgagtttgtctacgtcctgacatttgtataattatattgtactactattgtatttttttgtcataccaagaaatgcttttagaaaataaacatttactgaagttggcctgggtgcataggtttataatcccaggagggtgagcctgaggagtagttaagagttaaaagcttagaggcagactgcttgcatgggccaccattccagaatgagaaaacctctaacaaaaggcagagctgagcccagagacctccgtgtttcacctcctcactgcctaagaggcactgtctaatttgcaaggccactggtgatccttactgggagtgacacagagcacatgctactgggttcacacaatgcctccagcattgattctaggtctattatttattaattttacacataatgagtattttgtctgcatttatatctgtgcatcacgtgtgccagtgcctgaggaggccggaggtgtcagaattactgaagctgtagttagagcaggttgtgagcctcccatgtgggtgctgggaatcaaacccagatcctcagcaagagcaagtgcccttatccactgtgccgtctctccagccccctccagcatcgattctaaacacagctgaaacctcaatggattcttcctcgtgtgtgtgtgtgtgtgtgtgtgtgtgtgtgtctggatgaactttgctttctaactcttaccacagttacagtaagttgggcaannnnnnnnnnnnnnnnnnnnnnnnnnnnnnnnnnnnnnnnnnnnnnnnnnnnnnnnnnnnnnnnnnnnnnnnnnnnnnnnnnnnnnnnnnnnnnnnnnnnnnnnnnnnnnnnnnnnnnnnnnnnnnnnnnnnnnnnnnnnnnnnnnnnnnnnnnnnnnnnnnnnnnnnnnnnnnnnnnnnnnnnnnnnnnnnnnnnnnnnnnnnnnnnnnnnnnnnnnnnnnnnnnnnnnnnnnnnnnnnnnnnnnnnnnnnnnnnnnnnnnnnnnnnnnnnnnnnnnnnnnnnnnnnnnnnnnnnnnnnnnnnnnnnnnnnnnnnnnnnnnnnnnnnnnnnnnnnnnnnnnnnnnnnnnnnnnnnnnnnnnnnnnnnnnnnnnnnnnnnnnnnnnnnnnnnnnnnnnnnnnnnnnnnnnnnnnnnnnnnnnnnnnnnnnnnnnnnnnnnnnnnnnnnnnnnnnnnnnnntccctcaccccccccccccatctttcgatggtttctctgtgtagccctgcctgtattggaactagctctttagatcaggcaggcgccaccaagcctggcttggatggtcatctattaaataaatcaatcagtccccatggttcttggttatggagcctggtatgtggacttcggttcatgtcttacagtatccatcagagcagcctccacacagactccaagaagacatggtctgctcagcactcacaccaggttcctactgtgtctcttattgaatctctgagctagcgcctgacttttcatgcatgccattaggcaatcttattgtcaggcctgaagcaaggttagggcagtgtcttatctagcctcaaaatttggtgaaaattcattaaacctgtgcatgccatgaacacaaaatattgaagaatgacattttatttataaattataataatttataaattattttaatgatacaaaaaaaaccctttaaagtcctctgactccctcccctcaccaacctagatacttttctgttctaatttctgacccagtcctctgtttatccccttcttccctgcacttctttgccaggcaaagtacacccaacaaataggatattgcctaatcctgcctgtgagggggccttggacagaaagaccagggttgttacaggatcaggaagaaccggagtggagccacagagttctgggggcttccttctaatgcccagctccaacctttgagggcatcgcttgaggctctgttatttatgtagaagcccgaggtgagaagagtcctaggaaggattattgcttcgagtgcccttccttgttaacctgactcctccactgtgcctttgttattctcttcaatgctgagatcctgaagtttggcccagtttccagactgcacagcagtgtgcgcaggatctgtttggttctaataaaaatcaacttcgtgtggactttatgctcccaaacctctctggagttaggaagatgagcccaactgagctagctttaacatcaacccgatgcagggcctgctttgctcccagaaggctctgaagctctgagatggactgtggccaaagccaagggcctgtccctagttgaggctggatatgtcagcaggaggcacaaaaacaccctggcaaagcagaagcaagagtcagcagaccagtagcaaagctcccagaaagggtccctgaagcccagtcttactttactctttcttgtcttttgaaccccgcccctttataaatcagtgggaatttgaagtactttttcaaacgtcacaaaagagaagttaacattgcgtttggaactatctaaaatgttttaagtgtctatgcacctggacagacaaacaaaagaagtagtgtgattaaattaacctcagaggagaatgtaatctgttcccctggtaattgtccaaattagtcttttgtcgataaatcattattcataggacattactagttctagtataggctttcagatgctgaaacactaaactgatgcctgagggtggaaaagggaaggtagttgtcatggctgtctggcagcttgggaagggctcttcttgacactgcttggatgggaaatgatctcccaagcagcgtgatgacactggattcaggctgaaagtgacggctcgggctgattgaattaatgtgaacctttcgctgcactgcacagatcagaggatcctttcccaagaggcagtctggggattccatatttctgattcacctgcacaaacacagtgttttaacatgggactctatgaagtgtcctgtttggcctcagccctcaaaacagctctcagccttggtttctatttcctcatttgtaaaaaaacggtgtggagacactctggctccctagatggtctgaggatcatacactgtgcttggcacatggcaggcggcaacacctctcatctgtggtgaaactgtcaccctgagagccagccgtgctcttccatccttcctgtggtctttgtctttgatctcaatagagattgcccaacacaatccccatttgtgaaatgaaactgaaactccaggtatacccatacacagataacaggtattctttgctgtagatacaatacgtgtgtatggacagacacacacacacaagtatacatgtgtatgtatcacataatcctacatatatgcacatatgtgtatacatgtaaaaatacttgtatgtatatattatccttaccatagacatacatctatagtaaagaaaatctgcattaagcatgagttatctcaactttaagcttttagctaaaatacacctaaattttttcttttttctatttttttttgttgttaacacaagggattcttttgcgtacagtctcatcaggttaatctttcaaaataatatatttttattaattctttgagaatttctctaatgtattttgaccatattcacccctcacccttagtgacttgaggtcctgttaactaggagagtcgtgtgagaaggctccctaaggtgaaccttctgtgctggctgccaacgtttgcacagcaggggtcacttcattaaataatgtcaccagtttacaagtttcttttctgtttattcctgcctttctcccccacagatagaacgcagccttactctgtgtatagatttctgtctatattgtagtctaggcggccctttacaaacaggagctgaagagtgagtgactgttaggggtggcgttcccacagctccttctccctacaaaaggacattttgctcgcagcctggaccctggctgaggagaatgctgtgatgctgctggtagccaccatctctaactccctctccacacagccccttctgcagcgtgtgtcagtgcattctcatccgtcttcccattctgagcccggaggaatcgcaccaggcaacatttgactaccatggaggagctttggtatcagagaggcaggtgccaccagacctgactgtgcagccatgtgccccaccgtgcatcctttggagaagccttgcgtaaatgtgggtgtttcacatatttcctgagtggtacaattgtcttctggccacttcctcctttctgaaaagcagtctgtgggtgggcacagctctttgcttttaattccacagtttagagattcttgttcccttggcggggttctttatttccctggaatgtagagtggatcatagcaacacgacacatgagttttcctgtagcaagaagaggtagacatttgtatagttgtcatgacatacaagtgtctcatcagacgaagaaagcggtctccataatgttgaaatcatgggactcttacaaaagctcccgggggttggcttgtggcattcacagaaacacacagtgtttccgacaacccctgagctatggagggctacactccatgatgcaggttacactctgtgatgcagtcagtgtgttaggcatgagcagacataaagtcatgccttacacggaacaggaatgaacctcgaatgtattagtaatgcttatgtttgatgttaggttggaggaaaaaaaacccctcaaactaacttagaccgtagcaaatgtgaacacagtgtggtgaaaaagcaggtgggggatagtggagcctcggggaaggcctgctctagttgctctctctctttttagattttatttctttcctgtcagggtctcaatacaaggcttcaaactcactaaagttccagactgactggaactttccaccttcttgcctccacctcctgagtgctgagaacgtgggtcccaccatactcagctgagaatgtgggcatgtcccactgcactcactgctgagaacctgggcatgggcctccatactcatgtccagtatatatctatatatacacacacaccacacacacacacacacacacacacacacacacacacacacacacacacagacacacacacacacacacacacacacacacacacacacacacacacacacaccacacacaccctagccctggtttaagtgaatctgagcctgacccggaagttgtagatgggagttgaactcttcatgatggagcatgtgttggaggtgattgagaaaagagtcaaaagtacctgctgcgtacaggattgggtttggagtataaaaagcgtgtgcgtgcatgcgtatatgtgtgtgtgtgtgtgtttgtgcatggtgcatttatgatgtgtgcgatgcatatatatgtgtatatagacaacacacacacatattgctgagatgtcacacattagttttgcttctggctgaattggcccctctgttgtgctgtggcatttgggctgaggccttaatgtatggatgtagccatccagggctttctctttcccattcgtactgcacaggaagtgtttgagatagtcctggttcaccatgagcaacgagcagaagcagactcaggttagaagagtagcaggaacaagaaatacacacttgctgggtgaagtcatagactagagtttttcttgttgtgtcagaatttgttccatctagtacattgtattcaggaatccctttggggttatttcaggaacctctcatgaaatcccatgcttgtataaatatattgacttagcaaaatacttgtagttcaaggtcttatctccatgatggtcctctaaatatgtgtgagctgtttccagggaacccccaaggaaggtccccaaggctttggtgtcagtttagcagcacttgctgtgggttttttattttatttttttattttattggctctgttacgttcagcaatatagttatatggcatgtaagaatcccattgtcacagccttccaggttgctggcattttcttcagaggcattacctgtctgtgaagagctttctagtatcactttattcctctgctggagtggccagtagtgaacggataaaggctcctggtcactgagctcctgtttgaagctgaaaagagggtctagttatccactctatctgcattgctcctcgacaggggcagtgggattgctctcacaggggactgccagggggctctgaggaagtcgtaattgtacaccaagccaacagccactaggactggaactgaggctccatgagggaagagggagatatactgttatcttcagtaagaaggtagcagaaggctggggatggggagtgaggcaaatgagagctgattactctgtagagtcagggacactgcttgtgctggaaagcagcagcagcagcagcagcagcagcagcagcacagaggtgaagggggtggaggctccacgtgcagagtccccatctggcagctatggaaccttgtgtaaaatattctctttgaaccttggtttttcctgtaatggaatggaataactagtacccatttcacaagaatgttctaaggatagaacaagttaccaaaggtcaagttcttagaactcatggcaagtgcttggtaaatattagctgtcaccaccaccaccaccaccaccaccaccattcacagttattctctataccaccaacttgcttaaacctctcatcacagccaataaaacacccctcatccttactctattgattctgtatttcatcaagtcttattatctcaatcttgttatgttatctttgtgagcgagataagcctcaggggaacatagataaatagatttatgagtgattaaataaaacattcattgtatcttcaaagagtcatacagaaataaatataacattgaatatctagtatatagagagtatgtgtgtacatatacacatgtgtgcgatatacctttatttacttacttatttttgaggcagggactctcacaggctgtagcttgacaagtaggctaggctggctgtccagtgattacaagtgcacctttctccccacccccatttctatacatgggctctgagggtggaagttaaacctttgtgttgcaaggcaaacgctttaataactgaactgttcctcagacccctgcatttcctataacaacagaatagagagcttacaccaatctgtagaaaggccattggctgtgcaccaggctttattatttcagtaatattttcttttcccatggtcttgtccttttaaatgtatttgtctttatccttataagaatacataaatcacatgtatttgaaattttctgatggcacaaagaaggaatcataagttaacatgatagtttaaggacacatgaaagacttttcatattagtattaaaagtaaatacttagggaagaaagccatatagtggtagctcctttacaaatgacctaatggtcatttcaggtgattaaaactcaacatggaaacacagtgaggtgcggtttccaaaatgctagtgaaatgctagggtgacttaatagaagagtccagaatacatgacagctaagtccagttcttgagccatgcctgtgcttagtatttggatgtaggcactgtgtcttaacacagatgtagagaagctgggatggattctgaagagggtggccaggaaggaattgctataaaaggtcatggagaatctttgaggtttggggttgtgggtcagagacagaaagtgtagtgtgttctgtgaacagccttcaaatattggaatacatcaccgggaaaggcttggtctaagaaccctgagggacaagtcttggcacagagcaagagattacagtgaggtaaaattactttttctttgtcataaagattgtttctggtaattcctttccaaagtaaggacaggctgccttgtaagcagtgggtttcccaccccagaagatctcttgacgtagaaatcccttgtcattttcccaaatggatcatactttggggaggtagaccagactgatcatcatctatgtgctccaacatgagctcagggatcctcaagcagcagagtgggtgcttctgcaatgtctaccaaagactgggcaagaggagaaacatctcagaagccaacctgtgtgtgataagccgtgactctgtgggtcatacgacactcagtctttttttttttttcgcctagtattaagacaatgttatcttgggaaatggaaaggtgttggggcatggagctttggacttcctagacaactaactgttctatcttgttctggcatgatctgtgctcagctttgtctgtgtaaatgttataatggacaatgcctccctgcaagttaacatgatgttatttatttttcaggacaatcgtatccatacgtccaagtacaacgttctcacatttttgccaattaatttatttgagcagttacaaagagtggcaaatgcctactttcttttccttctgatactacaggtaatctttaagctgtatttcttcattagctattttttgaaagtattatataattccaaaacacatgttaatttacttagttaaattgttcatgattgtataagactaatattactagattttttgtgttattactacttttttctcttaaaaacaaggcagggctgagaataggtaaaccaaaaactgcatttttattgacttaagacacctaggtcattttaatatgtacctttatttgaactatgtaagagcctcaattttgtttgaatcatatagaggtctgataattgctactcatggccttcttcctttccttctccttctcctacattggcggagtggggtttcactcctaagactataaagttgtggaactgactttgtcaaatttccctttaatctaagaacaatgatacattgtgtgcatttataaaggaaatgatgtttgatacatcatttcactgtagtgtaactatttttcaatcattcaaagggtttattagtagtctgtttaactaaaattgggcctaaatggaatttcaactttcatcagtgttttgggaagaaaagggcatatatcaagaaagagtcaaaaccaccacaatagttcatattagccagtgacttatttcatttttgttttgtatgatataattagatagaattggtagatccaggttaggttgtgtgctgtgtttaagagctatgaagatgactctaacatgtgagatctaggtgaagtgctgtgtatgatcttgagttgaatactgtatgtgttaatattttgattgtaaataaaagagatctatattagcttcagcagaagatgaatgtattccaagatgtaactgaattcgcagacagtagccactgcagtaagatatgacttttctgtctctgttttcttccacattgtcaggtcctacctatctggcagtttagccagcttcacaagtcctccaactcctatgaagaaatgagaggaggagagggagagggagagggagagggagagggagagggagagggagagggatcgaggagagaatcacttttttgttgctattagctctgattgcagctgtctcctaagtcagtcactgttggtcaaggatttcctgcagttattttcttgagcagatgtcaagacactggccaggatgaagtcaatgcaataaacctaaaagaactgaaattagagggtttgaaatctccctaagaaaaaagatatagttaaaaataactgtatatttcttgtgcaaacaaaacaaaacaaaacaaaaaacaaaaaaacaaaaaacaaaaccaaaaatcagattagaccatatcagaccagaccagaccatactagatgaaactgaccaaccaaaaacacttaatgaatgaacaaattgctcttcatgaaaggaaatatagcccagggtctctccttccagtgtcagaaaattgcttttggcttcttgatgaggcctttcacagcatgtcagaatttggaatttatttttctaatgacatccttacttagagtctcaggcttttgttcatacaatttaatatttggaagggacagttgagatgctctgtttagtattttattgatgaatgtctgggagctgtgaaggggagatgatgtgtaaagcgatagatcagcaatcggggagcaatagtggggtcttctgctactcacccagtgtttctctaggaaccttttgctttgtttttgtattgtgtctctttaagttatttttatttgaactagcatgtaatgatattcatatttatgagctatagtacaattcagattatgcatacagtatgtaatggtcaagttagggtaattagctttctacatccttaggcattgatcattactttgtgttggggagccttgaccgtgtatcttcaggttgcttatttgatctgtagtcaccaaatgtgttgtaggatgctgaaacttacgtctattaacactcaggttttttttttttttcttttttgaggtttaaggaagtgcacagaatctattatatacaatcgatttaggtttgaattatttgtcaggcttgatccacccccccacccccgcccatgagagtctctactggactgctctctgcctgacagtcctgaagcagattcccagtgaatccgatttgattaaaaaacaaaccaaaacacacttgtctaatagggtcatgtgcttgttactaagtctgccttaggtagtggcactagcggtagaggcacacagggatagtgtgggagtcaaagagacccaggtacatattttagcagtctttgtgcttgctaggattttcaatgccttatatgcttcagttataaaactgggatagggaaataaggacatgatattagttctgactcattcacaatgtattctgtgcacagtcaggaaagcattactaatgtgaatacatagcccatgagtttgttcaaatcattctagcatagaaactaactcaaaatttcagagcatccagtgatttaagatgcagatacccgctagcccctttctaaggtagatgatcaatggctctctggcaagtgttatgaagagagattggtaacttcctaaagactgagatgagaagctgaggcaccagtgacaatgccacagccagctgaaagatgtgtgttggagaaagagctcaaggagcccgtttttaagtttttatttttaattttaatcagtttgaaagttggcataaaggtatttctcaatgtgttttgcaattgaatgcatgtaattgaatcatcttagctagtttacttttgtacgaatagccgatcataatctcatttatttctacaagtcttatacaattaattgacaaagtttggaagatgatgtacttctaatttaaaaaatcttaaacgatggaaaatgttgcttcagctcattccagaaatctcttccctgacatggttcaccaccattgtgccactggtcctggtgatctcgatgacggctgtcaaggatgccaccgacgactatgtgagtattcatgcctgagaaggcttggtgtttccctttaattgtatttctaccttttcagaaacagagacctagccagtggggctaaagaatagtcaagggtgagacagagaggaaggcttgtaattaatttatgtgatgctccttcacagttgttgtatgcataatttttaataaatctataatttgatgtgagccatctaaaactggccatacacaagtgtataatgcacttgcttaatgtggtatgtgttcgtcccctaatgaagtgcttaatgagtttcaaggtacacactgacactgtgacatccagggtgaaaaaaagagagcctgacacaactatgatgtatgtgtatgtgtgtttttgtatgtgtatgtatgcatgcatgtatctatgtatacacatatattttgaaatacaaaagggaaatcacttattcttctgattatgtctatgaactaaagcttcatgcctccgacatcacaccagttcatctgagggtgtgcactaacatgctgagatacctttgtccctgagtaagcttattgtctctttgatacatgtgtctctaatttgggctcttgttattggaccttgacagctcatatagaagctcttatctgaatggcttctagtttcagagcctaaagggaagctcttcatatttgcatttttcctagagatagaagatggttgctttgctggagcatatgaagcaatatgaagcattatatagtctgaccacttggtcataaaacataaacccttggccaagtgtgactcagcatttcattcttatttctgttttaagtgagtggtgtttcataatatcactgttaacaattaggatttctgaagaataaaatatatgttgttaaaagtaatttctcggtttttaaaaccacagtgcagactgatccgctatagcaagtgcagagtgcccctgtgagggatagaacttgcagttcctggtggaagttctcaaaactgtgtgggttttctctggactacaaggcaaatggcgtgctgtgttcttagaagcaagtagaaatgtgtaaggattagagttgtgggtctagcgtgcagcatatgtgtgcatatgagtgcacacacagagagaagattccggtggtgatgtgtgtgccaggatgagatgtagggaggtgagcattgattacgtgtatgggactctgctccaggtaagtgcaagctgtgctcatatttggacagtaacattgtctaaatagactaactcgaaatatgcccagtgctgctgttaggattgatgaagtgtgacttaagataggtctctcttaaatttttttttcagttccgtcacaagagtgataatcaagtgaataaccggcagtctaaggtgctcatcaatagcaagtaagaaatccgttctctggcctgcctgcctgcctgcctgcctgcctgcctgcctgcctgcctgcctgccttcctgccttccttccttcnnnnnnnnnnnnnnnnnnnnnnnnnnnnnnnnnnnnnnnnnnnnnnnnnnnnnnnnnnnnnnnnnnnnnnnnnnnnnnnnnnnnnnnnnnnnnnnnnnnnnnnnnnnnnnnnnnnnnnnnnnnnnnnnnnnnnnnnnnnnnnnnnnnnnnnnnnnnnnnnnnnnnnnnnnnnnnnttcttcccttcctccctgcttccctccttcttttcttttttctttttaaagatttattttatatatagtgttctgcctgcatatatgcctgcaggccagaagagggcaccagatcccattatagatggtcatgagccaccatgtggtttctgggaattgaactcaggacctctggaagagcagtcagtgctcttaacctctgagccatgtctctagccctctttggatttttaaatgattggtggctttctattttaattatatgaatatttctgtcctttaacttattggaaattgaagtatatcttgatcatcgtttcatgagtctttttcacacctagcaaattctttgggagtttcttttgtggaacacagacatgtatttgatattatagtaccaagaaagtagcaatgataggtttttatatgcctcctatagttgatttagaatacattatccatagtcacatggatttccctcgtatttaatttcatgcattgataaataccatccatggaagcagaactaacatcagcagtgacttcagacacgagtatgtttacccaaagaacagggaaaacactagagaattgggaaggaaaactccaagctcctttccaatgtttctttttatcttacttacttttttgtatggaccactttccatatcttttaaatttttaatgaatttcctagcttatgaagtaataggttccgtgtttttagacatgtatcatttgtgtgattctccatcttccttgccccctttccactgcaccctctcacctccagcatcctcctggtccaaatgttctaccgccttccccagtatcctcttttaaaggttctctatttttccagcctcatgggctcctttctcattttgtgggctctagtccaatttactcccatcttgacacacacatttaagagttataggctaggatccacatatgagggagaatatacagatttgtcttagcctgggtaaatagaatgtcccgctgagaggtgcctcagcggttaagagcatttgttcttgaaaatgagttcccagaactcacaactggcaactcacaactgcctgtaactttagctctcagggaatcagatgcctctgacctccaaggacacctgcattcatatgcacacacacataattaagaataataaaacaattattaaaaagaatgtgtctagggttggagaaatagctcagtggttaagagcacttttcattgcagagaacctaaggttcaattcccagttaattccaagggatccagtgccttccacatgtaccaggtacacacatatgtgtacagacatacatgtgcacagagcaaaacactctgacacacagaataaagtgaatattgaaaaaaacacaaagaaaatggtttccatttccaacctttttgcctgcaaatcacataattctatttttcttctaggtgatatgaaattccatgtgtatatgtacctgtcttagttagggtttccattgctgtgaagagacaccatgaccaaggcaactcctataaaggacaacatttacttggggctggcttacagttccagaggtccagtctattatcatcatggtgggaagcatggcagtgtgcaggcagacatggtgttggaagagctgagagttccacatcttgatccaaaggcagccaggaggaggctcgctcctacactgggcagggtttgatcactccctcaaagcgcgcctacacagtgacactcttcctccacaagagcacacggtattccaacaaggccacacctattctaacaagaccacactcctctagtgccacttctcatgggtcaagcatattcaaagcactacagtaccccattgtcattgatcattgatgatgatcatggatatatagagtgatttcatttcttagctcttgtgaatttagcagtattaaacatgcctgtgcagatatctctgtggtagcacacagagaccttggatatatgcctgagtgtgacagccacgtcctacagaagctctattttcagccttctgcaaagccacaacatgttttccctagtgattgcactagttcacactcccatctacagtgagcgagagttcgaaacctgcatcctcattggcatctgtggtcatctattttctccatggaggccattctgactggggtgagatggaatctcaaggtagtttaattttgctttattctgatggctggagatatgatacacttttaaaagtgtctactggctgtttgcattcttcttttaaaaaagcatttcttcagaacagtgacccatttattgattaataggatttttggcatttaatttataacatatatgcaattatttgcatattcatgacatttaccccctttctgaggcagagatcacagggattccccccactctgtaggctttctgcttgttccattggcagttactttctgttttacaggaacattttaatttcatgtttgctatttgtctgtcggttcttgggactgtttcctgtgctatcggtgttctattcagaagtttgttgcttatgtctgtgtctctaaatgtttcctctgtgccttgctttagtggtttcagtgttcttggctttaagttatttaagaatagaataaatattgaaaaaaaaacccaaagaaaatgctttccatttccaactattttcatgcaaatgtcatttttcttctgggctaaatgaaattccattgttcatatggaccccattgtcatggttcattgatccaatttcaaatgatcatttttgtgcatggtgaaacatatggttctcttttcgttcttcaggtggatatccagctttgacaacattattaaaaggctgtcttttttttccccccagtgaatgtttttggttcctttgttaaaaattgaagtgagcatagctgcatgggttatctatggttcttttattattatgtcccattagtttacataggtgtatttatgctgctaacatcacactgtctttattactatggatctgtatttgaggtcaagtagtgggatgcctctggtgtgttctttctgcttagaagtgctttggataaatgtttctccatatgaaatttggattttttttaggtctgtgaagaatgtcactgtgacactagtggatcagtagattccttttggtgggatagttattttcccagtaggaatcttgaaaatccaggccatgggagtgtttccattgtcttgtgtcttctacagttttatctgccagtaccataaggtttatctttagctctatccctgtatacttttgagttatcatgaatggatatttttcctgatattttttcaagaagtctgttgtcaatgcatataaaaactattgattatttcatattgactttgtatcctgctaatttactgaaactatcagcttcaagagttctttgatggagttcagtggattctttgaagtatagaattatattgtctgtcaaatggataatttgacttcttcattttcagtttttactctctttatatttttttcttgcctgaataagactgaaaagaaagagcacccttgtcctgtgccagtgtttaaaggattggtgtgatgctggccagaggcttgccatatgtagtctttagtatgctgagctgtcttctgcataattttggttttgtcggggcttttctccccctcctccaggcaaggtttttctgtgtagccctggctgtcctggaacttgctttgtagaccaagctggccttgaactcagatctggctgactctgtctcttgagtgctgggattgaaggtgtgcaccaccactgcgctgcagtcatcagagatttcttatcaagaaggttgtttaactttgtcaaatgcctttgctgcatctatgaagaagatcacataatttctgtcttaagtctgttaatatggtatattacgctttattgatttgctatgttgaacctatcttgtattcttgggacaaaattatcttgcttatgatgagtactcttcttagcgcacccttgaattcaatttatgagcattttgctgaggttcctgtccactagagagattggtctgcagctttctttctttgtctggttttggcatcagagttataattgtttcataggatacatttgattgtgttccttctctatcctataggaaagttcgagaagtgttagtattaaatctttcttttatatatatatatatttttaattaggtattttcctcatttacatttccaatgctatcccaaaagtcccccatacccttccccccactcccctatccatccactcccactttttggccctggcgttcccctgtactggggcatataaagtttgcacaaccaatgggactctctttccagtgatgactgactagggcatcttttgatacatatgcagctagagtcaagagctccagggtactggttagttcatattgttgttccacctatagggttgcagatccctttagctccttgggtactttctctagctcctccattgggggccctgtgatccatccaatagctgactgtgagcatccacttctgtgtttgctaggccctggcatagtctcacaagagacagctatatcagggtcctttcagcattgaaaaatttgtagaattcagcagtgaatccatccaacccaatgtatgatagcgtttacgggacccagtcttatgcaggtcttgtgcagataaagacagctgcagggagttcataagtgcaatgactacgtcccttccagaagacatctttgtggtgcacattttccctatcccctggctctgacactctttctgcccctcctctgtgatgtttcctgataggcgcttacactttgtagttgagaatctgcaacaacaataaaaccccacactactgggcttagtgtgttggttgctggtacacactgagcatgtctctctgtgccttctaaatggaagagtgggactctcgatccatgggaggattaatgctccctacactgagctacgccatcttactttgattggaatggagacttttggtttacacactggagaagacagtgggatcacatattgtggtcacaccattgtgattgcagcatgtaaaaagatcttgcatatttgaaagaaaaacttgaggagaagaatctttctggttttcaaaagcaatgtcaatgagacattctttcatagatttaacaatgaattcagaagtaaagaaatgggaatagtttggagtgctatttggattcagtgaaagcacaaaaataaaattcatctttacctcatgttgctaattcacaataaaaatatttcagaaagtttcactctcaaaaaattaattgcacttttcaaaccatcttggcttggccctttcttgggcagtttccctttgccggctttgtagacaggaggatttgcttgccaaagggctgacttctgtacacaggctgcaaagttgttatagttattataacaattttccatcatagccaatgactatgctgcatagatagaatttttaagggttgagtttctaaagggcaactatttccccaaatgaggtgcatcttgatataatagggtgttgtaacgctttcaaagtctgcacatggagtttttagtagtagacctattttcctttaaggtttatataacacagagaactgtgaaagatccttcaaagcgcctctcacacaatattgaatccaggtttggtaaaggaggttgacaccacacacccctcagcaaacaaggtgggaatccagctctttccccctcacagttgtcctctggccttttactctcccttgtcctccagtgtctggtgcacagtgtgtctggccccattgtctttcctcagcatctggggctcatcatgtgtgtctccccattgcccctcagtaaggctcgaattgttcttggctccaattggatcccattcctgttgtaacctgattctcttattatagacaacaatgggacttactcatgcagcaggccctattgtatctctcctttataaaaagtattagattgagggttcagaaaacccaagccaaaactccagagatcttggggggtggtgagactattaactttagaaatgtagtcttgtttcaatccaagctcaaagattgtctatactgaaaagatgttttttgatagtatttggttgattgctcacttgcatcaaggcttcttcctaaaagtttctactattggatcgttctgccttcaggtccctgagatatgcttagtgggttaattttctccatgaattttaaattagcagatgaatggtctattatggatagaaatgttggaatgttaagcttatgaatgaaacactgaagttacttttgaccttgctttctagatccaagttaatttatatttgacacattctgttgttttgtgtcccttgtctttgccttttctgttctattcctctgtgcaacggtcttttcagatacaattgtgattgtattactatattctaccatgctggcagcctttctaacctccaacctacagaacttatgggtgtggtcttatttagaataaaattgtttacttttgcaggtataatttagatgttgaggtaagatgaccctggatcagggtatatactagactcaaccacagatatcttgagatagagaaaagagggcaatatgggggcggagggagagggacaggggaggaggnnnnnnnnnnnnnnnnnnnnnnnnnnnnnnnnnnnnnnnnnnnnnnnnnnnnnnnnnnnnaggaggaggagggagcaggtagcaggcattcgacctacctagccccacaagaagggactcaagggctactggaagctagcagggaaagcagacagacctacccccttttcctgagggattccattcttgcgcacaccctgctaacagaccatcctactcctttaagccatgtattcggagtgattcgttccctcagtccagagaacacttaaagcaggccagtgacttctaaattagacctaaagacaaaagaagcttggaaatgtcctcgctgttgagatgagtcgcaggtgcaattgaccagttactaaaataaggaagtgcggggagatcccaggagacgggaactgaatgttgctgggggaacggaatggactccaaaggacggaggaagaattgtgctccatgccagatgggcaaactaccaggtctgcctggctctagacgctggcatggagggtagagatggcccgcggggcctgcacagaccttgccttccgagcaaggcgttttgaattggctggttgacagtttgtgttcgcccctggccccatctggtgtccttgtccctcccaggcatgtgtgttcagattggcctccccttcacactgctaaatttaaggcttcatttagaatcaaatgctctcctggccggctgcctgaggagtcacatgtggaatgctgaggcacttaggcagggggatgaggcccttgctttgggagagggggtctggaaaccatatgaactgtaaatagttttagaatataaaaaatattaagtcttctgccagaaggaaagaattgttccccactcccccttccttgacttagttattaagtgtctgttggaaattactggccctgatcgcacagtctgtttactgtctctatcagccgacaaggggcgtcaactctttaaacacttgcacagtagaactaggatctgagatcatagagcccacacttaaactgctacgtgcctgattttggaaggaaatttgctttcttccatataatttttcccactgaaagtttaatgaaacaaataatacaatatatatgtaaagatataagaaaaagacaaattaaaactagaaaacaggacgtgcactcttttttcctgtgccccaggatacacaggttctaagctgcttctggccccagggacagctcagtgagcgtcctattttcttggttgtcattttgcttttacacccaacccttcattacagagggaaattccaaaaggcttttattttccttgtgcgttagttcccttggctgaggggctgccctctttctgctctcagcctggcaggggcagcctctctttctgttttggagactagctgctgattcttcaatcttcgctttcttcttcctttctctccggactgcagcatgtctcttcttgcatctccttttaaggacgaagaccagggaactttggagttgagagacaatgaaggaaaatagtattcaacaatcatggcagagaacatttgagaacagtggctatttaaaactgcagatttgagtgtttttgtttttcttttaaactttatttattgtaattttttatttctagaaattagaatataactccatcaatctcccccttcctgtttctccctccaatccctcccaggtacccacctattctctctcaaagttatggcccccttttctttaattgactttaatttttaattaaattttattttatttaaaaattttatttattttattaaatattttaagttttctttattttttaaaaagatttttatttattattatacttaagtacactgtagctgtcttcagatacaccagaagagggcatcagatctcattatgannnnnnnnnnnnnnnnnnnntctcattatgagtggttgtgagacaccacgtggttgctgggactttgaactcaggacctttgggaagagcagtcagtgctcttacccactgagccatctcactagcccttaagttttctttaatttaaatgtaatatatatcatatatgtgtatcatatattcatatatatatgtatatgcacacacatatgtatttaccaaatatataaatataacctaatcagtgcatataatgttacttgtatgtatatcattttgggactatctagtgttgaataatcgatagggaaactcttccttgggaaagactttctctttctcttaggatctcttagttgcctatagccccatgtctagggttggggcccatgagattcctcccttccatgttagcatgttggcattgtctccatttaggcagtatgttgttgaggcttcacggtgtagcttccatgacatttttaggagacacagtctgacatctgacttcctgtttctctggttgttgcaatctttctggcccatcttcagcctctcatttcctgagccttaggtgggaatgttgtattggagatgtatctattgggactgggctctacaactctgcattttgattggttgtggtttccatattggtctttatcagttacaaagagtcgtttccttgatgggagatgagagctacactgattgtgggtataaggacaaatgtttagaatatagttgaggattatgctggcttagtaaggtggtggctatcagttggggcaggtggcacacagtcacttgcttccagcattttgatcaactgtttgtttgctggcttgtttccattctttaatggattctgttgcaaagcgaagtctctttaaggaagaacagaggcattattaaaatttattactgaattcatttccaggaagtttatgtgaactcactctcatgtctgaactgatgaatgctgttttccaacagcatcactgtgactttgagtatcagcttcttaaacatctggctgttgagtgtggagacccaccttgcacaccccatttctttctttgtttttttcaaattttagttttattgcattatgatgagaaaagatacataatttcaatttatctgaacatttaacaacacattttgagtaaatagattgacatcacattcttctttcccttttgtaccccaactccttcctgagagcctcccctcttcaaaacctgcaatacctttcattttatcatactctttaaaatttataaagtattttaacaataaaaatgagtattatgaaagttgtttgatataaaacaacaatcaattgaacagtcttatgtagatgcttgtctacagcaatactgaaaatacacacattttctcaatataaattttaaataacttcaaatatattaactgtatgatattttaaaataatatatctttattagttttttaaatgaacataaatagataaagtctttttatttgtttgcttgttttgtttttagtagagcttaaaatcttggctcttactgtggtacaaacacaaaataagaacactttttggacattggagttcattgtaataaagctgtacttaaaggattttacctccatagtagataagctaagagctgaccgttctgctgctccaaggaatgaattgtaggcatgagttttggatacagatttcctgctgtggtcaaagctatttgacttgagtgattgttgtcattctcagcccgcagggaacaggttacattcatttaagaaatgggcacacccaatttctagtgattgtgttttcgaacacatttattagctcttatttattattttttttgtgttacttgcctatttatactcatcatttaatactgacctgtatttctttctattctgctaggaaatatattttaaatgttgtcttctaaaggaattcctccagtgggaagcaatgctggacactaggatgtcaccttgggaatggacactgctcccattagcatcctccttatttcctttccacaaaatagtacagataaaatatatttctattttaaaactttcccacccacttgtactggctagttttgtgtcaacttgacacagctggagttatcacagagaaaggagcttcagtcgaggaaatgcctccatgagatccaactgtaaggcattttctcaattagtgatcaagggggaaaggccccttgtgggtgggaccatctctgggctggtagtcttgggttctataagagagcaggctgagcaagccaggtgaggcaagccagtaaagaacatccctccatggcctgtgcatcagctcctgcttcctgacctgcttgagttccagtcctggcttccttggtgatgaacagcagtatggaagtgtaagccgaataaaccctttcctccccaacttgtttcttggtcatgatgtttgtgcaggaatagaaaccctgactaagacaaattggtactgggagtggggtattcctgtgacaacctgaccatgttttggggaggactgtggaaggactttggaaccttgggctagaagatcggtgttaagtgctctgtcggatgttgtgtaggagcttggaagatgatgttgagaatactgcagaagatggagctctggtgtgtgaaatttcagagggaaaattaaagacttttttcagggccattcctgttttgattgtgaagattctgtagttctggttagctggggctgaagaatcagctgtgattaacaagataccagtactactaaagcaaaaactttgcattactgggactattgatgctggttagctggagctaagaaattagcggtgattaagaagagaccagcatcattgaggtgacatcttctgggaagtgttttctgagagcacagtggctgcgttccagatatagccaaagttgtaccttgtgctgtggctggacttggtaatgtgtaagggtcacccaggtggtactggttttgaagacatgaaggagttgagcagagcagctgaggcttggcactgtgagaggccatggaaggccattggtgaaagtgcagcctcagttgcaattgatggcccaggactgaaggggtcatgcagtgttttggagatgccagtaccatgagatgaccaccaagagcagcagcagcagtggagtacaggcatctggagcctagaggatgacgtgtgtgctacaaagggcatggctggagaagtgacccaagcccttggaggagcccagattgtgagttggatcccagacattggatggttggagattgacttttgcttttgattgtgactgtgccctgatatttaccctcttgaaggaagaaactgttttagtggagcccacagttaagagactttccccagtaaaaagactttggattttaaaagagatggatattttaaagagactgaaattttaagaatatgtaaagactgtgggacttttaaagttatttagatcttggggatgaataagattgtaagggttgaggcttactagtgatgtttttgtgtgtcaagttgacaaggggtcaattgtactggctagttttgtgtcaacttgacacagctggagttatcacagagaaaggagcttcagtcgaggaaatgcctccatgagatccaactgtaaggcattttctcaattagtgatcaagggggaaaggccccttgtgggtgggactatctctgggctggtagtcttgggttctataagagagcaggctgagcaagccaggtgaggcaagccagtaaagaacatccctccatggcctgtgcatcagctcctgcttcctgacctgcttgagttccagtcctggcttccttggtgatgaacagcagtatggaagtgtaagccgaataaaccctttcctccccaacttgtttcttggtcatgatgtttgtgcaggaatagaaaccctgactaagacaccactctttgccactgaaagcctctggctggtgtagtctttgtaggaccacctctggccacaccagaacactggcctttacataactacagcgtgatctctctttccagccctccatccacagggtttccctcatgtaccaccctaggtagacatcttcccagtgcagttctaggcaggtagaatggtcactagagtctttgtgtgatgctgtggcaacggccagtgctgccacagctcacacgcacatggtgaagtcagtcttcttccgcattccttcttgtcagcctcttcagatctggctgataccttgttgggtttctccctggctggggtcaagctcggccaatagtgagtgctctgtatttgtggaattcagtaaaatacacttacttttttcagctatcagggtgcattcagagacagattatctcacaggcaccggagactgagaagaattgtaatctatcttgtaggagatacagcttgactctctgaagtgaattctttattttaaaaaccaaacaaacaaacaatgcttttattctctaacctggtatggtttgtgttttaaccatccaccctgcccctcacttcttgctcttccttgtattatctctgttataatgtcacagggtcttgccagcaagaatagtcatatgaaactatttctcacctttactccagagctaaataagtacacgacatgcatgtctacatacatagctacttcacttaaatctctactcagcaagtatctcccaaactcacaggatgctaggcgtggttctatatgttaagaatatagaaacaagaaaccagacacagccttagctgtgtaaatttccagagggaaagacagtttaatggtttaatgtaatttcaggtttcctatgcccagtgggaggcgccacacccatgcacatgtggtcagcaccaattggacttagggcattagttactgggttgaatgccctgggagggagttggaagtagatcactagtgcagtgaatataatggcctcttgctagaagtaggatttgtcccagattggaaatgatctgggtgatcgtaaggtctccatcaaggtggggaaactgggataaaatggagttctgagagacaaacaaaagccagctattgtgtttatattttagacagggtcttgttctatagcccaggctgatcttgagttcactatgtaacctaggctggactcaaacttgtggttatcctcctgctttagtatcccaagtggtggcactacaggcctgagccactgtgctcagtcaagagccaattcttataggaaagagtgaagaatgccaatttcagttgtatgttatatgtcaggagaggccatggaggcttttcacaggaaaattgtaggtataatacagaaatttctctggttgcagcatagatactggacacaagaggaagataagttatgtccaggtgagatggcaatgtcatagactttggttgtgtcagtgaaggctttaagcataagtaggtttgtctgtctatctatcaatctatctaattatctatcatctattattgatatatcacctatcctctatttacctatcatctatctttctatatatcgattaatcatcttttccatgtttcaaaaaccaaccaataaatctataaagcatctatttatgtatattttatttacctgtcaattaactatacttatcaattatctctatcatcatcatcaccatctatttttctttgttggggtttcaaacacacagacacataaatagaacagtacagtgaatctttacctatatattacctcttgatagctgtcatcaacttcttgatattttgtgtttatcctcatgttttatgattttttaaaaaatccttttccttcatctatctatctatctatctatctatctatctatctatctatctatctatctatctatctatctatgtaagtacactgtagctgttttcagacacaataggaagagggcatcggatctcattgcagatggttatgagccaccatgtggttgctgggaattgaactcaggacctctggaagagcagtcagtgatcttatctgctgaaccatctctccagcccacattttgtgttttttaatgatttaattatgtatgtatgtgcgtgtttgaataagtatatgcatatgtgtgtgtatgtatatatgggtatgccagaaaagggcattggatccctcagtactgtagttagacctgtaaaaatatatttatatttatttaaatattttaatttattcagattattttaattatttatttaaaatatttttaaaaatatatttacccatgattctatatacttaccaaactagcagtaattctatatatcatctaatactcatacttttagacatgttttaaaggtaataatgaaaggatacagtatttgtttggatgtgcatgagcatccagtgtgtgtgatcaggagttcatagctcattgctgaagccctgagatgagaaatgaggggaagaaacatgctgtggtgatgttagtggctgcttcatcattttttccccaagactgtgaaaccagaggtctgttgagaaattcattcattctgtagaggtgaagaatgctggaagttactaagggttcaaagccaaatataaagttgaaagcatctgagcacctagggtaacagtgagggagtccaaaattcaaagaagataggaagagcccactaaggatctctgtgtgtgttagtcatcttctattgttgtgatagaatacaggagaaaagaaaattaaaagacagaaagggttattttagtccaaggtcagttgactccattgttttgggacctggagtgaggttcagacaatcttgacagggtacatgcaggatgagactgatcactttgtcactgagaagcaaaagtagggcaagggttatggtctggatcctaattgtctcctcaagatgctccctcagtggtctagcttactcttataaggtctcatgaatcaatttcctcacttctcagtggtaccacaggctgtggccaaccctttaacagtgggtctttggtgactgctttgaaagcacagcagtataactagtaagtaaaataaagctaagggcagtcaactgtgatgaataagacagacatggggactgaccacacagtgtcactagagagtctgtgattggactggggacacattccccatgggaggaaacccaggtggccagcacgcacacacagggagcacaaatggccctttcaaagacttaagatagaaatcagcttgttgtccttatgatgaagtgccccgtgacaataaacacagtcacagctattagttaatggttgttcagtggcaaattcaagtgtatgttttgtgatcctgcaacatgcacgctttttagttcaattttacataatttctgtcaaaagtaggaagccaatactttatccttgcaaagtttaagaaataaaaaaaaattccagcttctaatccacattaaacagaatttcctattttcaggtaatcaagatggcccctgtgatgttaccctctgcaggcggaggcctttagtgacgttttctagtttttgtttaaatgatttgttatgatttgttgtccataccctggagacatgagcttgaactctgtttcttctcataacagaggtgctgaggatacaaagcggatggtccagtgggagggagaattatctagagatcaccagccatgtgatttatctcggcagtgctgagagaaatgccaatgatgtaatggttgaaggctcagggaaaaagatattttacttatgaccataagtaaatcctgattgaagtcatggttctgagaagacaagtctggagggatcagaataataaagaccaggcatatgcttttccgatgagctcactgtacatgggggcaggacacttggaatatcttgaggactgaaagttaatatatcccttattagacagtccctcggctctatcaatttttctcgctgggctactgatgacaaacgcgtggcaaacactttactagtgaagtcattgtttgaaagtgcaggtactcttcattgcgggctggaagagtatccatgctttccaggtattagaagacaaagatgatttacttgtgtctgtttaggaaccagatttatatttcccactatttcctaggttatttggtgaatatagttgttgctaatagcccttgtagccctggtactcagcatgatgtctagcttacagtgattattctggccatagaagggtggtcttgaattcattaatggaggatgacatcacatgtagtcttggtggtcactactcaaaaatttcacccatatgttatcctgtttctgaggagttaacaggataggcatcacagtttattttaaagtggattaatttttttcttagaaactaaactaaacttagaactaaatctgactgtagatctaataagtggcagggctcataatctcttggggttacttttacttaggctttgttttaagaaattaaaggtgttgtttccagaaacgttaggtcccaagagcagagcaaaccatatcagaccaccgagcggtgctttgtatcatcactgctgggatttcacatttctacttaacacttttcatatataaatctataatatataatctgcttgtctgatagctctcaaaaatttagttaagactgttatcagaggtaatagaaaatgcaataccggtcctttatcctggaattacaacattcagagctctttcccgagagatgtgtcaatcacttcttgttcgctgatgcctgtggctgtgctgtcaaaggattctgtctgagcagctctgctttgtctggtcagtctagggcatttccctcagtgttaacgcatgctagtaaagacaataatattcctctgaaatgagtttgatttccttatggccttattatggattaatcggatttatggaaggtagaggggctctggaaatattgattcagagaagtttcttttgtataacatttggtagctttattattcaggcagaactaataagtgaaggcatccgctggcttccaaaaggtaaggcttgatattgtctgcatgcttctgcctctgaatagtacccagtaggactcaagaaccaggcaggacatctacgtggctggttgctcttctcagcaatgtgttaaaccatctgcaccatagcactacaacttttacttttctctgcttttcctttcctccatccttggtaaactcagtgggaaagcccttcagctgctgaccatggtgacccgctcatgtggttttcgccacggtgtggctaagaaaaggggacaaaaaggagggatgtatccgttttcttcaaaagaagtagattgcaaagatacgagtgtcaggttcattctcagcgttatgaggcctcacacatcagtataattatagtggcttgaggcaggccaagctatccattttattctagctcatctctgacagtgctggggttgaaaagaatcagagccgtctgctatctagtgagcatctatgtcaggagaccatggctgcatgatatcctccgaccagatggtgttgaatactgggactgtgcaccatcaccttgcttaaatccttccagcttttcagggcccactctccttttaagcaggtaggatatgcttaacacagaaagaaaagtaaataaatggatgcagagttatatggtatgacttttatagccaaagttgggttctaggtgaagccttgtcacttacatgtaatccaaagaaagctttcatggggctagagagatgggccaggggttaagagcattggctgcccttcttgaggacctgggtttaatttccagaacctacgtgatggctcacaaccacctgtgactccagttccaggggacccagtgcccttctttggcctccttggccattgtataaatgtagtacacagatatacatgcagcctgaacacctacacacataaagtaaatcaaaagaaggatttattatttgttttgcaacaaattgacctataaatgtcaacttatgtaataatgagaaaccaagctgtttgactgggtacagggtggatatgaagcattgccatctctctggttccctgagtttccattcaccagtggcaactgctcaagcgtctctggaatgccttcatggaggctttcaaggcttgagtgatggctagtttttattaaattaatataaactagcatcccctggaaggagggaagaactgttttcatcagactggtgtgtgggtgagtctgcgggaacatcttattgattaatgattgatatgggagggcccatcctattgtgggcagtgccatatctagacaggtggtcctgggttatataaaaaagctggctgaacaagccttgggggtccacccaggaccagcattctcccagtggtctttgttttagttcatgcctttagtgaaggaagtgtaagataaaacaaatccttttctccccaagtgtttggtcatggtgtttatcatagcaatagaatcaaactggaagtatgttaaaatatgtgtgtaagcaatgaccagcatggcagataaccctaagggtacagaagtgacatatataccttggcaggaaccaacagctctctaggtcctgctcaacaaaaggaaaattgtctctagcactagaaacctgccagctacccaggactagtgaagccatggatcctggaggagacttacaaccaccactttattaaaccaccacaggccttaaatatactgtaatacttgtccatatacccacagagaagtgtagtcttcactcctcctcaaggaaatttctcttcgcaaaaaatggagaccattacagaaaaccacagtcaaatgcccagttgagagcccaaggcaatggaaatatctataatacaactttcccacctaaggctcagggaacactgaagaagagaggagttgtttgtaagagccaggagattaggtcgtctgctgtgagactgtgtctcctaggaatgtgagacccataaagtctcaccaacatggctgcctaaacaggagctaaacaaggatgtcactcatagacatgctaacacggacaggggaaagctcacacagcctcattggtacatgaagaactgcaggctactaaggaataccagagtaggaaatgctgtcttcccagagaagagcacagcaactgcttatccaaaaccaagtgctcagtcccgaaaaacatacatgtgagtaatgctacacagtctgagcatacatgtgagcaatgctaacataacatacatatgagtagtgctaacataacatacatgtgagtaatgctacacagtctgagcaggctttatttaggaaaatgtatgcatgtacatatacacatacatatactacatatgcatatatatatatgcgtgtaataacaattatggaaaagagagattatgaatttgaaagagaacaaggaagggggtctatttggaggaaataaaaggaagggagaaataatatagcaaaatctcaaagaagaaaagaaaatttaaaaagaaaagcttgtgtaggaacacccttgtctcaacacctggatcctaccacataggtgtgggtctagacacacctcttttagcctaacaatggaaatgagatcctgtttcatgtcagtgcatacagacccatcatcatcttcttttggttacattattcttctgaatatgcatgtagtacagttaattctgctgaatacatataatctgtgataagtaagcattccatggtaatatttgtagtttctaactggtttctgtaagtaatgctgcaatgaacccccttgtatactcatgtttaaactcccatataatcagctccttaaagagggatgcctatatcaaagtgtatgggcatctgaattttatatagatatttcaaatagagtaaatattctaacttctgtgaaccccagggtcctgtatgatctgagtggaagcaggatccagctcatgcatggtcatgaggattaagggagataagataaatattaatagtcttactacatgagacaaatctagatgtaaaactatttacattcaaatagactaataagctgtaacgtttagtatcctgcatcccaagtatcacaaaggatgtgcttacacataaaataatttgctgtatctgaagctcaaatgcaatggagtgtcatttgtattttatctatgactccccacgtgaaagaatctgtgctcaggggtgcaataagtaggtactaaaaaaatgtggattgctagaattcatgttgtatgtttagggaaatggtaatatttaataaatgttctttttagaaatattggttttttttattccttaatttagttagcagtcattcaagaagatatattgaatggcatctgacctaggcagttgcttaagttccgatgatacagtgctgaataaaagtgtctctgatcaggagatatgtctgtatttcctagtgctggcatatgctgcatactaacggaaccaagcttagtgtgagagggctgatcggctaattaagggagaacaattacattttccttctctagtattctttttctcctcggcaaatcccccctcttctgccctggagttagtatcactaatgggaaaccggaagcattcttttggtcccttttaccatcgaaacttctgccctttagcttcagtcatgggtcggagtcttgcttatgggaaactctggagccaagagtgcggtgcagtactgctggatgctatttcaatcttaggcttgaaaacccatggagtttccagctaagtctccagccctcagcatactgtgtctttgccagagaaagtaagtacagaccaagtcataacaggttttgggagaagttgccatcaccccctttagttaaactctactccccatgttctgaagggtggggtgtcctgagtggttccctacaccttgtctacttgttatggttcttaaatgccacctgtttcatgggatcttctggatctaaatgttgtgacttttttttttttaattttggattatttttggattattttactaaggtaaaggagatgttattatcccatctgttttagaaacatctggttcaaggaagacctaactagatcgtatctaagtatatggtgattgggagaatggagccaaatcttgaattctgagaatctcagagcaattaagtcaacttatttcagaaaactaataggttacaactcctatgcatttggaagggaacaactaggttgaacaatgtcaactccttggggttgtgttgttttcacagtgcacaggctatctggtgtctcctcagcagagcccggatgcaggatcccttgagacaggagcctgggcacctctgcaacatgcacacagtcacagccgggagcaccagtacccactgcttcagctgccacacgagctgaaatctcacaaatccatcaatactttgaggatgatcttttaagcaaatctcttccctaagctgcaggggacattgcattgctctcggtagtggtggcagcagaaaggacaaagaaaagagctgggttcagaacacagtaattttgaccgtttgtgagtgtccattgatttttgcttatttggtagcaatgacccttagtgtatattggatacatgtccaagtttctatctgagtaatgttgtatgtattttgtaagatagaataaaaacaacaacaacaacaacaacaacaagacaatgtgcaaagccctacacttccgttggcactatacacattgattcttgcgtagcagcttaaatagaggatgcatgaagacctctcacaaagcccacggttttccaatgaccccaggcaccttatctgcaaaaactctaatagcaagcatggagttgcgtttttccccatctaaagaagtctactttgtgtttcttcataagactctaagtctatcccagtcttacgttataaggggtatgctctcttcttgttggggctctgccacttgtctggcagaagtgtctgctagttcgtggtgtaggttgtttcagagggagttgggtgaggctatgctctcagggggaggtagcacttacagtttcctgtggattcttacagagggtatagcatagaagtaggaggtgtagaatttcaaaacaaaacttaaggtcgtcttagcttcccaaaacagactttcgatagggaccccagaacatttcagtagcaatgtaataaccataagctacagaaggagtccttccccactccatcatatctccagaagacagtccctgagagatgccactgatgtccaagggaggtgttcccaggagaaataacaatacccggtaccttaaagaggaagacaagtgagggtcacaagccttcctgttttctcagcacactgagctagacagaacactgaaaagtatggtactgaaaaaaaacatcaaattttggctagagataaaaatgctgcagctgagaaacttccagaacaacatgtacttggatctgcattaaagaacagttctttgagccttttagccaaatgacccagcagggttgatagtgtgaggcagatttcacagatgtataaatatttaaatctattttccatcctataaagcaagtagatggggctagttttgaaaagcctcacagcagaattcacctggctgccttgacttactggggacacctatcttgctctagcatccttcgtctcaaaggaggggtttctaagaagcaggatgagaactatcagtgttgaaagcaaagctggtttacatttcatggagtttatgaaggcagggtccatccgttgtcacagtatccagccgctggtcatctgtttctgtaaggcctgtctggccctgggcaaccctgactcacttgtaactccgcggctagacccaatagcgcaatcgcctttcatcgcaaccctttctgatcttgctggagagtgggcatgggataccattacaaacacaaccttcaaagaaagcttgcagcttgttgatctctgagctgctggcttagcctgtcagatgccaccccagtcacatggcttctgagagagagtcgtgctgttccggtacttactagctgagagaccgaggaggacgtagctagctgggtcttttgagagaccacagcggctgtataaaagtggcatcgagttgggatcatggcatttcacagaccctcagccaagagttcggcatcttgacctttgtctacctgtgtcactgctcactgaaaatctacagacaaatcattttacgtctctaacacccacactctttgttggttgtgaattcatcctttaatttcccgtcttctcaaagtctcacctgattcttctagtctgtcatgtgcttatggttatttctcttgactctactttttattctactccactagtgagcaaaatatttctgttctcttctcagactgcagaatgaaaaatggatgaatgttaaagttggagacatcattaaattagaaaacaaccaatttgtcgctgtgagtattcaaattatatgacttgatcatagattagaataacacacattgaagcactggcaaatttagtaaacccacaagattctagagtaaccaaggagggatcaccattatatattagtacaaattcttagttatagatactttaaaagagtgacttttggtgacacagtgacttggatagtgcagagaggttctttctttctgctctctgaaaaaaaccccagaaacgcagaaacaatctaagtcaatgtgtgagttatttttataaataagagtttaaaaaatgttgagtaccctaaaaaaggttttcatacatttagaatgttatttcttagtgctgcaattagtgtttttaaactgcaccacatttgaagaaagcacactaaaggtaaatatatgttatgattctaaattgaaaaaatgtgaattagtgagtttttgaacatcaaatgcattataatttatatttgtaaacaactaatgttgtggtttcttaaaaatcaattcagccattgaaatgtaaacagggaaccacagttcaagttaaatttaaggtgatacaaatgttgcagatcagaaactaaaaattcaaattattatagtgatttttatgtattaggtcatttatgaaaatttttgtgttgtatgctgaatcaagttgtattctttattaaatttgagatattttatgatggaaaaatatggccctaaaatctctttaaaagaacaacaacccagttgggagtgcttgacattcaacctcagaatcgcccttctactgccgtaccatctatgtgctccaagtgcagaggagcatgcgcaaagagcatgcgtgaaggagcttccgggtagacaaaccatttgcagatgagttcacacttcaagtggctaattctctggcaaccctaagattttggaaattagccgggaacccaaacaaaactaagcaagatgttgtcaggacacccaaagcaggtctcaaagtgcctgtgtggtttgggccccttggagactcgggatggtctgccaggttctcatttataatcaatttacttttatttcatgtgacttaaatgacacgtctggcttattttccactcattaaagattaggaacatgacagtaggaggtagcacctgtcaaagaacaccctgtgtaggtgagaatgaggtagattgttaaaggacctggccggaagtcaaatgtctgtttactgtcggcagtgccttctgtgaaataagtcccaggaggcaactataagaatgcgttttgaattctaattgttctaaattcaaatgcctggtatgtggttcccacattggacacaacagatatcagggtaccaaggctcacaatcctctcatctttctgatggagggatggcaccaaacccacactctcaataccttagagcccttcactctcttcccgctctggcaaagtacaagcaagactctttggtccacagtcccaaagctcaggctctgactgtgtcatcagtgaagagttaacgaaaccttcccgttatcctctgcccgactcctgctttttggttcaagagaagaaaaggatccacaaatcctcagaggcaccacagtgcctcttaatcaagaagcacttcatgcaaggtttctatgtgcagctactccacactaggaatagtttccgaggcaagcaaagctttttcacatgaagggctgtgattggcagagaggactggtgtggttccctgctgcctggaggcaggacctgcccgtgggccttatgtccctatagagacagtcacagatctctagaaaagacccatttaggactttttattctggagtaggccttaggaagcccacgtatgaagataatgaccacaggctaagactatgccacataccaatattacaatccacttgctatgggttaactagcttactgctcatcttgacccagtgaggacagtttatggactgtttcattatttccacctcgtagacggtaagacaaaggcagactctcttcaaatagcttgctagtggagagccaagagttgaatcaggagctctcactctgaccctaactcctcaagcgctatagtctgtttttctcagaacagttgcttttagtcggggttcctgaataggaaactccaggcctggcaattggaaatcaaacgatttgttgtgtcttcgttttagtgcatctctatctgttcaaagttagaactttcaatccatttatacctgtttatcagtaaattctggacaagaactaacacacctccttgtctcacccttcctccctcccttccatcttccccctctaactccttcccccgcttctgttaattcaagagcacagaatttggagctgaattctagacctccaaatgttgtaattcatgtcacaatgaggtcagcatgcattaggagaacctcacaagcttgctggaaacacattagagttctctgttaccaaccacccttttctcattcttttataaacaagtttttttttcctgtgtgtgtgtgtgtgtatgcatgtgtgtgtgcacacatatgaatgcaggtgtgcttggctatgctggtggatgcgctggagacacggaggagacaccaagtgtcctcttctattcttctctttcttcccttgagacacggtctttcactggacccgagcctgccgtcgttcagcgaggctgctggtgtgcacgtctcagtggtctgcagcattgggactacagggtacttggtccgacctggattcatggctgctagagatctgaactcaggtcctcatggttgcaatgccagaattcctaggcactgttcttagactcttgttttattttcaatcatttttttaattgaaaaatttgatcacaaaagccaagcaaaacaaaatgatataaccagtgcttagtgaatgatttttcaacatacccttgcttggtctgaaattttaaagtttgagttagtatgttatctgtaatcacaccccctttcacttatgacttcattgtgagctttgacccatgatacactagtttttagaattggtatgttgttctgagagtaaggataatgtgcatgacagccaagacgaagagctctgcagtctagaaagtcctgggagctcccaaagcgatgctcacaatcgccccacaaatgcatctttccctctgttatggctctggtatcccagcactcacacacctggatgttctgaacagcagcagacaaaacagacataccgagcaaagcatgtctgagaaacatttctgtttctcacagatgtcatcctagaacccaggggccaccacagcagagtactagtcttgatcagggcggtggcatttttctagtcccacaacttaatcctggagcattttcaaggatgatgccaacactctagtctcaggctcttcaagtgggttgttgacactcaccatgacctctgatggcctctgctggatataggggagtccctttcccttttccctcacagatttgcataggcaatgaattgattaagttatgagagtgttttttataagttcttaagaaatttcatggctgtggattgatactattcctcagtgttttcttttcttctttaacttaacgaacatttacacccaatgaaccctggagacaatgtatttggctctgaggcctcaaagatatccagtagattattctcaagtttcttcggatgggaatactgcctttaagcttccactgggtatctgctcgggtttttctcttgcccaggaaggctgggggaaaggtgtttgtgttggagcatgctgcatgctgcttcctatgtggagtcatagctgaatccttccaccaataactgataaaagaaaagactaggggataatggaaggtggcgttggcctggtccagctaggcatctggacaatcacactttctctccctgttgtatgtctctgctatggcctctcggtagtttgctcacactactagcccaccacctctgacaaaagcttgaccaaggactagcaaggctattgctataattctttgcccgttccctttcaggattattgcagagtgccttagaaagtctaactctaactgtgtgctagatgcctttcacaacttactctgctggatggacaccatcaatcttgttctcccacacacactctttaatgataactaaaaaaagcctccaaggaagatgttagcagtagggaagagaagagggtgtgagtgaggagaggaatggtcagcgatatcaaaggtgacatgagagggtttaggaagaggtaggagggtaggtttccagggagacagagtagggaaagttagacaggagggttaaggtactcccgtgttccagtctaagttgggtgagtgctggttaagagaccttagccactaggtggcagtggaaccttagtcgcttgtctgaggttgaggtggctctgcccctggtttactgcagaggaagcattaaacacagccagattcaatattgaacagtgacattgcattaccatctacacagagctctgaggaaaagctacaccagataccaacaggcatctttatccatgcaccataaagagttctaattatgcattattacaataaggaattttagcttgtgtttaaagttatctttctatccttaagatgatagccgtagctccaaagggcattcacctttaccgctagcatgccgtctgccaggacatggtgaaactggaacatatgaccggagatcaaggcgaatctaccccccagcacagattctttttttttttttgggtcaggattaggtgagcgttagtgtaagagtgggccccagatggacatattctctgagggggtttgcatggaacacaccgaggggctcacaaagcagtttctgccttgactggcttctgtggtgattccttcagagctgagagagtcaccaggatgcaggggcgtttgttcctctgggagctatcatggagccttcatttaaacaactctcattgtcccccccgccccccgtttttgataatttaaacaacccagacaattaactgagtgggttgattttgaacttaaaatctaagacttgaagataaagccattataatgtctttctaaataaaagattttagagacttggactgtcaacctttcagatacacgtagaggtttgttaggctaaagtttcataagttgctgaaacttaggtcagttctttttagatgaatcctccagaattacatttatttttaaataagaattttaatttgagaaaaaaacaaaaccagccagaattctaaaagtgaactgtgatgtattttcttcctcccccttttgacatctttagatgttttattcagtaaaatgtagcagaattttggatcttattttagtattttttggagtctaactgggacatattaccttcaaaacttggttttatagcactggtcaccactgctctttttttgttttgttttgttttcccaatataacatttctattgattccctggaaatttcacatcacgcacactgatcaaactcatttctcagtccttccacccttatgatctcccttcagggaggtaaaataaaaaaagtaaaaataaaaatgaatagaacccccttaagcccaatttgcgttatctgtgaactcactggagcatggtcaaactgtgacacctgcctctcaaataggactgagcccttcccggccgcactcacgccagccgtcagctgtggagagttatgcttcaatgtcaccatccacttgcaagagttcattttggtggcttcctgtctaggagatggctcagtcattaaagcctaggctcacaaccaaaactgggttgaagtcttttctaaagcgtcattttccagagcaccctctgcgctctttgagtgggccccactttctcttgtctctctcgtgttttactctttcccattgctgtgtgggccctgctttctctcgtgttttactcttccatcgcttcctcatctcttcgccttgcgtccatgttgctcttgtttactttcatttcttcttttctttggttttccttctgttttatccgcgcgttctcaccctcttgactcctttcctgctttaagcggctcagacaccagcacacaaggagggttaattcgctcatttattggaaaatgatctctgtttttcataagaaattattaaatccagaaaaatagaattcatatatgactttcgaaactggcaacccagatcactagtagtttgcacgttgccaggagacctgctcataccctgatggtcccaaagcatgggcacacagagtgggaggtggtgcctccctcctcagtgttgccagggctatgaaggaggggtgatgcatggaggagaggtttcaacaaccctgattcttacctgtccctctgtattggtttctcaaccaggctgacctgctgctcctgtcgagcagtgagccacacggtctctgttatgttgaaacagctgagcttgacgggtaagtactaaaccagagcggctgcttaggctgtttaacctaaacgtcctgagcgaccagaggtgcatcttctgcatttccttgtaaaacatagaagtctacgttgtaaagtcctttgttgtttacttggcagtaattctgaattttcctcctgaatttatttggaaaaccctgacttgtctcttcagcgtattttctttcagaaacgctcggctcagtatgtgaacatgaataattttacaccagtacactgcggtgatgttccttttggggattttgtttgtttaaatttaattttctaaggaaaatgagagagtgggagtaaaggctactgagaagaaagatggagactgtttcaaaaggcaacaaacacacacacacacacacacacacacacgcgcgcgcgcgcgcgcgcacacacccctcagagagatgactatgatgctgctttgacactggctttgagagtccagccaccaacctcttagctgttctgttttagaggatcccattatctggctgacaccattgactgctcacactgtataggcaccatctacctgtatgcacacagctcacactgtataggcacagtctatctgtatgtgcacagctcacgctgtatcggcacagtctatctgtatgtgcacagctcacactgtataggcaccttctatctgtatgtgcacagctcacattgtgtagataccatttatctgtttatgtgcaactcaggtgattcgttatgcagtcctgatgtaggtactgtgtgagacctacatacagaccatgaagccaaggctcagacagataggtaacttcctcaagttgataaagaataaaggcaggactcaactgggcaacatagagcacacagttttatcaagtgtttcccaagttgttgccatgtggagatactggagtagctcatcttgtaaaacccaggtttgggaaggacaggtttagacacagataaagcagtgttaagaggaaaagcagcagcactgaaaccattcatacacttgaaaagagagctagcctcaaatcaattgtccactctctcttgagaacctagaaaatagcaaaataaattaaatgcaagcaagagcaaaattctacaaacctgacacaaactcggccaagtaaaacagtagaacatggttgatcctttgaaaacatcaattaatctgcaaacctcaagcaaggcagacagagagaaggaagggaagagacagatgagcgatatcattaacaaatggggagtcaacaatataccccccaaaatgccagctggatcatgagaaattgctataatcagctgaacacacgtacatttgacaacatagatgaaatggaccattcctcaaaaaatacagaccatgcactcactatgaaacaaattactaaaatagctttatagctagtaaggaaattaaattcatatgtaagaagtgaaactaaacattttaggcaaaaaagggagaaagactttgaggtttgggctactcaaagaattgttagatctgacataagaagagttagtatagagagtggggacttagctcagtggtagagtgctcgcttaagcagcaagtacaaggttggtttctctagagataaggggcagggaggaaggagggggggggggacactggatatcatcaaattatctttttaattagtgaaaagccctaagaggaaatagtaatgagttactaacatgtagaaactatttgcaaggtatctacctgaatcaccatgactatatacagatgctttacaaagttaaaaaaaaaaaacaaaaaaccaatcctgttaggaaataggcattttgtaacacttcaataaacatttgaccaagaggacacacagtgggcaaacaagcacatgaaaagttacccaatatcattagtgacataaaaatgaataccacaatgctctgttaccacagatctgtcagatccatgagcaccagcaacagtgacatttcccaagctggcagagatttgtctgggaggagtcgctctcatgttaccggagggaacataaagtgcgatgctcattctggaaaaataatttgttggtttcttaaaaaaaaaaaaaaaaaaaaaacagacataaaagtaccacacaactcagcaatttcaaactagcaaaccggacttctttctattcagagaaatgaaaacttaacatttccataagctgtatagtgaatacttacggcacatgcttttcttacatcacaaaggaacaattcagaagtctttcaaatgaatggtcaagcaaattggcgcatagtgggatactgctcagtaacaaaaagaaacgacttattaatagacgcaatgactaggctggctgattcttcagaggattgtgccaagtaaaaccagctaatcctaaaggtcacgtggtttcatggaaaaaaattaacatttgttgaagaagggatgaggggagaattctgaggaagctggcatgatgctctctttaactcgacatagaagagacggccatatggtcaccgatggccaatggcatctgctatctaacggatgtgtggtcctgttcaaagaagagcagctctttgtgatctgcccagcttgttagttgtgccaacaacccacaagggctccttgaattgatactctaagaagaaagaaggctgcattcttttcttcattaaaatctcagttactgtaaaggtagccatggctgtcctttgcaaacaaaactccatagagagcagacgctggagtgatacagacctccatttggcaatggtgttcctagtaccagtgtgttttatagctcgtatggtatgtgtgagtaggttccaatgagactgtatttcttatgttctgtgttcgtttgaacataaactcgaagcagatccctgtgttgctacacagatgcaccatggatagaatgccagctccagatctggaggcgctgcccacttgctttgctgagatggtatcgggggtgtgagagacattcaaagccacgtgctgtgggtctcctcatttaggttttgtgtttattgcccctacatggttgctttagtaggtgattgttggattgtttcatagaagggttcatgtcatgtctctcatttcacagggaaacaaacctgaaggttcgtcaggcactacctgtcacctcagaacttggagcagacattagcagtcttgcagagtttgatggtaagtgctttgaatggacagaagaaaaatctgagatcctgtggtagtttgtgtggccttgttggaggaaatgtgcccctttggatgtgggcattgccacccttctcttcactccctggaagccagtcttctcctattagccttcttcttggctactgctgcactatgcctgctagtatactgccatgcttggatgataatggactgaatctctgaatctgtaagccagctacaattaaatgttcacctttataagagttgccttggccatggtatctgttcacgtaatgaaaccggttcaaactaagacagagaccatttatgcttccttcccttcccttcccttcccttcccttcccttcccttnnnnnnnnnnnnnnnnnnnnnnnnnnnnnnnnnnnnnnnnnnnnnnnnnnnnnnnnnnnnnnnnnnnnnnnnnnnnnnnnnnnnnnnnnnnnnnnnnnnnnnnnnnnnnnnnnnnnnnnnnnnnnnnnnnnnnnnnnnnnnnnnnnnnnnnnnnnnnnnnnnnnnnnnnnnnnnnnnnnnnnnnnnnnnnnnnnnnnnnnnnnnnnnnnnnnnnnnnnnnnnnnnnnnnnnnnnnnnnnnnnnnnnnnnnnnnnnnnnnnnnnnnnnnnnnnnnnnnnnnnnnnnnnnnnnnnnnnntttgcatagtgacataatgtcttgaaacattatcaccaagttatagtcagccattagttgccatatattttagacaatggttttatcgtcattaccaccagcaccagcaccaccagcaccagcaccacctccatcatcactgcattgaacccaggcccacctcttcagcaggttattgtgtctacatgcttctggctgtatcttgtgctaacattattttaaggttcactgtaggtctctaggtcctacctcctctagatagctgcatttctttgtggtcatgatacctttaaaagtaaaaaaaaagaggcaccagttgtagagttttgcacatcatgcaaaactgagggagactgaggcttttctgccatccctcaaaagtcttttgcattaccaagttgcaagtttggttttggatatcattattttcccatataggttggcttgactttctggagtcttatatgaacttaagactaccctgctgaggtgatttctttggagtttactgagaaataataaagagaaatggtcttggaaatgcaccttgagttaaaggtcaggaagttcatatgcatcttctccaatacacatttcagaatgtatacacatttcagaatgtatacacatttcagaatgtatagggtctgtgcttggcatttgcttgtaaattctgcctggattatgttaacgttttaatctctcttaatgactgttactgtaataaatgtttataggaaaatactcttccaaattaagatttaatctagaggagtagccaggaaactttgaatagcccaagaaatattttgattataattaaacaaattacaaattttctaatgatgtaatttttttcaatgagatgttactgttatgtaaatccaaggaaagtaaattgtattcacaaatcaaaattcttcttaaaatactgtgttgactctttatggagccctaaagaggcaatataaatataacttgccattactcaattcttccgtggcagaactgtacctttatatcttcaccagcctataatgaggcacaaatctgcctcttcaggttggaggccacatctcctctttccactgacttcctaactctgcttctcaggatctgtgtattgtacctgacaactactcaggccagagaccatgcttctcttgcctcctgcactttaagcctactatctttagacccatgcctgtcacccaggcacatcctctctgcaaactcaaataagtacctgcaatgatgaagtcagaagtcacagcatgacttcacctagctaggatcacctcagctgcctcacaagcaaatcaggcctgagtaacccccactaaacttcaaacctcacccagctgctccagaaccagccaagcttcagtcccagcaagcagagtcttagatacccactcaatacagcgccatcagagacccacacccaaggctgcagctgatgaaagatgtgcaaaccaacgtaaaaaccaagattaggctgagaagtgactcaacgggtaaagtgcttgctgcatgaacttgactgagtgttagatccccagaacccacataaaattcagatggcagtggtggcccacctcaagcccagcatataggaagcagagacaagggattctgtgagcaagctggccagctagacaagcaaagatggtgagcttaaggttcagcgagggactttgcccacaaacatatacctgcacagatgcgagcacacatacattcacacacagtacacatacatggtcccaaatgaaagctatctggacaaaactcgagaaaaataattgaaaaaaatatattccaagaatgtcatagagggcatgaacaaattcctgtagggatttaaagaaagacagtgataaggaggtgaatggattccagaagtatacacacagacagatgctaaaatcaggaagtcaatacagtatatgaggataaaattcagcgaagagatagaattgctggagaaagctcaaaatgaaattaagctgggaatgaattccacagagagtgcagtgggaggttcatgaaggcatggtaaggaggagggacatcaggccccagcctatcactggagttggagtattcaaacagcgaaagtgaatgcttagcacctggaagtcggcagaacaacacagcctatcaccatcactcttggcagactattgccatcactgttggctgactattccatcactgttggctgactatccccatcactgttggttgactatcccatcactgttggctgactatccctatcactgttggctgactatccccatcactgttggctgattatccccatcactgttggctgactatccccatcactgttggctgattatccccatcactgttggttgactatcccatcactattggttgactatcccatcactgttggttgattgtcaccattgctcttggtttcttaccagaaccagacagtaaaactctagagctgaagacaccatgtatctgtttataaaacacagaacaataaagctggaattgagcaggaagtttcctctctttggctcatgttcaaagcactagaaggtaccagaaggtgttggaaggtgctatgaagcattttggggaagacaaatcgccaatgatcttacccagctgtagattatgtatacagcaatacttacctgtgcataaacacatgcccactggtatgagagtattctgagggttatcaaccacttttggatgaatatgagatctgcttcattggaaggaattcatgcttggtagtataaacttggctaaaagctagggaggtcattggctgtacagtgactcagccactgaagctttggtaaattggacatgtagttaaaccaccttctgcagtgggcgactgtcaaaattgagatttggaacagatatttaccagtttatgtccattcattcttttgttcatttatttgtttggcaaatgtatatttcatacaatgctaaagagtctgtgggctcgtcccaaagaggcctttaattaggtgattgctaatgtactcaggcccggaacatgatgttgatataggaacaagcactcactgtatattataagttatcttttcaaatacatgcagcctttgatgcatttgtgagactggcatatgtgtatgtaggcagatatgtgtgtgtgtgtgtgtgtgtgtgtgtgtgtgtgtgtgcgcgcgtgtgtacatatgtaggtatgtgagcagatgagtgtgcttttgtgtttgtgtgtgcgttgggtgtctttctctattgctcttgtttgtttgaggagagtctcttactgagcctacccaatgaatcacatgagctggtctctgcttcccaatagtgggattacatggtcacatgcttccatgcctgttttttttttttaaacttgggtgtcagacatcctaactcagatctacattcttgtgcagcgagtgctttaacctttgaaccatctccccaacttcatcttgctagcccctgaaggaaaaattatcactaactttaatttgtacatagggaacctgagactcaggtagatagaatattgcctatgtcatgtgactattaagtagaggagtcagaatgcaaaccaaaagctgatggaaaatcctgttctaagaaagaacacaaaaccatgggctctaaactacaacctggaacagcattagacacagagggcagtgtatcacagcttagcttatgaggggacagaaatgtttaaaagtaaggtaagctgattatgagaaatcaaactatctctatgtttatttcaaaattatcaaagttctcagtgccttagaatttcgtcaggataaagaatttagaggtactgtccaaacacagagtaggagcaggttttggtagattttctgtttatttgaaaagttcccatgcaaataaatattttatccattttaaatatctgaaaaaataatatgtagtctgttgaactttataagaaaatatgtaatttgatctaataatactatagtaataaagcattttagtttgactcggcttttcatggtgtcttatgggaaccaaacaacatttataaacaaatacatggaaatatttgttaattgcatatttgtaaaccagatgtttttacaccttgggggaaatcccctaatatacatgtgcttgaatgtgttcaagaatcttttgtatattgttactgactgaactgtggtctgtgtttcgcaactagtgactgttaataccatttctaaaccagagaagggttgactctttcgttaggaatctttgtgtattttgtggtcttttctgtaaagaacagcatgtgtgtaattcaaacaaagaaaaatgacatctcttgttggttaaaatacacaaataagtaaataactgagttaataaatacatgggcttggttaacactttgtgactttacaaaacttacctgaaaactcttccagtcaagtggacagaagtccagtcctacacaacatagcttatacatgggcccatggatctcattaacagacatgaaggacaatttccttttgactggtggtactaatatggccgttgtggtgttaatgttggatggcttctcagtgttgagaaggttgtacaggggcttggcgtccaagaactcaaatagaatcatttggctttagagactgtctttttaagggaaaaggttatgactgtctttttaagggaaaaggttatttcattcatcagcctaacagtagtgggtaatcgcctaaatattgagaatttcttggctagggaaactcttgaccagcaataatggcaccctatccagtgtgcagcctgacctgtggaagagttgcagtggacaatcaagagacatcactaataatatgcagaaaaagtaaagctaattagttttggaaaatcttgggatattttgtactaaaaatttttattggtaaactccatatttcctctttgagtaaatagtttgagagacttaacaaattggtagttaagcagtaatccagcaggctgaatttggaatttaaaaatgccaaggaaagttcaaaataagaacttgtagattttgctcagtataggtttccctgtgccgttatagtggatgaactataatcgatgtcttttctttagaggggcaaatgagattaactattttgattatgattacactttatgattgaggctgcccccaacaacgttttatcatttccagctaagatgactatgtgagaaatgatcctgtttcccccgaatggctttctcatactttgcagccatttcccatatcttcctcggatggaactaaaaagaagaaagcaggaccccagggcagcctctcttgggtcttaggctttgttggtggaaaatatttttgctggtttctgataaggtcactgcctgttttcatcattctacctggcttatgttacagttgggtaatactatttggtattcaaatcccaatttcatgattcctgtcaaaatatacctaccttttaatttatcatagatttactgtcctctctcagcctctttccttttgaaagaaaattatgcatctgagtattttatttgcatgtatataatgtatataccatgcacgtatctggtgctcttatatgtagaagaaggaatcagatcccctgacactggagttaaagctgccatgaggggcaggaaaccgatatgtgttctctgtaagagcagcaaatgctcttagctactgattatctgcccagcccctacaactccttccttgaaaccgtttttgcttgtatgtttgttttttttccgagacggggtttctctttgtagtcctggctgtcctggaaccaaaccattttttttaaaaaaaactatgtctccaataatgtttccaataaatatttttagattttattacatagacagtgcggtaagttgtgggaatgtgtggagatgagtatagtgtttcccacaaaggaaactggtcaaccctttggaaagagaggaagagaaatgggaactttcatattttatgccaatagaactaagaaatggggagcagcatttccttttttcgtcgggtaaaaaaaaatagtttggctttgttcccaatgtttcattgtgatgggcccctgtgtttagaacttggagagtggggccatactcttagaaagctgtgctgggatttggcctccagaggctcgtgttaaacttggccctatagtccctgtacagaaaggcaccctcagcctaaaaccagatgagagcaagtcttcttgctggatgtagtgagccaaaatgttcaaggttgaatttacctccttgtcagcctttgctcatgaccatgaaaatgatcaaacagacctggctctttatattgttattggcaaggacatgtatcatgttgttttttttgttcaaagtacattttttttttgaacagtggccaaatttaaagtttgggaaattgagtcttgggtgaagaaactggaatagacttcaagggcttctgtcagcctgttatttgtgcaggttttgttggtgagacctcctcaattcaaggctacgtgaaactcggaaataaaagttattggtcaaggaaaagatgatcacaaaatctgagaatttagaaaaagcctctggggccacagcagagttttccaaatgactcgaatcagttcacatcagttttaatttacttttaaatgaacaaataagctataacgagagctaaccacaatttagctacttggtcataaagaaaccttgtgcaggttgtttgtctctttgaaatccaggctaacaggctttcatttagtattggaaatctgggagggcccagagaatgaccaaatagaggcactttaggccaactctttgctaattgggaaatggtagggggggggcgtagagagggtttccctttggtgtctttgaaataggaacagcctggctggtcgggagtggtcaggccacttgaattatagctgcatctccgtctatgaactccaaaaggagagcagtattctaggaaggacagacattacaggaagtctcttcagtatcagaaggtggcttggggagagggtggggccctgtctgctatgtttcagctcttaagtctcagtgcccagaaggcacagtgcccagatcagtgttactgtgtggggtgggactttaggatgtgtggcctagtgggaggtcattcgccacgtgtgtccttgaagggcacttactgtaggagaaactgctttccacacactccttccataatgtgccaccacagacttcaagtatctggatcaattgattctaaacagaagtctccagagctgtgagcccaaaccacttttgacttatttctttatttgagattgtcaggttcttagtacagcaaaaaagaaaaaaaaaaaaaaaaaaaaaaaaaaaagctgacctagattccattttggcttccctggtctcctcgaccaatgctgaaggttgactcccacccccacaccccctttcttattttccaaactaccattttggcttctggttttaaaatgcactttgtgacttgtgagacagtaaactcgcaagatgctcggtgatcttacctctgattctgacctgagctgggtgtttccaccctctctcctctttcctctttccctgtctcttttcctttttccctctgtcctttcccagcatcccattgttctgtagctttgcagtcatcacttctaaaaaagtagcccatttgtttgcaaatgtatttaatctaatacatctttaagttacatcttgtgaagggtccatgaaaatcatttgtttcccctttctgtccagacaacccaaccctgaatgtgcctgctctgcttgaaataattaatagagtgaaccagttcattgatttggaatgagcattccctttcttggggttataaaaacaagcaaacacaacaacaacaacaaacgccccaacgctatccaaaagtcccccatatcctccctcccactcccctacccacccattcccactttttggccctggcattcccctgtactggggcatataaagtttgcaagaccaatgggcctctctttccactgatggccgactaggccatcttttgatacatatgcagctagagtcaagagctccggggtactggttagttcataatgttgttccacctatagggttgcagatctctttagctccttgggtactttctctagctcctccattgggggccctgtgatccattcaatagctgactgtgagcattcaaaggaacatattttggctaggttgagcaagctatgtggtgtctttgagagtccacagaactctgaatcaagtcaacccaagaggcctagggcccttggaaggagtctccacttcgggaataaatgagtctgtttccttagcgtgtggttgctaggatcccaagtccttactgtgaacatagaaaagtgtttaacttttgtcatgaagctgaaactgtggcatcgcaaccctttcggcagttcacagaacagcgagaaaaaaagtggacatcgaccattttatacttgtgaaaggtcattttggtatatcctaagagtaaagatgagtacttttaaagatttttaagggaaaaaggtctcacacacattgtaggctctgttcttatctggtcagtatagagaatcttgcttcaaaatatttgatgtattttatgattttttttttttgcatgttgtagcttattttcctccaccacagtcttgcatgtgtaacagcatgttttctgaaagagaaggacaatcaatgccttgcatatcaacagcagggtagtaaatagcatggtgggcttctgaagtgagctcacagtgggtctgacggggctgcttattttccagggatcgtcaggtgtgaggcgcctaacaacaagttagacagattctcgggggtcctctcttggaaggacagcaagcatgccctcagcaaccagaagataatcctgagaggctgcgtcctgaggaacaccagctggtgctttggaatggttctttttgcaggtacagtgtatagactcgggctatctctgtgccatcccttcccaccaagtccctggttctctatggatgtgaatgtgcactgagtttttaatgagtgctgagccttggctcctgaggtgatgccagcgtgtggtactcccagaggagacagcagtactctgagtgtaatccatgtggtcccagtgtgtgggaaccagtgacatgtggaattcattcgtaaggaggctgaagccttcagtctctgatggtatctgcacacccactcttctgtttctttttctttcaccccatcatagaagccttgtctgccagtctatataatcaatgtgcccttaaaagtgaagatcaatatgaaagaaagcccctctttctgttgcaggccatattgcttgtcatttgagaaggtcaagtggctcatttgagaaagttttcttggaaagcaatcatttctgtttgtcaccagaacagatgagtctgaaggctgcacttaatggggctaggagggatggagggagggagaaagggagagagggaggaaggaaggtgggagggaggcaggtaggaagagaaattctcccactctttcttcccctctattttttctttttgtttattcttttctcatacaatacatctggaccacagccttccctctgtccactcctcccagttcctcccgaacctcccttcctcccaggtccattattctcagtttcccttcagaaaggagcaggcttcccagggataccaactgaacacagcataacaagatacaataagactagacacaaatcctcacatcaaggctggacagggcaacttggtaggaggaaaagggtcccagaacagacaaaagagtcagaaatatccctgctcccaccactagcagtcccacaaaacgtcaagctaagcaaccataacatatatcagaggacctagtgctggcccatggaggctctgtgattactagtccagtctctatgagccctgcttagttgattctgtaggctgtgttctcctggtgtccttggcccctctggctccaacaatccttcctccccctcttttgtgggggtttcccaagctctactaatgtttggctgtgggtctctgcatcttctttgatcagctgccagaggaagtccccatgtttattgggttaggcactgatctataagtatagggaatattactaggaatcatttcatttttttaaaattttgccagttgtgtttggttctatctagcttcctggccatccaggaagtgtctgggatagtctctctctcatggcatgggcctcaagtcagactagtcattgtctggccactcccacaagctctgaaccaccattgccccatcacatcttgccagcaggacaggttgtaaatcaaaagttttgtggctgggttggtgtcccaattctaccactggaagtcttgcctggttacagaaatgatgggttcaggctcctatcttccattactaagagtccttgctagggtcatcctgttaggtttctggaaatttccactgtactaggcttccacattatacccctaatgtccccctccccaatttcagtcatctttccccatctgatccctcctgctcccagtccatctattctatttccttgtcccaggaagagccactcatctcccttagagccctccttggtatttagcctccctggggtctgtgtagtgtagtgtagtgtagtgtagtgtagtgtagtgtagtgtagtgtagtatgattttcctttatttaacagctaatatccacttataacagagtatgtatctgttttgctgggtctgggttacctcactcaggatgagttctagttccatccacgtgtctgcaaatatcatgatgactttttttttttaacatctgaatagtactccattgtataaacgaaccatattttctattctttggttgagggatgccactgttgtttccaggttttggctattatgaataaagccactatgaacatagttgagtagtgtccttgtgttctactcacaggttcattttctagcctttgattagaaaacaaattctgcttattgtgataaaatgtgctttatgtctgctgattatatgtgtaactgaaactaaattgtttttcttaactgactttctttaacaacaacaacaataacaacatcaatagcaaaaatgctcattaaaggctaaatgtattctgaaactagaacacgtcttcctagttgctgctaaataccgtcagctgtgggtctgagcattgcttttgctctcaggcattgttgtgtgtaaagacccagcaaatctctagaaatgaagcagaatcaggctttttgtctgaggttgaacctcgtaaaccatgattcttttatcagatgctttttttctttttataatatttatttacttttacttagttcactttacatcctgcttgcttcccccctcccggtcactccttcccacaatccttcccctatcccttctttccttctcctctgagcaggtggggccctcctgggtatcgccccaccgtggcacatcaagtctctgtgagaacgggcacatcctctctcactgaggtcagacaaggcagcccatctagaagagcatatcccacttacaggcagcagcttttgggacaaccactgctccagttgtttaggaaccacatgaaaactaagctgcacatctgctacatatgtgcagggaggcctggcaaaggacactgtgtcaataggacaaaatgacagcctatgggttgggaaaaaaactttaccaactctacatctgatagaggtttaatacccaaaatttacaaagttctcaagaagctagacaccaacaacccatacaacccaattaaaaaataggacacagaactaaacagaatactcaacagggaatcttgaatggctgagaagcacttaaagaaatgtttaaagtccttagtcatcagggaaatgcaaatcaaaataactctgagattccatcttttatccataagaatgactaagatcaaaacctcaagagacagcacacgctgtcgaggatgtgaagcaaagggaacattcctcctccattgctggtgggagtgcaaacttgtacaatcactttggaaatcaatttggccatttctcagaaacagggaatagttctgctttaagacccagctatactcttgggtatatatccaaaagatgctctaccatcccacaaggactcttgctccactatgttcatagcagctttatttgtaatagccaggtgctttttgcattggtgaggtagataagtctatggttatttatgtcatagtttcttctgtcttgcagagaagtaaaaaggcgagcttactcatacatttcctctactttctgttaaagagcatggagatctcaaaatggtctccccatctgaaaggtcttttgggaaacattctcttgttcaatccctgttatcactgacgtggggacacctcatcccagggatgggctgtcattcaaaagctcattgcatttgtataatgttgatctgagtgactagcacaagactttgaatcatatatgctaggacagctgtggagagccacctctgaaggttaagatctccttcataagatcgtctctggagaaatcctcttctattaatggaaggaggtgtgttgagtagaagtttctagagtaggggtcaggcagatgtgggttcaggttgtttagatgccccaggttctaatcctaggtataagactttctatgctcttccctctgtggtagcataggataatcatgagcacactagaatatattgctcaggtacaatgatgatgggtgtggaagaggatgcttgacggtatttttcccatgcccacttctcgattcttttatccacagttcagagaacactgaccactctataggctgagctaggaaaactcgactattctctgtatttggggaggagagagtgagctctctattcttttatgatatgtcctgggtgttcacttttaggggaccttggtcaggtggacatttgtaaagcctgcattggctttagttaatagagagcttaactagaatactggcaagcagaggaattcagagttgtttttgtccatgtcaatgctgaatagatgggtttcatgagtacccaagtcttaagacattgggacaagaaacaagttctagttggttcttagatcttgtgaaaactgaatcaaaaattaattattaatccttcttattttttcttgtttttttttttttttgagacagggtctctctgtgtagccctgactgtcctggaactcactctgtagatcaggctggcctcgaactcagaaatccacctgcctttgcctcccaagagctgggattaaaggcgtgtgccaccactgcctggtccttctcttatttttaaatgctacttgtctacattgataggaggcatggagatagagttcagaggcatggttccctttacaaacctctcattcctaagttgaacccatatggacacctggccatgcttctctggtgggtctcttttgtgctcaagatgaggtcaaagcttgtttctgaggtaaggggccatactcactcaaggagtctgtagggtccgaagccatcttggtgcagataaagtctctgtgctcactgtcattcatttgccccataggtcttatctcctcactttccagccttctctttgctttgccggctggtacctgtggttgaatataaagccatgatattatggcttcccttaattttttttgtcttgatgagtcatgaaagaaattaaaaggagacaaattattaaatcctaagtatttattcaccaaatatacatctctatgtagttgtttcagattggttgggcccttccacataagatcactcttgctgtaaaggctgtaaacctattgttcctacctttaggatccaataataactctcctttccctgtatcattgctggcttaggtggagaaacagtttgatagctattgaacctgccttgctgtattagtcttctgcttccaatgtgcccctcctcatatgttgtagaatttctacataaattcttctataattgtttttgttcggtgatttctgttaggatcctgaatgaggtacagtattgaatatgcattggtttattgtctcatatagtttataagtaataattcagagtgagagctttagagttagatatattgagattaagttctatctctgggcttagagaatgtatagaatgtatagaatgagaatttgcaggaaagttaaattccttaggcctgtttcattattggtgagctgaagattattgtatctaatttattgcccaataagcactagctgactctgccttctccagggatgagccccctgcatgcatatatatataatgtttgtgtgtgtgtgtatagatgaagacacaatgaatttgagagggagtggcagaggacacacgaggagttgggaaggaggagaggtagaaatgatgtaaatacaatatacttctaagacatccttaaaataaaataaaagtacatttgcacaatgcccaaaatataacaaatgctaaatttactagatatttaattatttactgaatgccaagcacttgctaggtactcttcatttcctagtgcaatgttcattgattagggattaactgtaggaaaaagccaaatacattctctttactcatgtagctttcggtcttgtataatagacattatttgatattattgatatgttgatcccaaataatcatggtggtggttctataatctgaaacacaggcgagtgctgatcaaatgaatgtgtactcactacagagttaaaatggaggaatgtgattaaacactgactttagggaaggcgttctgagctgagatataaagaccaatataaataaagtgaggagctagaaaagtagaagaaagtagagcatacaaggaaaacagagagctagtaccccaaaggcaaaccgtgggccaatgtgtggtgtaagtgaggtcagaaaacctccagagctctgatggcgagcagaaagcacaggagatgctcccgggagtgtgatgggaggttcaggagcagccgggcagtgtagaccttgaagtttatgtgtaaaagtttagtctttatcccaagccctttagggaacccagcaagaatgtttaagaggaagaataaataattaatatttaaaatacatatatggggagcatagagtattgcctatggtatttgtaatgcttgtaaatggacagtaggtccttaaatgagtgcaccattggggtgggaggtgcagaggaatgctgactagtattcaggacagagcagatgcagggaggcgagggtaccaggcatttttgtcatttatttatttatctatttatttattaattttatactccagatttcattacttaccccgtctccacaagaatgtctctacccccccagcccccaccctaccagacctctaaactccctgtctcttgagggttaggtgcatcttctctgaacccagacctggcagtcctctactgtatgtgtgttgggggactcatatcagctggtgtatcctgcttggttggtggtcctgtgtctgagggatctctggggtccaggataattgagactgctggtcctcctacaggattgtcctcctcctcagcttcttccagcttttccctaattcaaccacagggatcagcagcttctgtccattggttgggtgcaaatatctgcctctgactctttcagctgcttattgggtcttctggagtatggtcatgataggtccctttttgtgagcactccatatcctcagtaatagtgtcaggccttggggactcctcttgagctggatcccactttgggcctgtcactagaccttgttttcctcaggttcctctccatttccatccctgcagttctttcaaacagggacaattatgggtcaaagttttgactatgggatggcaaccccctctctcacttgatgctctgtcttcctgctggaggtgggctctataaattccctctccctactgtctggcatttcatctaaggtccctccctttgagtcctgagagtctctcacctcccaggtctctgttgcattctagagggtcccccccaaccttctatctcctgaggttgcatatttccattctttctgctgtccctcagggccttcagtccttttccctcacccaataannnnnnnnnnnnnnnnnnnnnnnnnnnnnnnnnnnnnnnnnnnnntgcatgtccttttgggtatgagttacctcactcaggatgatattttcctggtccatccatttgcctgcaaagctaaagatgtcctcattcttaatagcgagtagtattccattatgaaaatgaaccacattttctgtatccattcttctggtgtgggacatctggttgtttcctgcttctggctatcacaaataaggctgctatgaacatagtggaacatgtgcccttatggcatgatggggcatcttttgggtatattcccgagagtggtattgctgggtcttcaggtagatctattttcaattatctgaggaacctccagattgatttccagagtggttgtgccactttgctatcctaccagcaaaggaagagtgttcctctttctccacatcctggccaacatgtgctgtcaccactgagtttatgatcttagctattctaattggtgtaaggtggaatctcagggttgttttgatttgcatttctctgatcactaaggattctaaacatttctttaggtggttctcagtctagattcctcttcttgtgaattctcggtttagttctatatcccattttttgattgggttgtttgatttttttttttttttggtggttagcttcttgaattctttatatatcttgaatattagccctctatcagatgtggagttagtgaagtttttttttttttttccccaatctgtaggttgccaatttgtcttattgactgtgtcctgtgccttatagaagctttccagtttcatgaggtcccatttatcaattgttgatcttagagcatgaaccactggagttctgcttaggaaatttcccgtgatcccaatgagatcaaggctctttcctgctttctcttctattagattcagtgtatccggttttatgttgaggtccttcattcaatttgacttgagcttttgaaaggtgacaaatatgggtctattttcatttttctccatacagacagccagttagaccagcaccattgactgaagatgctttattttccactgtatatattttggcatctttgtcaaagatcaagtgtccataactgtgtggtttcaatatgaagtgactttctttatgtctgctctctagtttgggtttaaattatattttgtcagacattagagcagtaacaactggttgttttttataggttcctttcgactggaaaacactttccattctttaaccctaatgtagtttctgccctttgtgatcaggtgtgtttctggaaggtagcaaatagatctttccttctttttgagtaagtatactagcctgtgccttttgattgggggaatttataactttaatagttattattgggagatacgtattgattcctgccattagattgattttgtttcagaaatgttactcttttacaggtccagacactaaactaatgcagaacagtggtaagacaaagtttaaaaggacaagcattgacagactgatgaataccctagtcctctgggtaagtttctgtcaggataatgagtactcttgtgctgtggacgaatcattaagaggttgacaagtactctatgactatgggtgagtccatgacaggttgatgcatagtctagtgctacggctaaatcattgataggttgatgagtacgttaaagatatgagtggatcactgacaggttgactagtactctagttctcttggtgagaatagtatatttgtctatctgcctgtcttatctgtctgtctgtctgtctgtatttatgtatgtattttatctgtctgtctgcctgtcacttatcatctatcatctgtcaatcacagcataaagtcactggtggtacccttggttttttgtggtagtaaataagatgatcccctaaggacttttaagtagggtatttaatgccaaacatcattaattttagtggtttaaagtaattccattcaattaatttgtagcactaactattaaaagaagaagacactatgatatagatacaaattgatagtgtatgggggacacatggttcaagttttctcttatacctagtttttctaataaaccttcagtaagtttttttcaacttcctcttcatattctcctactccgtttatgatagtgaagaagcaaatagttgtagatatcaggaagtcttgcttggagaaaaaaatgtacacattcctactctgtagagccttttctgcctctagagtggctcctgtgagctcctgatacagaagcagaacaagtcaccacaaattcgttcccaagacactgcctttaggtccctcatctgtgacgctgtgggtttggactcggtactgatgacttcattgtctctctgatgtacttccaaaatgtttgcttttctaattctggtagagatggtgctgttaaaatctggtatacattttcaccttgcctcccacttatttcaagtatttcaaaaaaacaaagtatctacatcatgagatgttttggctcctccccactcccctttcttttctctctttctgtccgtatgtaaggatttgcagacatatctatagctaagaattctgacaggcatgagatggtgaagggaagcatcagtcagtgtattagtggcttatcttgttgctgttgtcaaatgcccaacaaaaacaatttaaaggaagaaaaatttggtttgtcatacagttctggggatgtagtcagtcctggcagtgactgcgtggctgcaggagcaggaggcagctgatcacattgcacccacagtaagaaccctgagagagatggatgctgctcaggtggctttctcctttaaatactctgggaacacctgctggggtgttgctgccccctgtaggtgggtcttcccacttcagttaatccagtctagacaatcccttacagacttgcctgtaagcttgtttccatggtgattctaaagtccatcaaactgtcaactatggtgaaccattacagtacattgtagctggaccacagatgtaaactgggctttccagggcactgaggtctcacagtcttctgacttcaagcattgaaatatgtgatttgtcacagagtaagggtatgacgataactgggagacagggtcagcctaaacatggtcttttctgtgcttacccttttattttgtttttaatctgtggataatggctgcatctgcctcagagagagttagtgagagaattaagtgagaagtggatgtcagatatctagccataccttggccataaaatgctaacttttattcatatgcctggttgtaagtaagaaagggtttgtataacttgattttcaaacgacaatttcttatgggaaatggacttgtagttagtcacttgtattgacgtgactaatttgggattcatattaaccttaaccaaatttctatacttctattgttatttcagatttttgggtttctggtatgcttgggaattattcttgcagtaggaagttcaatcttggagagtgaagttggggaccagttcagaactccccccttctggagagaaggcgagaagagcttcttgttctctggattcttaacattctggtcatatgtcatcattctcaacacgcttgtgcccatttcattatatgtgaggtgagctgcggtttacactgggatgacgtcatttagttgctcaccctgtgtgtgatctgctaaatctgttagcaataaggcaacttggctcttcaatgctgtttaacgtgtacattttcatatcacaacaaatgcattttattttcttcttgattagtatggtttcttagagatgtgtttctttggaacatataaactgagctataaactcatggaatatgatcagtaaaattgagttggtttaaggtaagaaaaagaaaaacccaggatgtcttgagatgtggccttccagccattggtctgcctcagatacttggatgcaggtgctgtcctaccactcactactcctgtaacattgggaaaatcacctcaccattaacttcttaagcttcttcactttaaaaaagtgggcaaaatataagtcctatctcataggattatctgaggactcaatgaatgtctggcatactctaaagcttaatgagtagcagtctcccttatttttggcagcatcataaataaatacagaaaggacccaaagtaaggtaggtgatagtacctggctattgtaggtaactatggttcttaattcccactattctggtgtacagtttctagatctagtttcacagagtgatattaaaatggtctgtcattgtctgtatcaaccttcaactttgtgtgtgtgtgtatgtgtgtgtgttctcttttcctctctgtgagtgaatatttgttcttttgttctttctgtgtgttctctttctccaaacataagtatgttttcttctctctgtacccatttctcttttttcatacatgtatgtgtgtgacagagtgtgctccacaaggtttaggtaagtctacctgagacattctctatcccaatcctaccaagactgagtcagtccccaagatcctggagcgaggacaggcttggctgtgtgtgttttttttttttttaatgcttgccatcaatactaacaatatacaaagccaccagccctgactctcctctaattatgactaacttctcttttctctttccaaaaactaagccacagtgaaacaaagaaagttaatgaacaaaattcactcttgttttggatagtggtaaggaaactgaaatgtcaagttgtgggaaattgacttgaagtagggacatgtggccacaacaccacaaattgctccgggcagtctggagctgtgggcagcctggactctgtgtaatctgtattctactggctcatcttcagtactgagagtctcttatgcttgaatcccattataaagcctgcaataaatgccattctttgccagaaaagccatgatcaactttgttgatttctggattcctttctattaaaaaaatagcacccacctttgatccatgtgtacattaatcatttatatctgatctcagtacagtgcttcattgcttaaaactagtcttttatgcattgctttttattatttcaaaatcgctctctgccattctataatctgacatgaatatgaggacttgccacattccatagatggctatgtttcctttctttttttaatgtcttgcatgagccactaaacacactttatcttacttatgtatcccccaaatcttctgaagtagctcttgctgaaatggggagttgattcgttcatggattacatagctcattagatcagaatgaagatctaaatctgcactgcctgacatttgcaccttgtttctcccctggctctaaactgtgtgatttgggaccggtgaggataaaaaactggggttttcctctctctgaataactgatcttgatctcaacttgaggggaaagcatttcaagaaatttcaggctgtttggtcctaagtgctcaaacactctgatacaggaacacgtgtgtctatgatgaagactgaagcccccgacccaagcccccattaggcttttggataaggtacaatacataaactaatgccatatggtgaaagtcatgatttgctttgaacagttaaaagttccaggtgagcagagacatttattcttatattttcatgctgtcagtgtgtttatgcacttagaaagatccagccacaggttatgtgtgtatgtgtacttgtgtgcgtgcatgtgtgtgtatgtctgtctatgtgtgtgtgtgcatgtgtgtgtgtgtgcctgtgtatgtctctttgtgtgtgtgtgtgtgtgtgtgtgtgtgtgtgtgtgtgtgtgaaagaaagggctgcatgtagtacggccactcccctaaaccctctctttctaagcaaaaaggagatctatcttctttataggctatttttaggctcaggaacataaatgcattttgcagattcccattggcttgtagtgcatcatgggagaataaaaaagactgctacaaacctgctttgaatttacaaggagctaccaggtttgcagacaattcaaagctttgagtgatttttgcagagtggccctcctttcagggccaatatgtcttccaggatcctcaggagatgctcaggactgctggtcatactgaacattacatgtccatttctcctgttttatgcataaatatttataatgaagtttaacttacaaatcaggcacagtaatagattaacaataaagtgaacaaatgtaaaaattataatcgcatagtacagtaaaagttatataacatggctttcttgtttcaaggtattacattgttctgtgtgtacccttgtgtcttagtcagggtttctattcctgcacaaacatcatgaccaagaagcaagctggggaggaaagggtttatttagcttacacttccatactgctattcatcaccaaaggaagtcaggactggaactcaaacaggtcaggaagcaggagctgatgcagaggctatggagggatgttatttactggcttgcttcccctggcttgctcagcttgctttcttatagaacccaagactacctaccagctcatggatggcactacccacaatgggccttccccacttgatcactaattgagaaagtgccttacagctgtatctcatggaggcattttctcaactgaagctcctttctctgtgataactccagcttgtgtcaagttgacacaaaaccaaccagtataccctgctttgatatatgatgatataatgtcagaaggataggatgaagtgtggttgatgacttaagcattgtgataacattacctggacacagacacttcagtgccctactaatagatctggtagctaagatggctgctatgtggatagtgtatgctgagggatgtatcagctaagggtctatcacatctcaggtgtggtagatccaggcagagcaggataggatggggtaacagttcaccctttgggagcattacacaacttaaagcaaaaattgtttaattttggaattttccatcaaatatgttttggatacagttaattgtgggtaactgaaactataggaagtgaaccttcagtaaggggagattattgcgtaataccatagtgaaggccaggtttgcattgcctgtaacagatgctgggattctggttattgtgtgtgtgtgtgtgtgtgtgtgtgtgtgtgtgtgtgtgtgtgtgtgtgagttgnnnnnnnnnnnnnnnnnnnnagttgggttagtcacttaatcttgcaagccataatttcctaattggtgaagttagagactagagggctagaacctactcacttgacacggtctgcctgtttaggacaggttggatgatgggtctgaactgttattagtcctaacacctccccatgtaaaggaataaggaaacagtaagctactctgcaaaaacccgagccagagtggctagttagggatgcagggagaggggcagaaaagtaaaacacacattaaaatatataaacacatgcagaattaagatctgttcatctttctctcatagggttttatgttagtcattgtgtggttttagtttaggggaaactcagagatgacctggtctcatgttactctgagagggaagtattgtgcccagcctttagaactagatgcacagcattcagaattctcacacaccatctagccctcttcctgtaaagataagaaatcctactcagatcagaaataaattgtaggtcggtgctattattggtgcaattttatgttctttcaaatgctcttattaatatacaaagacatgaattgaagttcaatgagtaaagacaggactaattaaactaaaacaaaccaattcagaaaaaaatcatgcatacaagtgattataaacctaggcatccaaaatgatatacacccctgatagaattcagctaagtatctgataatgtgagacacacacacacacatcacacacacacacacacacacacacacacacacacacacacacaggactttaaagttttttttttttagatcagcaataattaaaaaacctagcctatcaataacaaacatgatgtccaggaacaaatctgtcctgctgtggtatggaactatataaaaataaagcaaaactgaatatgttacaatataatacctttaaaatgggatttctgggaaaaaaccatattcttatcattgaggctgcccttaattttatgaaatacagtttttttccaagcagttaatacaatagaagcctaagaaaatcccttaataaatttctatgaaaactgatacctcacattgcaataatcttttgggcaccccatttggcatcatagatgacagacatttggacttagtcctttggccacagacttcccctttctggagtttgaatgtataatccattactgcacaaagactgcactcttcctagtagacggacagtgacaaactgtttttagccaggattgatcacggtttgtttactgcttagtggagacttattgctgacttcttttgaaagtaaaaccagatcaatgtctcaggacacatttcttccaactagatatatgccaaatatcttccaactagatatatgccaaatatcttccaactagatatatgccaaatatcttccaactagatatatgccaaatatcttcagtaaggaaccatttactctgcgatgcagattgagtttcaagtgaatgtgccacagaaaacactctactgggcttttttaatagagagaaccgcaggcccttgcctgaggctttctgatgagccagccatatcactttatgatgctgaaaggaaataccttgggcaccaaggtttatgggcagattttcagtggaggcatttctgaagattgctaggacctaaggacaaagcacttatatatttttgtttttaaaagtcttgaggattttggcaaagctttgcgtgttcatgtattgacaggttctctctgtcctttcttcttctctttcatgttaatggaccacagtgtggaagtaatccgtctgggacacagttattttataaactgggaccggaagatgtattatgcttcgaaagcaatgcctgctgaagcccggacgaccactctaaatgaggaactgggccagatcgaatatatcttctctgacaaaacaggaactctcacccaaaacatcatgacttttaaaaaatgttccattaatggaagagtctacggtaagggaatagtttctcttaatgataccaaataaataagtaaataagtaaataaataaataaaaaaacatcattcaaaactaatatccccttgcccccccttaccaaaccatcatggctttcttgttaagcattgctatgatacttgacagataatggacacccataaactagttattgcacacatttgaaagaatctgatgaaacttagcatctgttgccatccatggtagactgttccctttgataccctgttctgtggatttgttctgtaactgctctggaggccaaattccctggttgtgccctaggcagtgtgatttatcttgttaagccaatgtcttttgcttcctcctctattccctgtgggatcaatgttaatatatgtgtttttgaggatttagtatttcctgaaatgcacatttcctagggcaccttcaccactaatttcccctttggattcttctgtatggataaagaatttgtatttggggatccaagcatcctttttgctcctggtccatctcaagctggcattgcctagctagcagacaatttcttctgtagaaaacagggaggcctggtgggacctttgggatagtcctctggatctcttaccttaattcacggaggttattcattttgccaaggagttccaagagaaggtaacttttctttgtctcctaatgaaaaggaaactttatcccttgtcaaataatttaaagcaggatttgactttgaaggaaaataagggattgaaaaagtcactatgccatgctgacctccctctcattgaatcctatcaccatcacccacccatgcagcaatgatgccctcagctctcctgtatcactaactatcctgccttctttggtagtggacatggtgacttccggcctgagctttcttgtatgtcttacatccatgtcatgcctactagaaccattacttaaaatttatggacattatttttttagtctaacaatacttccttgacctaaatagtggtgtaagtaaaaatattttgaacattggggggatattttgaaatttagagatccatttgattcattttaacccagtgatatgatttctaagaagcagtctgaagttattagacatgtggacaaataaccatttgtttggatgtttgttgtgggctacttttggagaaaacttcttgatatcttcaggtagagatttcaagatctttgtaaatttgcatattttaaaaaccatatgaaggctagtaattttcctcatagactataggaaaggaacagaaagggttaagtatcctcttttggtcctaatttatatatgcattataatttctatcatatttatacccataaaacatacttcttgcacacaacaatacttttcagaagtgctcttttgggtacagcttaacttgatttgagtcatagatctggactttgggaaatgttgacttttcactctgacctattgacttagtttaccatggttgtgatgaaacaccatcaccgaagcaactgagggaagaaagcatttattggcttacatttcaagattactgcttatcatcaaagggagtcagaacctggaagtttctgcttactggcttgctcttcatggtttctcagcatgcattttatagaactcaggaccaccagctcagggatggcaccacccacaacttggtgggccttcccacattaattactaatttaaaaaaatgcctcacagccttgcttagagaccaatcttatggaggcattttctcagttgatgttccctcatctcagatgcctccagtgtgtgtcaaattgacataaaactatccaacacacctatctacatcttgtttctgtaatcagaattattacatccttagacttttaatgtttcttctgtttcatctctagccctgcaatgggctctcttttgggggaggagggggcttgttaatacaaagacaaagttctttctcttctttccatcatttaattagaatgaatgcatttgtggtcatgataggaccatgaccatgtaactctgagatttatattttaggaggttggctaggatcattacaatctcaaggactcctcctgcacagcacatgaaaagcattcataacttagacctgcactccagaaaaaacacaaacaaatgttaaatactgtaacatgtgaaagaaaagacatgggtatagattcccatcatgctgacttcttataatatagtcctccacttctaactctgctcttcagctcatccataaaacttgaatgaaagtcttactggtacaagcttgtaagtaatcccgtctggttcatgttgatgcaaatactttgctactgtaaaaagggaatcctagtcaatagtatcaacccttcaaatacaaagggaagtttagaaaaatacccagatttccaaatccttcccagactgtgccagctgggaaacagctgttcaaacatgggagcctgtgagtgacatgccacactcaaaccacagcattcagcctttgcttcctacactatggtcatttcatgatccacagtgtgtttcatggaacttcaaaacttcctataattttcagcactcgtagtgtgcttcaggagtccaaagtctctttaaagactcaaggtaatcttgtaactgtgacaccctgcaaaacaaagtatgattatatacttccaacatacagcaacagagagcaaacatgtgccctctttggcagcatgcatagcatcttcatatattatattagctagttctcaaggaggaggtttccagatcagttccagtgtctgacatatcttcagcaagtagggttttgctttcatgttctaggaggtaaccaagggcaatgacaatctattgtctcactaatctcttggactcaccctgaccaccagatcaaaaggaggtttttcccatgggaagttctttctttctttctttctttctttctttctttctttctttctttctttctttctttctttctttctttcttccttccttccttccttccttccttccttccttccttcctctctctctctctctccctctctctctctctctccctccctccctccctctctctctctctctctttaaaagaattatttatttattttatgtatatgagtacactgtagctgtcttcagacataccagaagagggcatcagatcccattacagatggttgtgagccaccatgtgtctgggaattgaactcaggacctctagaagagctgtcagtgctctcaactgctgagccatctctccatctcaagcactgggggttttgttagtctatggctcttataggaagcactatcatctagtggtgcctgtcttgattttgtttgctcatttgttattggttctttaggaattttgtgcactgcattttgataatgtacatcctctcccctgactcctcctagattcatgtcagcttccctgcccacctgtttggtgtcttccctccatctttgcctgtcaagtgtagcttatgctgcccatatgcttttggatgtgtgatctttactagaggatagtatacttacaagaggctgcacccataaagaaaatggactctccctccctctgccaatagcttcttagcggggactgtgactttgtgtccatctctccccgtcccccacacactggcattttgcacggcctgagactgtacaggtcttatgcatggtgtctcaactgctgtgatatgtgcctttctgtatccagagaacagtttctttgtagtcatccacttcttatgactcttagagtctttctatccccttatctgacatgatccctgaaccttggagggatgggatgtgatatatatgctccatttagcattccacaacctcttattctctgttccttaatcagttgtgggtctgtgttaaccacctctactgcagaacaatgtttcactgatgggggttgattgatgcgctaagctggggccacatgtctcaccatttttattttttaatgtctacttatttacctttatcttaagcataagcacccctctaattaatagcaatttatagggctatacatattgtgccagtatttgaatttatattctatctagtaataatgcttcaggaaagagtacactaattggcactgaatatatatagattagatagatatagatatagatatagatatagatatagatatagatatagatatagatatagatatagatatagatatagatatagatatatgacctgcacagtctcaggccatacaaaatgccagtgtgtgggggggacagggagagatgaacacaaagtcacagtcccagctaagaagctattggcagagggagggagagtccattttctttatgggtgcagcctcttgtaagtatactatcctctagtaaagatcacacatccaaaagcatatataatataatgtatatgatatatatacacatgtatatttattaatatatatgtatatttattaatggaaaagaggccattaatttgaagtagggaaagatggaacattcgggaaggattggaggcaggaaagggaagggggaaatgatgtaattatattaatctctccatagtataaaaaaaccaaaaaccccaaactcaaacaaaacagaacactaagtttatcctctaaaattacatgtttaaaactagtttcagttttacttactgtttattttcaatgtttattttagcaggtgaagtgctagatgacccaatccagaagaaagaaataactaaggtatagaagagatacatttcatttttttgtttcagttttaaatggtatatgattttaaagtatacactttcttaaaggctatccactatgaggcatgtaaaaaaaaagaaataaatttacatggttcaaaatttcttctaatcaaggtttaacacagtttccaaatctttagacttgtgcatggactcatcttcctgttcaagtggctggaagaatgcaggtctcatgtcagagtctctacactgacaggaaatatgactgaagacaacattgtgaatgctgtgatctttgctacctgctgattcccaactcttgtgacacttatgctttgctcagtgtgctcctgaactgcagccatgtggacataggacctaccctgattcacatggaaggcgacactaaaggcttgggcccagagagccaaggatttgcaattggaaatacaccccacccccaagcaagccaaggcacataaaacataccccacccccaagcaagccaaggcatgtgattgccacgtcaggtcagaaatccgtcacctcctcaagaagcagtacaggccacattgtcatctatgtgcctaccagaggctgactctttgagctggttgagctgaaagtctaccctattggtcatgagccctgggttaggggagggttgacggtggggtagacagataaagcctgataggtcaacatgaagagtgtggtccttgctactgcatgtgctgcccaactacaggattaaatatgatgttaggctctgtgtattacggaaggggaaggacaaacagccctggagaccctgcagctgatttgagtaacagccagagctgattcagagtgacaagagtcacaagacacaagtccttgaagagagcaaaccacaccgaggcaaggccccttggtgctggaggcaggcagcttgagggcacccatgataaggaggtatctgattcatgctcacaagctcaagctcacagttctcccaggaacccagtgttgcctctgggaagcagcttcagtggatttgcctcatcattggttggcttaacacgcagcagaagcccaactgacagaaacactcttggctctacaaggctgagcaccagtgaaggctgctggctctctacagcctgctcttattgcaagtccctaaccagggctcctccctgtcccacttctcttttcccctgttactgaatagttcacccagagcccaggtcctgggatttggaattagctccatgtcctacattaggctctggggcctggaagggcaagttagccccacaatgtaggatacagccttgctgcctgggtagcaggattttacctattggagatgtctacttggtgggcaccaacccatcttgccattgtacctacatggctggcttcctgattctgccttctctcctagcagctgtcatcctggtgaggctaggtctctgtaccacaccagggtcccagcttggaaactcagaaggcactgggctctggtgctctagccatggtcaactgccttcacctcttgtgaagaaaccctgcctattctttgttcctcttgggatagagataaactcagggatctggctgctatgctggaatggcaacagggtgtctcagtaagaacaggatgacaggctgccagggtctcacagacatagtggagagaaatgtttggagtgtcccactggcatgcagaccatcccagttcacccaagcttattgaatgctgttgctacaagattccaaagagctctggacctttttgccatcagtgttgggtcaagacactagttaagtctcctgtgtgccaagggggtggtgaatgaagtcaatattgcttcaagctccagccccaagcatatattctttttaaacttctgttagatggctttgtaggtgatttaagctatatagtgatgatgtggcatctgcctcctggcagagcctagcttaagccctgtagctcctgtaaatactagatcagtgaataaataaaagcgttctaaggcagaaaggaatgtgctgcccaaaacatcatttcttcatcctgaaaaaggacagattgaaacttttgatgaaaacaagagtacatgataataagcattccccccccccccccacataaagtaaggatggaatgcaaggggattctggacatggcagggatgtgtccaggtagttgtactttagtgtctctatgtgatgcccatggattcagaccttggagccaaagaaaaggaagcccagccacagtgtgaagctagatggttaactgaacaaatactgctcgtatgatttcatctttggaggggatacttaattttagttacaaagtcaaaggtccatgttatcagccctggatataggaatagagtggaaaagcagagagccaaagcaattgcatggttgtcgggtccttataaactgagaagttgagagatagtctgccgtgaagagacaaggacatttcattacttattagactgtcataaagtttctaaacttgaggtttaaatgtctgaaagatagggcatgaccacatgaaatcaacaaaaagccaaaaagtggagatcaggttggagttattaaatggaaagaagtacacagcgaatgtgctgtgtggcactattcctaaggatatgagaacagaggcctccttaggtcagaatggggaaccaacgacagaccaaatgataccaccaaattctatcttggttagccaatgagtttaattggggttccttaaagcaaaatggatgagggatttacaaggagcagagtagctcagagagctgcaacaccagagtccatcttaatgtggcaaccacccacgatagctggaaatgtgcacatcctacacgaagatcagtaggttggggagtgtcctttctaggtagctctgttggtctgagccttcccagggagcttggttgatctctacttcttccaggaggtgtttctggtctgagagtctcctttaggggttacaaatgtccttactgcttgtatacctgtggaggaaggagtctgttgaatctggttggcttcagggacttcctgaagctattctaagttgtttactcactgaattttaggatcttccttgcaggataaaatgtttcaccccacctccacctttaacatctttaataaacttcccttaaagatggaaggctgtactctgctactcaagagcatgtcaatgtctactagaaaaatttttagttttaaaacaattcagatgaattactgattgcagatttttttttaaaaaaattaagacagataatggcaacccatgaaacatgcaaaggttaaaaaaatggaaaagacaactgattatttttggaaaaagtttgttttggtggtgttgttctcttgtaggaaaaggaggctacggacttctcaagcaagtcgaaatcagaaaaaacactgcatttctttgaccagagtctaatggaatccattgagctgggggaccccaaagtccatgaattccttcgcttactcgcactctgccatactgtaatgtcagaagagaacagtgcaggtaggtgcttgaatagtgagcctttgaaaaaatgtagcaaagataagtattagtatgcaaattgagagatttctgaattaaaggtagattagactattccaagcaaggttttattttctccagatttctgtttgttttttattctgaatgcttttcagaaacaagaaaatttatttttatttgttttatttatgtgtatgagtatcttagctgcatgtatgtctgtataccatttgtagtgcccatgggtgagggcctctgatcacctggaactggagtcatagacatttgtgtgttgctctgtggatgctgggaattgaacctgggtcctctgaaagaacaaccagcattcttaattgccaagccatcactggagaccccataaaaatagtaaagaaagagagacagtaccagtggaaagctaaagatccaaatatgtccttcagctgggatgaaatgcctcttaggattgagcaccacacttgactgtgaaattctagcatccagaactcatagggaggtgcagttcacatagcacatgtccatggatggagctgaccatacagtggggataaatctacataaaacaccgtagtcatcatgccgatcggagccttttacatgctacatggttatttggagctcagggtttataaaatacagcaaacccagctggcttactttacctttgatcctgggaggccactgatgataccagagagtcagcttcttccttcaaagtctaacggttttacctgtgttgtttcattttgctaccaaatattaagttaaaattactacccaaggaagtaatgagtgctgaattaacccattctttagattttaattgctttcaagattcacataattatatttatggctttaattgatctttataatattaacaccacaaggaatccttgtattcccttctgggaattgccttaaggaagtttctttcatttctgccttttgagtttatttcatttcccaaaccctatttcattttaatagcactccctgttttccattaatgttaggatattctttagatctctttgaggatattaattatacttaatttgaaatttgcttttgtttcatccagtaagctgcattttattgagtgttctctctttttcgctctcctctgtgtctctgcctctgtgtatctgttgtctctgtctgtctgtctttctctctccctctctgtctgtaggtctttccccttccagctttccctccctctctcccttccccatttccccttctccttttgcatctaactttcatgttgttcttaaatgtttggtgatttatggttgtctgttcctctttgcgtgagaggctttctgcttggtgaacgtcatttattaccatcgtctgttgctcaagttcatctggataaggccgatcatgtaactggtcttccggttgtggggtcctctgttctggtcaccaaggttaccatctgccagggcttttctgagaggcagaattgcatacaaattccttgtcttttccccccacacccctgactctgtggaagtctgacactactgcacccattcacctgtggtctctggtccctttcctgatgtggcctgaacacagatagtattgcttccgcctgtcattcggagtaggctggctggagacggagcacagtggcacaggagtgccaagtgaaatttttcagtgaggttactagtgaggtctcccaagatgctgttctcatgagttcactgagtttggagactctatggtgctttgccttgcctctgctttcatgttcttctgcagatgtttctctctctctttgtttctttattgatcagactctcattttatctttcagagagttctcagatttgtagattcatttttcaattctaacatgttcaaaatttacattgtgctgtgattcagtgcatcaaagtatgtgcatgcacaacatatacacacttatacacatggtagcttggtaagattcgacacttacaaatatccctagagacactgcttggatcaaggcataaagctcttccatcagtgcagaggttactcctgccctttttattcagttcctgtaaactctagcccacccaaccactgctaaggctgccatcactaaagatgagtttgtcttcttgtcctccgtttaagcagaattgtccagtatacactccgggttatgttctggtatcatgccagtatctctgttgttagtttctttttctttttttattaagcaccattaccctgtatgaacacaccacacccatttccagttctctgttaatgacattaaattgttctagcttttggttgtcacaagggactttttatgtcttttcaaaattctttgtttaaaaacattgggagcaggatgactaaacacttaagagtggaaattgccagctcatcatggaaggaaggatatgtttaaacttctaagaaactgttcaactgctctcaaaaacattcaggtatcattttatatccctgctgtgtgtgcatgagagttcagtcacctgccttcccacccaacattgcctgtggctgctcttacattttagccattcttaatgctggctaatgcttcttgccaccaaaaaggatttctggagagaaaggagttagatatttgaatgatttcaaccttttctatctctgtctcaagacactaaattccactgtcaggtttcttcttaaggaagtgagagcttgctttcctttcaaagcttttgttgtgggatattttgcccaagctcacgtgaatttgtacatgctaaagaacaccaaataaataaataaataaataaataaataaataaataaataaataaataaacccttctgtagaaatgtcatgtatggagaagatgagaatacaaatccaacactaaaagtttaatagttaaaattcagcttatggtggaggatattgctgcaagcttgtggcatttggctcatggggaagtggcttggagacactgtggttttcatctgtgccagagtaaagtttcagaacaagagagagggaaatccaagactttaggaagattttttttcttttctttactttcttagtaaatgacaataaaatatgttttaaattttaaaactctttttttttgccttattgtaccaatttggaaatttgttgaagcttgataatagcttggtatatgattcattttaataaacatttaataaatactagaaatgagtgcatattctataatttggggatactgtattctaaccatatacatttaacaattacattcaacaatttttaaattatattactcaaacttctattcgtttgttttttttgtttgttgtttatttagtgagagactgcttttctatagcccaggcaacctttgggcttcagccttctcagtgttttcttaaatgtattatttagataacttgatttctcagctaattaaaatatggcaagagcctctaatagaacagcacacttgtatgttgatatttgtagttctaccaaagcttgctttataaggctatatttgataatacttcagactgtcttcattagatcacagcctgtatcagcatcccttgtcatttttgttttagaattcactgtgattgtttgctctacttcctaggtgtttataccttagcttttgttagttttcatttatctcttcacttacatttggacacatctctggtaatcatatgctttaacataaaaaaccaaaaccaaaccaaacaaacaaacaaaaaacccccaaaaaacagcgtagacaaagctaaggccaaagagaacaatcgatctgttctcctttgtcatcactacacttaaatacttaaagctcagctgttaataacatctggagtccttttcaactatcttattttgtcttctctttgtcctacctttcctttcttagactcttctttcttttatttgtcctttcataggttgagcccctttgattcctgctactttgaaaacaatgaacctttattattttagcagttaacgttgggactttaacctaaactcatgaaagtctaaggcttcttttgagtaaaacaaagatcctttaatagcatcactgctgccctggcacatgcaccattttcaccatgcttttcattcttttaaaacctcacaggcgctaggtttataactgtgtttgatgtttgtgtgattcgctcatttgtatctgctttatgttccttaacatttgtttcttcttttatctgtaaatgatgtctgtctgtctgtctatctatctatctatctatctatctatctatctatctatctatctatctatctatccatccatccaaccaaccatctattgatctgtaaatgtctatctcctagtggtaaattcatagcttccccattgctggtagaaccatgagagactctgaagtaactatgttattactgctccttttctttttttcatttttgagacagagtcttgctatattcccctgattgctggtgttcactaagtaacacaagctgacctcaaattcacagaaatcttcctgcctttgccttttacctgattcagtcttccacttataaatgtatactcaagaatgtatgcagggaagtaaggttttctttttcacaaggaacccatagcacacccacagtttacccactaatagaaaaaacaattatataacaatttatctttgaacactataaatggaaagtattgattgatctattaatgcctacctcttctgatttatttttcaaacattatataattttatgtaagtgtggttacatttatttttaaggcatttttaagtctttcttcatatttcattctttccctctcctcttagctccactccagcacacacactattaagcaacaagtctttaacatcttgtttgatcctttacattttggtagaattttatatattcagtctcataaaagatcattagtgacttagcaaaggaaaggtcagactgtgtgcttccccactccttgttgtttgatctctttctaatgatcatttcccctctttcagccatgggtcccaccagtataaaaatgagaataagaacttaagtaatcatcacttctaaaggtttaccttgagcttcctgtgagaatcatgtgaggatcatattacaatgttttagttagaacctctagtcactgaaagtgaagacctacggtctaccagctaagaaacttttatcacagtggagagacagactcacagttggacagtgagtccaatagcaaagtgtttagagttgatgctggagttatttattaaagaatgcattcggattagcactggaaatacgaacatgaattattaccctcagcacagaatgtgtttgtctctttcccttttaggacaactggtttaccaagttcaatcgcctgatgaaggagctctagttactgctgctagaaattttgggttcatttttaagtctcgaactccagagacaattacaatagaagaattgggaacaccggtgacttatcagttacttgcctttttggatttcaacaacatccggaaaaggatgtctgtcataggtatgttggctagctgcaatgatgatgattattattattattgatcttctgatgcttctgtagttatgctgatgctttttactgatttgattcttagctatgtgctacatttttggtatctttatgaacccctgtgatcctcaacttagtctcaaaagtatagtgatctgtgaataaaactcaataagagcttcttacatgcccaacattattctgaattctctatccgaagtaacagtagcacatgctattatttttatgcacattttatagataataaaaccaagatactgaaaagtgcagtgacgtacctgagtccaaaagctggtgacaccgtggggagtaaaacctagaagtgtgaccggagagcttaattctggctcagaagagtttctgaactgtgtagttttgctggttgttgtgggcattgttggtggttctcatgtcattcattatttctgtttatccccattgctggagatgatagcttattaagtaccacactacatccatgcttttataactcagtgttaacctttagtactgtttcagtgttgtcagatgagtcacatgccccctttccaatcctcttacatctctaagcaggcttttttctttttatctttaaaaattatctttttcttagttctttgagaattttatataatgtgttttgattatatttacttcctccccaatctccacttagatcaacctcctccttccctactcacccaactctgcatcctgtttctttctttaacctatcaagtccaatttatgctgatcatatattcttggatatgtggccttccactggagtgtggtcaactttccaggggctacttaaagaaaaacagactcttccacttctagaagctgtcaatttcaaatagttccttggctagggaacttcatgtccaccctcttcccactctgtgctgggatttggtctgccttgagcttgcacaggttttctgtatgctgtctcaactgctgtgagttcatatgtgcagctgccctgctgtgttcagaagatacagtttccatgtagtcacccactgtctttggctcttagactctttctgcttcctcttccatagtcatccctgagctttgggatgagggatatgctataggtgtctcatttagggttgaacatcctacaatctctcattctctgcatctcgaccagtgtgggtctccatgctaatcaccatctactgaaaaatagaagcatctctggtgagggttctggcaccagtgtatcaccctcacttatgacacaagaaactaaactaaaagattttatgtcatttgttggagagtatggcaaagcacacgagttttacacagctactcagctgcaatgaaaataactaaatctggggttgcctttcttaaggttggctatgaccttagacataactcaatggtaaagtactttcctgggatgtgcaaggctctgggttcaacctccagcagtgaaaagtcaaaacaactactcctaagataaaggtggcctcttaatttcttggtagttcacttgtttttgactcttccatatttttgatgtactaggaaaatggttcccagcttttagcccccattagaataagctgaaaaacgatttacagatcacttggctttgggaactggtttgtgaattagttcattggaggtaggatctccagctttgcatttctgataagttttaagtgatgcttatggtactccataggggaccacagatggagaaatattgctctaggataacacttcctcattgttagtcattttccattggaatatttgagatgtttctcaagcctgtatcagtttttgttattctccaaattcagagtttctctagaattctgtcaatgtttttctaaattttcctttccaaatgcatcctagaattatctgcaaatctagtgtttactaaaccacatttttttctgtatacaattctactgtcctttcctcttagttaccattaccattgtctcagttggggatcttgtcactacttacttgaattattgcaatgtcttctaaattgcttccattaaagtaatactccatgctggcaatatgctactctttctaaggcatagactgatcatgtcactacttaaaaaaatgtttgcttcccagaattcccagggcaatgcttctttgtataggcaatgtatatgattctcaaggtcacacgcaaagtgacaccaacctatttttctctactttctaaactttgtgctcaagcatcatcacagctcacaagtcttgggatgcattgtattccgttatccccgggtatttgttgtttttaaatgtatacctacaacaattcttttccctaattcccttttgctgaaaattccttctcatcaggtaatgtacaatttaaatgttgtttgtttttcttctttaccaagtaacaacatcttatagtattctccagaatgctttgttcaccatagcagtgggattctgactcctgggactcatggttatctcagctcataggctgggtgctacttcaggtcagggagccttatctttagactctctagggccaagtacccaacaggcacatgatatttacagatattcataaaatgaaattctacctaatattctgtaacttatgaacatcttggctattgcattaagtgaactcctactatggaatatctatatctatatctatatctatatctatatctatatctatatctatatctatatctatatctatatctatatctatatctatatctatatctatactatctatctatctatctatatctatatatatatatatatatatccataatggtagtgttcggagtctttactgaaatgtagtatggagagattgttctgaggctactcattttaatttttttttaatgataacagctgcaggcagctcccatcagctaagaagcatgcaggcagctccaggtgttggctcattgttgcgtcagcaggagctatcctctctttacaaccccaggagaggtgtgaatggtcctcatctggctcagagtggattttattttgctctaagggtgttgacaaaaacctaagattgttctgtggggagaagtttggctcttgctcagcatcggtcaccattacgggctgtggggaattttcagcttaaccgcagacatcagatgtctgccgtaatgggtcccatatgaagaagggtaatgtttagcacagagtggggctcccaggctttattttggctgcttgggttttaatcatttaatcttggaactcaagagggactctgctagtttgagtctaggcaggaaacattcccagcctctggattgtcacgtggctttttctatggggacaatacctctatgagggtctgtcactgctgatgtctcttcctcagtctctatctttgtcaggatttcttttttctttttttcttttctttttttcaagacagggtttctctgtatagccctggctgtcctggaactcactttgtagaccaggctggccttgaactcagaaatccacctgcctctgcctcccaagtgctaggattaaaggcatgtgccaccactgcctggcaacaggtttactctataagtgtcaggatttctattcctgcacaaaaacatcatgaccaagaagcaagttggggaggaaagggtttgttcagcttacccatccacattggtgttcatcaccaaaggaagtcaggactggaattcacacagggcaggaacctggaggcaggagctgatgcagaggccatggagggatgttgcttactggattgcttaccctggcttgatcagcttgctttcttatagaacccaggaccaccagcccagaaatggcatcactcacaatgggccagcccccttcggtcagtaattgagaaaatgacttacagctgggtctcatagaggcatttccacaatggaggctcctttctctgtgctaactccagcctgtatcaagttgacacacaaaaccaatcagtacagtctcccattgttgtttcttccttcttcctcctcctccttttcttctcctcccccccctcctccttctcctcttcctccttctcctcctccaccacctcctcctccaccacctcctcctcttttttctttttcattttctaccttattggttgtttttgatgtgtcattcatcaagttattaatgtatgatttcaatactagcatgtttagattttatttgtggaccagagcccctatttaaatcagtattgtttaaataaaagttaatttttatagtagtttgttaaaagttatagactctactaattaacaaacatatgaatttcattatatcattatggaaaagtccattgcactaatttgcatataaaggtcagtaattcagtacataaacaatgannnnnnnnnnnnnnnnnnnnccatttccagttctctgttaatgacattaagttgttctagcttttggttgtcacaaggactttttatgtcttttcaaaattctttgtttaaaaacattgggagcaggatgactaaacacttaagagtggaaattgccagctcatcatggaaggaaggatatgtttaaacttctaagaaactgttcaactgctctcaaaaacattcaggtatcattttatatccctgctgtgcgtgcatgagagttcagtcacctgccttcccacccaacattgcctgtggctgctcttacattttagccattcttactgctggctaatgcttcttgccaccaaaaaggatttctggagagaaaggagttagatatttgaatgatttcaaccttttctaactcttgtctcaagacactaaattccactgtcaggtttcttcttaaggaaatgagagcttgctttcctttcaaaacttttgttgtgggatattttgcccaagctcacgtgaatttgtacatgctaaagaacaccaaaaaaaaaaaaaactttctgtagaaatgtcacgtatggagaagatgagaattcaaatccaacactaaaagtttaatagttaaaattcagcttatggaggaggatattgctgcaagcttgtggcatttggctcatggggaagtggcttggagacactgtggtttccgtctgtgccagagtaaagtttcagaacaagagagagggaaatccaagactttaggaagatttttttcttttatttactttcttagtaaatgacaataaaatatgttttaaattttaaaactcttttttttgccttattgtaccaatttggaaattttttgaagcttgatgatagcttggtatatgcttcattttaataaacatttaataaatactagaaatgagtgtatattctataatttggggatactgtattctaaacatatacatttaacaattacattcaacaatttttaaattatattactcaaacttctattcgtttgtttctttgtttgttgtttatttagtgagagactgctattctatannnnnnnnnnnnnnnnnnnnttttgatgtgtcattcatcaagttattaatgtatgatttcaatactagcatgtttagattttatttgtggaccagagcccctatttaaatcagtattgtttaaataaaagttaatttttatagtagtttgttaaaagttatagactctactaattaacaaacatatgaatttcattatatcattatggaaaagtccattgcactaatttgcatataaaggtcagtaattcagtacataaacaatgacaacaaagtattgaatagaggcagatgacagataaccactaaagcataaattgtagcagccttcaaaatctgatgtaagataaagaatgtttaattgtaaatttctaggtgtggtgcttatcacaattccagcacatgggaggtctaagggtagcctgggctgtacagtgagaccctatcatctccctacctatctagccaaagaccctgaatgttttggccttggcaaaccttatgtccatttccagatgggctagttttcacagttttcaatgatttaatatactttcccaaactctgctactttttagttcgaaacccagaaggacgtataaaactttattccaaaggggcagatactattttgtttgaaaagctccatccttccaatgaagacctgcagtccttaacatcagaccatctcagcgtaagtgcctctcgtcagttcagcacgagaacccttctacatcccaatggttagaacttgctaacaaataacagcaaaggggttgacttctgaagtggaaatccactggggaagccattccacagagggcagtccgtgatggctgatggtctgggaacaggccagcaatcagagttttagtacaggcaggttatcacatcggagaagctacatggtggtggtggtggtggggctcaggacccttcaaggtgcttatttcatggctgagtttcgatggtgaaggaaggaaaaatggtctctggacccaactttccctttaagacttatgtgagtccctcatgtgctctagatgctcaacccacacattctaagacttgtctaatttttctcagtaactttctggagggaattcctttgttctctcaagggcaagggactgtgaaataataggttcatgttgggtttgaacctggtatcttagtgtcatattaataatttatttgaggttctggttgcagggaatggttcaaaattctttgtttgatgttgttttcattataaaatgtcccctcaagtcctctaaaaacataaaatgtaaatgctctgctgactttaagtttaaaagtgatgctttagtaataattgttacaaactgctatttttcattttaatagagcattcttgatttttctcttaatgttttccagagactaaaatggccttttaggttttttattattaaaacaatattggagtaataactatatgatttttgtcattgctcaaatgccaaggcactagagctcccttttatattaaagtttaatttggtagtttcttttgggggaggggtgggagaagaattgtttttaggacagatcaatgggacctgctcttttctacatcatattcctttggcttctacattctacacgtttagatttgtatttaattattgattttggatagttttatgatagggaaaggcctgttcaaatgaccattctggattgtgtgtttcacgactaattagatgacttaagtcatctgtccccttttccagtatcctcttagagttgattctccattgtgcagaacagagagggcatcagtggcagtgcccagtggggtttcatcttaaaggcaaagacatgtttgtgtgacttgagaagaaaaaatgggttaaaggcagtaactagatttccagaccagaaggagatgctgtggtcttagaagagggggcttgtaaatgtgaatgcagtggcagaactactgccaactgtctggagatgaactcagttaatgttccctgcggtcttcgtgggttaaaacacatctttgtacgatgcactgccttttctttttactaactggggtgcttcatgatttcgcacatgtctaatcacaaacctgtatctgcaccatacatcagaacaatagagaaaccattcttaatgaccagcagtgctgaaaggagcagagattgctattaaaatgctttacttgtagtgtggtggcagaagtgacatgtgaggttttcaacattacccccaaactcaatctacttgtttcgagctaatgtcactgtgtgagacacataacagccactaataccctaatcatcacccctcttagaaggataccataagtatcatatgagattgtccacttaccaagtgttctagtttccttagcatatatttctgggtcacagtccatcactggagataacagggcaggaattcaaggcaagaacctcaaccactgcttgttggacccctccctggctcgctcaatcacaggctcatactttcttacatagcccagaactacctgtctaggaatggtcctgcccacggtgggcaggaccctcctgcatcagttaataatcaagacaacctcctatagatacatctaaaggccagttttattcaagtaattctccagctgagtatttcctctcagctaagtctaggctgtgcaagttgacaatttatgctaagttaggaaaagtgtggcctcctaatatttgattacttatttaaaaactagctccataaagtataatttctaataaataatgaatgcttgagctggtttgatttgatgatggtgtcttcaagatttcaaacaacatttcactatttaaagatgaaactttaatatgattaagaaagaaaaacatttcacagaagagtcttagagttaaaaccaaagtcagccctgaaagctcacacctgtagtacctaatactcccatcttttccctttcctttaaaggtgattatcataaccacaaggagcaggccaaacttacccaactatttagcatctacttattcatcagttattacttttagcttctattgtagaagttttcaagtgtatgcaaaagttggattcattgacttttcagcaaggatgcatacctattggggtggttgtgaaaaggcttggagagaaagcctgctctagtctacaaaagaatttcctctttttgcctggtgagctgtgactcctccaaggacctgtcttcatcattgagacaggaacacctcctacaagcagaaaacacttgcttccaactgtacagatacagttgctttcaataccacttctctcttcccaattaggacacttcagcaggcatttttggctgcttttagggggaaagctggtgttctgcaggtcaaacctcatcgacttaacataaatcacaactattctttcccatgtctgaggaggtacagagttagagccatgacagctatgtaatactcttgggaagaaatgtgtgaacaaaacggtcactgtgttatggggactttcattgtgcttattgttgtctacctgtccctaagattatatcttctctcacaggaatttgcaggggaaggcctccgaaccttggcaattgcttatcgagagcttgatgacaagtactttaaaatgtggcagaagatgcttgaagatgcaaattctgccaccttggaaagggatgaacggatatctgggctgtatgaagaaatcgagagggatttgatggtataagtttggaagtgtgatgctctatgcttacttaagttgtttgctaaatcatcttacacatagcacatggttctctttcaatggtgggccatgctttgtgtgctgggtttcagcctactatgtgtggccccagtggccagtggaacggactggctttgctagcagtaacttaagcgatggaagtcttcccaaagtaaaggattgtagactctttatttaccaacccccagtttatctttgatacaacatactcatctcctctctctgctttctgatgcacatttttagagcagaagcagttgacaaagagagcagaactatggctgtgaatgattccggatcaggagactctgatgatgactcagagtggggtctgttttagaaaccattcttgtcagtgaccaatgactttggtagctgagagtagcaggaagcaggtcttgtcattagggtgaaaactgaacttctatttctattctccactttgtattagagcaccttatgtttgtttgctgagacagggtttctttgtgcaacggctttggttgtcctggaacgcactctgtagaccaggctggtcttgaactcatagagatttgcctgcctttgcttaccaagtgctggaattaaaggcatgcaccaccactgactggctacctgctggccttttacttcatagaatggcaccaccttttgcccctcagttttttgactacaagttgagagctttcctttggacctctcctttgctgctgaaagtgaagaagcagccagggacttcttaaattattagaggagtagcgtcagcccatttatgcaaacatgtcatctgactataccatctcctgtatgtgaagaatacctccctgggcctctgttattaagtaggcttgacttaggaatttccttccaggtgcctacaagattgattaatttatgtatacaatagggtatttactacatcagcattttatgtgtcatcatcatctcctgttccttgacctttaaactctgactgaaactacagatgttacacgtgttccttgcatgtattaatgtaagttattctttactctccaatgaagctattaggtgccaccgctgtcgaagataaattacaagaaggtgttattgaaacaattacaagtctctcactagccaatattaagatctggattctaacaggagacaaacaaggtaatttggaaataggtaatggtgatgtttgaagagggggagttaattctttggaaaaaaaagttaatcaaaaacttaaagcagttcatcatttttctagtcctctatttaagaaaagtaaaatctttaaaaaaaagctttaaaaacatatgaacttattatttaaaaactaatcagaatttaaagtaaaaagtaatgaaaataataaataaaatatgtaaataaaaatgcaaaaaacccttcaaactaacaaaaataccttgcatagtatattctctggtcagcagagtttctgtacggtagccacccctagagagaaaaacactctgtgtggttttcgtgttagcattgtcctattgagctgtagcaagggtctggaggtctcgtgttcgccttcagtagggagctgcaggagatcgagatctcagagtgtcgagtgagctccccaggctaagtgcaccagctgctttgctgtgccttgtggacacattactatgtttgaacgactatcatagccggaccagtgcacctggctaaactccaggattgcctgtgagaactgaaccacttttaggaatgaccagacactaagaaagaaaaaaatagtttaataagtctttaatctgttgctcataatgaaagtttaaaatttgatgctgagtcattaggaaacagaaaatattcagctaaccagcatgcactttaaagactatattcactttgttaggtgccctatacagcatttagacgtttgcaaatgtgataaatcaattttctatgtaactatatatatatatatatatatatatatatatatatatacatatatgtacagataatgggaatatacgtatgtgtgtatatatacatatatatgtgcatacacacacacacacacacacacatgagtatattcccattatctgtctgtctgtctgcctgtctctttgtagttctattgatttaacctagggtctcacacatgccaagcaagcagtcttccactcagctgcatatcccatcctgccttaccttttgttttgagacaggcttcactaaattgcccaggctggcctcaaatcctccacagaggcaggccttgaactttggaccctgcctggtccaccaggcctacctaccacttctgtttattctacctaaattattaattacaaaattaaacagcagaaagttgaggcttgtggtacttaatggatacttattacatgagactaactgcagctgacatgtgttgtgggttcagctattcaattattgcaagtacctatgaatttactattatttatctgatttctttgctttgaaatctatactgagatttcattatttgtctgttttgatttaggacaagatgaacaatcctgtagaactaactagtgtttcatgattctatactgttagaatcaaatgactataaaattagagcagcccttgctgagtatggtatactcctccaggtctctgacagaacagtagctctgggtgggtcttcaactgatgattaaattccaatttttttctttttctgtttcttttaaagattttatgtatttattctatgtctatgagaactgtagctgtcttcagacacactagatgagggcattgggtcccattacagatggttgtgagccaccatctggttgctgggaattgaactcaggacctctggaagatcagtcagtgctcttaaccactgagctaactctacagccccctccaatttcattaagtgggaaaactatgaaaggtttcatgcatttgccttcaattattagtctatcatattaggtttgaatattagccaagtttagtattttggcgctctaatgaaattaattgaggtttctggtaaacggttggttttatattttctcttcattataccctaggaccttaggatatctaaatgagtattggtttgggaatctaaaggtagttttggaaaccaaatgagaccccatggattcatagatgtgcctattctccaagggttcagtgaatggcaaatttggttatgggtctcaggtcttgggcttctctcctggccaactgtatcatatgatgctttgtgtgttcactaacatccatggagctgataggctctgaggaaacacagccacagttccaaaactttatggaaaaggtaacactactagtaacagaggtaatctttctttgtgccagaaactgccatcaatatcggttatgcctgcaatgtgctgacagacgccatggatgctctatttgtgataacggggaacacggctggggaagtgcgagaagaactcaggtgcgtgttgaaggaaagggagtctgggaaggggcagggccgtgagacagttctcccattcctgtttcggagcacctccttaggcctcaatcacgttcctcaccaagggttgatattggcaacgaggcattgccttcgggcctccaacatttcccaggtgttctcagggaagaatctcaagtcatgtatgttgtgctttaaaatgttccttgacaaaaacctggaagatattaagtgacgatgagtggtgtcgtcacagaatgtacgctttaaaaacccgtttcctggctcccttccatctccgagtcaggtctctggggtatggagtactgggattaatgtttaataggcacatgcagtttgtgataagataactttcaaacactcagcttgtaggggatagcgtaggcggtcagaattgtgagcgcttatgagaggtggcatgcttggctgtttgtacagctgccatctactgccaaaaaaaacacaagagtgcttgttgccactggacattacatttggagaactaatagtcttactatctattcacttattatatttattttctgtaacttaatttgaaaaaaaaattaaaaatctaaataattattttcctctaaaattgaaaaaggttggcttgtaacagttttgcttgctgcttctacggcttctctgaccaaagcttggtgggcagggaaggaagtcttagttggcattgaacctattgatatctgtagatcgatgctgccactgtttcgaccttaccctgagcagaaaagaaaagggttctcacgtgctggtgagatgctctgacaggagaacatgtatgtcttcgtcaaataaaaaaatgggaaactgttttcagtattactgatatgtattttaattatttgtatagttttaagaaagatattatttttttattaacagaacactgaccatgtttttattggagttaatgatttccaggtaaattttgggtcagttttatgctagaattcatgggacctttggggaaatactaatactttgatacttaattaaaatattatttttaaagagaaattgtcatttatgttcatacatatacatgtgtgtatctataattcgggaatttctatacagtttataaaaccaataaatcaaaaggtttttttttctctctatttcctggtatagttaatttgtattttaattattaaaatttaaacaactttccccatcaacttatacaaataaacctgaaatttcaaaagtaatattctcaggcgtcatggctaggcactcaggctttacatgtctctgtttattttagggaaaatggatcatgagatcttttaaaaaaaccaacaatacaacttatggcacatgcattgaatttgtccagaggctaagagaaaacaaacaaacaaaactccacaaactcagagcagtggttaatggttgtttaccttctactcttggaagtataaaattgcaaacaggcaacaaaaacctcccaaagaagacattagcatcggtgtgaatatccagggatggaggcagcatcagtgtgaatgcccagggatgcaggcagtatcagtgtgaatgcccagggatgcaggcagtatcagtgtgaatgcccagggatggagacacataagtgtgaatgcccaggaatgcaggtagcatcagtgtgaatgcccagggatggaggcagcatcatcatgaatgcccagggatgcaggcagcatcagggtgaatgcccagggatggagacacatcagtgtggatatccagggatgagggcagtgggcagtgtcagctgtggctaagcacaggaccctgtttattttgtgttaggccatgtttaaagaatcaaatatttccttcaaagacatcatatttcactgaaggtggatctctccaaaaacaacttgaggaggaaagggtttacttcataatacacttccagaaaaaagtccatcagagggggaagtcagggcaggaactcaagggagaaatctgaaagcagggacctgtgaaggaaccagggaggaatgctgtttcctgccttgctccctggctccccctcagtgagatttcatacataggccagacccacagggaacgggccttcccacgttatcatcagcagagacactctctcacagacagggccaagggaaccgtttagacactcagttttagaggaactcctctccccccccccccacgcctctgctccttaagacaactttatctcatcttttgaggcttgaagaaactttatttttttttcctcttaaaatactcagtaaaattcccagttgatagggtgtagagtgatatgctgtacttttcaagagtctaacttggagttccaaaccaagaatttaactttttcattctgtgtctggctcccttcacaggcaaggcatgttctgggtaaagagatggccctatgagttcataggaagagctggagaaggagcagttgagcttatactccaagatttcatccagctacaactggctggctacatagatgtcatagctgtcattttatagaagaaatgtaggaaaatgtgtgttatttatggattattgttgggaccttccaatggccgaattctccaaaaggggaaactagcaatgtatttcaaatgtataaacgtgcatgctcttacccagacacctgatctaagaatttcttctaaggaaataaatgaacaaatgcatgaatatgtagctgaggaaatatttatcccttcattcggtataataattagaaatagctcatattagttaggaagaattttgttaaatactatgatattggcaagcaatgaaatacaaaatagtcaataaaagtgattttgccaatcatccatcctgaccaagtaggtttcattccagggacgcagggatggtttaatatacggaaatcaatcaacataatccagtatataagcaaactcaaagacaaaaaccacatgatcatctcgttagatgaggagaaagcatttgacaaaatccaacacccattcatgataaaaatcttggaaagatcaggaattcaaggcccatacctaaacatgataaaagcaatctacagcaaaccagtagccaacatcaaagtaaatggtgagaagctggaagcaatctcactaaaatcagggactagacaaggctgtccactttctccctacctattcaacattgtacttgaagtcctagccagagcaattagacaacaaaaggagataaaggggatacaaattggaaaggaagaagtcaaaatatcattttttgcagatgatatgatagtatatataaatgaccctaaaaattccaccagagaactcctaaacccgataaacagcttcagtgaagtagctggatataaaattaactcaaacaagtcaatggcctttctctacacataggataaacaggctgagagagaaattagggaaacaacacccttctcaatagtcacaaataatataaaataccttggcgtgactctaactaaggaagtgaaagatctgtatgattaagaactttaagtctctgaagaaagaaattaaagaagatctcagaagatggaaagatctcccatgctcatggatgggcaggatcaatataataaaaatggctatcttgccaaaagcaatctacagattcaatgcaatccccatcaaaattccaactcaattcttcaacgaattggaaagggcaatctgcaaattcatctggaataacaaaagacctaggatagcaaaaactctccttaaggataaaagaatctctgatggaatcaccatgcctgacctaaagctatactacagagcaatagtgataaaaactgcatggtactggtatagcgacagacaagtagaccaatggaatagaattgaagacccagaaatgaacccacacacctatggtcagctaaaaccatccagtggaaaaaagacagcattttcaacaaatagtgctggcacaactggcagttatcatgtagaagaatgcgaattgatccattcctatctccttgtactaaggtcaaatctaagtggatcaaggaactccacataaaaccagagactgtgaaacttatagaggagaaagtggggaaaagccttgaagatatgggcacaggggaaaaattcctgaatagaacatcaatggcttgtgctataagatcgagaactgacaaatgggacctcataaaattgcaaagcttctgtaaggcaaaagacaccatcaataagacaaaaaggccaccagcagtttgggaaaggatctttacctatcctaaatcagataggggactaatatccagtatatatataaagaactcaagaaggtggacttcagaaaatcaaataaccccattaaaaatggggctcagagctaaacagaattctcacccgaggaatactgaatggctgagaagcacctgaaaaaatgttcagcatccttaatcatcagggaaatgcaaatcaaaacaaccctgagattctacctcacaccagccagaatggctaagatcaaaaattcaggtgacagcagatgctggcaagggtgtggagaaagaggaacactcatccattgttgatggaattgcaagcttgtacaaccactctggaaatcagtctggcggttcctcagaaaattggacatagtactaccggaggatcccgcaatacctctcctgggcatatatccagaagatattccaaccggtaagaaggacacatgctccactatgttcatagcagccttatttataatagccagaagctggaaagaacccagatgcccctcaacagagaaatggattaaaaaaaaatgtggtatatttacacaatggagtactattcagcaattaaaaacaatgaatttatgaaattgttatgcaaatggatggacctggagggcatcatcctgagtgaggtaacccaatcacaaaagaactcacatgatttgtactcactgataagtgggcccagaaacttagaatacccaagatacaagatacaatttgcaaaacacatgaaactcaagaagaacgaaaacgaaagtgtggacactttgttccttcttagaattgggacaaaacacccatggaaaaagttacagagacaaagattgaagctgagatgaaaggatggaccatattaagactgccatatccggggatccatcccataatcagcctccaaacgctgacacctttgtacacactagcaagattttgctgaaaggatcctgatataacagtctcttgtgagactatgccagggtctagcaaacacagaagtggatgctcacagtcagctattggatggaacacaaggtccccaatggaggagctagagaaagtacccaaggatctaaagggatctgcaaccctataggtggaacaactttatgaactaaccagtacccccagaagcttgtgtctctagctgcataagtatcacaagatgacctagttggccatcagtggaaagagaggcccattagtcttgcaaactttatatgccccagtacaggggaaggccagggccaagtactgggagtgggggggtgggaggtggggggtaaggtttgggggagcatttcgggtagcattggaaatggaaatgaagaaaatacctaattaaaaaaaacaataaaaaagtgattttgctttattaactttagaagatgggtgacatatttagttaaaagtgagattataaaacatgcatagaatgatatgttttgccaatacactcacacacacacacacacacacacacacacacacacacacacacggcactatacatgcatcctcctaactacctttcaagccctgggaagtatatgccatggttctaagtaatggaaaggcaaccagcttcttcttttttttctctttccttacataattactgagtagtagtattcatgcaaatttttacaattgataaaaaaacaacaaaccctagctgggcagtggtggcgcacgcctttaatcccagcacttgggaggcagggcaggaggatttctgagttcgaggccagcctggtctacagagtgagttccaggtctacagatctacagagtgagtatacagagaaaccctgtctcgaaaaaaacaaaaacaaaaacaaaaaaccaaaaaaaccctcaaaacaccctaaaaacacgttttactttaatgagaagaaaactattcaaaggaaaataattacatctaggtgtagcatctcacacgccccggggttaccttgcttagctgactggctggccatgcttattctaactcagacttggaggttccatcatgttttgcatgtaccatggaaacaatgtatgatagaaaattctgcaggcagagtgaatacctttccagaatgaatatgcttcctatgaaactcgaggggaaagagctcctaaggggaaccattgtttggaggtccccgctacattcccagtcttggcgatttatatctaagcccacagccttggggattaaaatcataaatgtgtgccctttcatgttcttgtgctatgtttttgagttcatgcaaaaaaaatgtgttgaaagagaaggatctgagggaggagccattggatggacaatatgtacatgcttgtagttaatcctgtccaatgtgtttagatgtcgtcaacatcgatgagtaatgttcatgccacgcagcacgcacataacatagttgttagccatttttggacatgtggaaccctgattgagttggttcccattgatgctttagtgttggcagcatgcccacaggtttaagttaagccctatgttggccacaggcccacaggtctacagtcatccctgtgttagtctcatgcccacaggtctacaattaagtcctgccagtttctgaggttatttcatggattctgtcattttaacagagcatgtatcttctgctgcaaggaaaatagacaatgaggttttgatcagtcagacaagataacgcatccagtgtttcatttctgagccaccatgttttgttctcagaaaaattcattaaatgacccagctgcctccaagtacccacgcagagacactaggactctatagcccctctctaagcagtaaaatctttaatcactggtacctcttgtaaatggctcttggggcaggtactgaaaattagctgtgtgatgtaggctgtttataagatattggccagttaggagtcctttcgtggagcagaacataacactgactgtgatatcatagagtcattaatgacagtagcgaccaaataggtttgaatgctcaagttctgttatcccgagtaaactgttttagtaggtcaggtttcttctcataaattgtaacactctaaagcattacattttgacttctgatgtgcattttggtgcacacagttccctgttttcagggggttgatcgctctctgagccggtccccgatttctgatcgacgataaaggatcgacgtctttaacagtctgtggggcaatgaactggaagcttgaactaaaaagttcactcacttcctttcttcctcactctctgaagggcggtgctgtctccttcattactctctggtggcatatcttactccaacctagagatagcctgtggctggctgtatatgtaaagccatttgttttgataaccaagaactaggaatttggagtcctggatctgccccggactaatcaagtggcctaaagtcagatagctaatctgtcagaggcagacccaagtttccaaggaacaagcaagctcaaagctctggccttttaccaaagtccaaattattttcctttaaacataatgtcataatttaaatctatttcctaacagatctcttttacttcctgcatctagagtgccaggaaaggactgaggaaaatggctcatccctcgcaccccctctctcctttgcaggctgaatgcatggctgagcacagcgctccctccctccgctgtagtgtgttcagatggtatgggctgtgagtgctctagtcaactcaaccctgcctatggttctgcattacagcattgtactaaactgccctcattacaaagcctagaaggcagagcccttcttttcacatctgtttgtattctgaggtccagtagaatgtcggatgcccacacactgtccatcttcaccgaaaggtactatgtgtagctttcttccttcctgatgaattgcatttgcaagaaccagcttgtgtttggagagctgagttccaggaagtaagagaaaggacagctatgaacacccacccaggtcttacagtgcactcattccagtctggcagggagtgaaggccttggagggtggggggagcattagcaattttagcagagcataaaattgtcctttttctgcctggaaagggacttgtgtcacatgttagggagacattgttggggaaagctcctaaataagtagaatttcagccagtgtgttcatgaacttcaccctcccttggaatgttttcgttttgcaagggggaaatagaggttgagtcatttacacagcaaatgggagcctcaccaaacaggaaaccctgggagatgttttttttttgcttcagtgccttctcaaagcccagtttatgagatctgcagtgccgtcagagacacacattcatgtctggtatcatttctcccattcatcagatggcgctgccagttttcatgaccatgatgagcgttcattgggttgcttatctaccgaggacattggagccttctgcttgcaacagtaatcctctgtgcctgctctgtctccttccccacagtgcatttcaaacagccttctaaccttacacatccttttgtttgtttctgcaaactgcctgctaactgtctgatatcatccttggaaccaaggctgagtgacaagtctaagtgcaggcacgattttggtcccggacagcagagggcagtgttgagccaggaaacaaggtgacctgcctttgcttctgggtctgcttttgtagttcatacataaactcttggtgatgcatttttatatgcatcactgtatgttaaataactcaaaagctgaaggcataatgcttgttttaatatgaccattctctcccatcagaggatcttcagcataaactcattgtaataaatgctttccacactgggcaggacatcaagaagacagttcattttgccataagtcgaaacatctgctaacctattcttcactttctgttttcttctggaattcatctatacatgtagtggtatattcacatgcaggggctggcttgggcatccttctgcaggggacatctgccggtattcctatgatggaagctactgtggtcatgccaacagacctgttatttataacctggtcacccacaggtcttctgggtgggaatttaccttcctattaaagacattatcacattttttaggagaacagtagaatgccagttctaatgggcttatgtcatcatataagctactgattaggtctttagcattgcgaggaatttctatttgtaaaaaccccatgtttggagtttggagtttctcacaaggtcattgttatcatttaaacttatgaggattttatttttacttaaaatatttttcttttattttataataataaatggcatcatgaatctctttcaaagttaaacaaaatgtgtttataagtggactattgttttcagccaggttatataatgatgagcgcatgcgcgcgcgcgcacacacacacacacacacacacacacacacacacacacacacgtatgtacgtacgtcaggaagaaagggagagggaaaaatggagaaaaggaaagagagagggaaggaggggagtgctctgtaatgagaaggtttcattcatcgcctttagtttttgtttagcatattgaaaaacaccgtttttccagagagtggttctttatacaccaaagctatcaagattccttggttaaagccagtttttaggtagtgtaaaatgtttgaggtagttctgttttctctgtgtttagctgcctagttccttgtgctcccccagcccctgcaggattgacatgcactgctgtctggccttccctctgcttggtggcctaatacctgggccttacgctgaagagtggtagcatgagttcatttccaggccggcctcttggttcagttatagacaagctctgtgtgctttgttatgcctttttttaattctcttattctttaaggaaagcaaaggaaaatttgcttggacaaagcacgagtttttccaatggacatgcagtttatgacaacaagcagcggttggggttggacgcgggtgcaggagaggctgtgacaggagaatatgccttagtcataaatggccacagtttggtgagtttgcccgaggctgttcttctctttttctttactccagcaatcatctcttttgtgctgccttaatgagagtctcctttgtgtttttcaaacaaatgtcactacaagagatagggcgtgcacaggatttcctgtttgcagaaggaaagacttccagtgtgcctttcagacatcattgtttgaaggatcgcactggatgtgaggctctggagaaacagttcgcagggagtctatgagttctgcctaaacggttacttccgttgcttcgcagaacggtttaaacgcttttggaagacggtgggggatggcgcagatcagtttttcagttaccgttcttgcgaaggtttgtgatttgcgagtcataacctgaccttcacagaattaccacgccaaatcattgccattaagatacctctggtggtttttctaaatagcaacgttctgcagcaaagccaaacgatttgatttcattaggaaatctggctcttgtcataatagaataaacttgcattgtacttctaacgcagttcaggttccaagccccaaacaaaactcaaccgctcctcctgagtctctaattagaatacaaaagccccgactgcagtctcgtgaaattatcatttctatgtacaaagaacttaatctcacatctttctttggctttggtgctcatttttcactttggagtttggaaaaaatgaacgtttgttcttgaaggcagtttcttagtggacaaaagaagttggagctgagtctattagattcccccttgtgaccgtccgcctgttagctcctagctctctaagcactatccagctggatcccagacgcagcagagtgctgcttccacaccgtggaaagttacagagctcagctgcaggccaagctcagtcaaaaactggtccagatgacatgaacttttcccttgcacagatgaacaccaactgaaagttatgtctgtctgctgagatctggagttgagtggcctgggcagctcggtaggacaggatccctcctgtattatgcttttgacaggcccctgggcttgaggaagcagtgtttgtagggcatgggctttctggtgatagtcacctagcctgtcttttcctctgttgaaagaaggctctaagctggaagctcttcaggagccctgtttgcttcaaagccctgtgctcatgaaaccatgagatgtccttcttcagttagggagaattgtctgtatttttgctagtacagtcaggttttgtttgctttctttttaaatcatagctccagttctctcaaattctgaagcttttctgaatgtatccaggtctgtcttcatcaaaacccaagtctacgtttaacttgttgataataaagaaaaatgagcagaggcaaaaggggccattctgagcaaaagagccagttatatgccttgtctttcagaacatgtggtatatttgagaatgatggtccacagttttctgaggcatatagactttgatatagaatttttctgcaccagagtcacagctttggcctcatttacccacccattgcctcataccattttcattgtttacacagactggccaggtcacagtgctagagagtggccgagaactcagacatgattggagcatagtccttgtttgggagatcacagtatagttctgatagaagtatgacagatactgcaaaagaggcattaatgcaatgcctttagagcacagaaataggcacgtttaattatttgtttaaaaaataaacagaggagactttctggcagagcggatgttattgagtaaaaatgctagcaaatacaaagatataaaggcagtcttttaagtagcaatgcagcctgatgggaattataagaggacctaaaggtgctaccgaacagagcccctgaagatatgcgggccaaactggagtgggctgcgagtgtctcactaagggttcactctaaatagctgttactcaacagcagactcatgttttctctgaatgtgtctaacatagagtacaacgtgagatgtttctagaaatgtaattgtccaaaaaagttaattggagagaatcatgttctcttttcagtaattgctgagggtatagaaaggctcttggtatgtggaacaagggtaggaattggttggggaatcctgactgaggcccaagttgcctgtctccctcctattcaggctcctgatttcagccacagtgttttgctagggacagcctctgctcaggtccttttcatcttgcctatgcgttggcagtcacaaacactaagtctacaaaacagtgcaaaggacactagcagtgtgccatgtagaaatcaccatggttggcagttcatatcagcaggttctagctgttgcttctattgattttcagtagttcctagtagaactttatagtaatatatatatttttttagacagggtttctctgtatagccctggctatcctggaactcattttgtagaccaggctggccttgaactcagaaatctgcctgcctctgcctcccaagtgctcggattaaaggcgtgcgccaccactgcccagtacatagcaagatcttgccaagatggcatggtaacatatcaaggaggcacactgaggacatagctcttatttttatgttaaattcccttgaaacttgccaacagctcagtattcatgtcttgttactgattctgtaaccctgaattgatcaagtaatgaaatggttctgaaatgaagtcagtcaagaaccatgctatttgctttgtaatttacaatcgtcatgtgttctgtttgctttgatgacacaggcccatgcccttgaaagtgatgtcgagaacgatcttttggagctcgcctgtgtgtgtaagactgtggtttgctgcagagtcaccccactccagaaagcccaagtagtagagttggtaaaaaagcacagaaatgctgtgactttggccattggtgatggggccaacgatgtcagcatgattaaaagtaagagggtattttctcaatgagacatactgcacgcatggagtcctgcttcagcctgtgatgcaatgtaatagcaatgttcattcgtttaattttaccatggttcttataaaaattatactttctgggcagcacttacataactactagtacctctaaggcatttctcttcagttaaaacacctgcatatttcttagtttagaaaagggcattgcttgccttctacagtttgagagggagagaccactcagggcaggtaaaagcagccagcgcttcgttcctagcagctggggttggttccatctttgatatttacaagtgtaaagtgcaaatttccaacctttacccagcccagttttctcttagataaaactaggatcaatacttaaccatgtgactagttcaggatatatgtgaaaaaccataataattattatagttatacagttacaaaaaatggctaacataaaagaggaataagtttcttaaagatgctgcaactctttctcatcttcttttccctctaggtgcccacattggcattggcatcagtggtcaggaaggactgcaagcagtcttagccagtgactatgcattggctcagtttagatatctccaacgactgcttcttgttcatggaaggtggtcctactacaggatgtgcaagttcttatgctatttcttctacaagaactttgcgttcacccttgtgcacttctggtttgccttcttctgtggcttctcggcacaggtaagtaaagtgcacccttataattcctcccatgaatggctcccactctccagactgtcttactgataaagaaaagatacttctatgcctgatccaagacagtataaccattcggtgatttgagtgctgatgagctttgaatccaacccacataaaaatagctggaatttttcttatgtatagagtaactaattacagtatcttgcatatcttttagctttttatgaaatgtgttggtttgataacagataagccttatgaagaatttttaatatatatttgtattctttaaaaatctcacacagtcatagtacacccacctcatttgcaattccttccagatctgtttcctctccacctcccaaatttatgtcttaaaaccttatcacttgccaaatccaatttgtgctgcccataaacttgtggatgtagggccattcattggtacatggtcaacctaccggggctcacagacttaaagaaaactgagtttctctccacttgtcagtcatcaacctctaaaagctccttagccaagccgatgggtgggtcatgagcacctctcctgtataggctagagtggtgcctggcctgatctttgcaggcctcatgcaggcaaccacagtccctgtgtgttcattagtgcagggccttgtgtcctgaggagaccggtttctcactggcatcttcctcctttgttctgatctctggctcctatggtctttctgtcccttcttcctctgtagttcctcagggagatgaggcgtgcaatagatgccctatttatggccatgcactctgcagacactctacatttcgatcagttgtgagtttctgtattaagtgtcatccactgcacagagaaacttttttgatgtgttttaaaagctacactacctgatgggtacagagataggaatttagagggtagtatgatattttacaccaaggagaagtggttggtggtcagacattggagccattttgatatcactctggccagttgacattcacctgtggagaatgctgatatcattgaagcaccgtttggcatcctttgatcttgccatgctggctgttgtcaaggcttattgactccacccctgggtaggactatggcatgttctcccttaacagctcacgtaaaaccttcagatattatgggagctaataggcttcaaggccagtttcagcttggttctttcaagtcctttttcagaagtgtgtgttgactctagctatagggtcttcaagtttggaagaccaccaagggtaatggaagctgcctatattattttgacttacctgatctacaactttggtggaaatttcctatgtactagggttttttgtttgtttttttgctagattccatttcatataaactcatgaagaaatattttctaaaattggcagaacacagaaatggattccctgccaccccaatgaggctggatagagcaagaaacattctagggcttgcacttaaccactctaaagatggaaactgaagtccttgtgtgtggtctctgtttcaggggttctgagagctggctgtgagggccactgggaggtggggctggaattggccaggtttgctgtctctcctcactgtttttcccttgattagcaccaagtgtaacgtgctttggcttcccctccaagtcctgttcttctaaggacaatatgttataatgaggcaaatacaaggaaaacaacatgtttggaagagataccaagcagtctatacaggttgataatttatgtcggggggacgttcttgcctccactgaaaccatctagatggctttgctctccattgccatgtgctggaagtggagatttcctcagtgcctaaaacccacctcttttgaagagagctgacagagatgcttttatttccatccggtcttctcccgagtggcctatccgtcaaggtgccttctctgttcagtcctggcagaggagagacttacacacattctcctgcatctttgaatgtttgcttgcttagcagcaattagcttccttccagtttagggcaggtgctctgttggccttctgggccactgcatgaaatggagggagtaattcccactgacagagaactcacagtctgggaatgattttatttggagaaatgtgaaacggatgttaaatcactccaccgtcacatttctcttatttgctcaaccagcttttttttattattaatttttttcataaattatattttgctattttctcctcccccaactcctctcagatctcaattccatacccacccaacttctgttcttcttttcttaaaaacaaacaaacaaacaaaaacaaaaaacccagacaactcctcccagaaaagatccaaaacaaaaaaataaattaaccccccccaaatatagtaagacaaaatgcccaccccttaaaacccagaatgaaataaaaactccacagcaaacagacttggagggttggccaactattcctgggcatggagcctgccctggagtgtggttgatatgcccagtgattctccattgaagaaaactgagttcctctcccagtaggtatcaattgcaaggagcttcttgcttaggggtgggacattatgtccacttcctttttttctgtgttagtattgttgcctggcttgaatatgtgcaaaacttgcgcacactggcacagtctccggaagttcatatgtgtatcattcctgttctgtctggaggacaccaatcactcaccagttttgactctcacaatctttctccctcctcttccacattgagccctgagacttgatgagaaaagttagatgagagtccccgatttaggactgcgtgctgcagtctctcactctctgtgctttgtctgacgtgtgtctgtgttaacccccatctgttttaaaaagcagcttctctgatgagggctgagtgacgcactgacctttgggtacagaaacaggacactaggagacattgtcattatatgtcattatataggttttcttgtaggtctatggcctatccagtctgaagttcttggccacttttgctgtgtcaggtatgggttccatctcacggagtgggcctcaaatctaattttaaacttagatggttttccctctactatccagcaccctcacaccagtatatcttacacagaggttgtttttgtgggtctcaggttttgcagttgggtcatagtgatgaattcccttcctcctcctgaggcatacagagaacattctggctctgtgcatgccagtaggatgaggcttctggttgggccccagcttgactttctgtttgattatatgtaagtggcgtttcagcaataggaccttaccatcatgttgtggagagcaagagtagctgtggcaatgggggtgggggagggtgtctgtggtatccttttggccaatgattcaacaggatgtaaccccttcttggcactagaggttttacatggtggcgtaagatgttttttccagtatatggtaatgacatttaaattctttcatatatgtatgcttttggaaacctgtcttagcattctattgctgtgaagagacaccacgaccaaggcaactcttataaaggaaatcatttcactggggctggcttacagtttcagaggttcagtctatcatcagcatggtgggaagcatggcagcatgcaggcagacatggtgctggagaaagagctgagagttctatatccagatccttccctcggacagcaggaagagagagccacttggtctggttagagaccttgaaaccttaattctcatccccagcatacacttcctccaacaagaccatacctgctaatccctctcaagtagtgccactccctaatgaccaagcattcaaatatatgagccaaggggccagtcctattcaaaccactgcaaagcttctactggaataggtttccatatagttttttcataaggtttagtgagagttattcctctccatattccctccttgacccttctctcctctccccctacttaagcctatttattctggttttccctttatctctccataacactaaattttatttcctcttccttggaaggacccccactcactaccccctgtcctttactaggtacctaaactctctgtttattcagatggtagcaaacttatcaaaagtttaaatactgtcttccatatataagagaaagcactcaatacagttaaagaacttatcttgtgtgtgtctgggaggaggagcccaaggacattggcgcacatgtgcaggtaagagaacaactttcaagaatctgctctctctcgcccaccatgttggtcctggagtnnnnnnnnnnnnnnnnnnnntgttggtcctggagtcaaactcaggtcatcaggcttcggggactagcatctttacccactgagctctcttgatggctctcagactgcatgttgaggtagctcctttgctctgtcagagagtttagaggtagggagtgtaaacttttattttataaataaaataatgtgtccttgggctcctcctcccagacacacacaagataagttctttaactgtattgagtgctttctcttatatatggaagacagtatttaaacttttgataagtttgctaccatctgaataaacagagagttcaggtacctagtaaaggacagggggtagtgagtgggggttcttccaaggaagaggaaataaaatttagtgttatggagagataaaggggaaaccagaataaataggcttaagaagacagtgagttcctcaacgcctggaagtcagtggtggcatggtcaggtgtgccactcttgcccttttagctctgtccactcagcttgaacacgcttccccaggggtcctaccttctagagtcatctggaagcttgattttatcttctgtcaacaagtgctccaactcagctgccaccaagggacaaataaacgtaaggtggctcggtgagatttccagctggattgctggtttaacagagtttagataaaggttggatcatggctcagtctgcagggcatgccttatcctgactcgtgattgcagcctacattattttccttgagtttagtgtgtgtgtgtgtgtgtgtgtgtgtgtgtgtgcgtcccatgttattgttaatagctgtaacttattttaaaagcactcagtccttcgggggttttaataaagatgagttgtccctcccatttgaagctgtgtaagtgttggccctgagtacttgagatgatattttctgatgacaatttatcattgccaggaagatacagagatatgtctctttaaaaaaatccgtgtaatatggaagcaattatcttgtcaaggctggaagaggtttgtcaaataatgtaagaaaatatacagtgagactttggaaagcgatgggagagactgaggctaatcttggggcccgattgtgtcacaggtttggatacccgaggcctgtttccacaaggcaggagattttgtctgcctttgccttccagatgtgtcctgtagaaacccagggacaggctgatgttcagccttggcccttctaccctaacctactaatgaatctctgctaattatacagaccaacaactgaagagctagagctatatacctcctatttatctcccaatgcgttttcttcagcagaaaaaaatgtttttgagagatggaagaagttatacagcttttctctctgcaactcacagcacacatgaggatatacatttctaaaaaggcatcttatgtgttgtttgtcatctatctatctatctatctatctatctatctatctatctatctatcagcagttctggtgcctggttcatgttaggcaaaccaaacccctttatgacattatttgtaacttatcacatgctagactctgaattagtttcttgggctcctggatgaaaaatgactccaggagctgacaggttgataggatggggctgggaaccaggatgtaagtaattacaggtcaatgttatgaagcactgagatgtagtgagtcatggtactaacaaggggcctggaatccagccctggaatgagcctgtgggagaaagactgttgtggtgtttcagtccgtggatgctcttggctttcaaaatgcttcaagctggtgtctatcacctgggaaagtaggtcctaaggtgaatggtggaattcactacaagggatggaagtgggcagatagacaggcatcctaaaagacctgccacctaccccaagctgattcctcaggatcaatcaaagctgagcaggctgaagtcagaggacaggcaccctagctggggactgcaggaaaggggagcggtgcttactggctgggtggggccacagccattgaacaggactttgaacttcgtgaatttaaaggatgatttagtgattgaaggctgtcacagaaagggaggaatctccaagttcctcttctcaaatgactccagcttgcatcaggttgacataaaactaattagcacagatacactgaaaaaatttttcttccttcttgtgtgagagctttcctggggagatacgtgttcactcacaaaagaaatggaacccacaatggaccaaagtaacaattgcagtaatgtccatcctggcgaaccaaccagttttccttggggtcactaacaggagtgtgagtaagggattacttacagggtcagagatgacatacaggtggctgtgtgtgtcagcacaaagccacatggtggcactcatgaaagctgtgaccctagagcactctgcacagcttgcaggcagcatgaatggtctgagtgtctcttttctgctcagttggtcaggctcctcctgctgctgggcctttttactcattttataaagctgggggtggtgggcttctagaaccttccaagtttaagctttttcgaacgtgtaatgctatgtttagctcttgaatttcatgtgtccctccctgcctcactactggggtgcctagagtgctgccggtatactgctcaggagaggcagagcagagtctgtaacaggtggtcctcagtccatgatttcctggagtggaaaacaatggagtctgggactattgctgtggtttctgccattgctggtgtgccactggaagtccagaacaggggaccttggtcaagcttcccctgaagggggaccacaagccaggcagaaaggggaaggcaaagcctgggacagcagtagaacctggtttaattcctgaatgcatgctgagagtatagggggactctttacaatgaagcaacccctaccctttatgatccttgatgaagaggtggttcttgcttgttcaaactgctttatgtgacagctaatgtgaaggcaaatactttactcaaggtaaaacaggagtgcccaggaagggaagctcattggctgacctctcagggcatatctagatacctcattagcaaggagaactccagggttttatgctaagtgacagattgtcatggtcctcttagtggagatttggtagttttttgttccagagcaggtagaggtaggcagataatggctccactcctaccattctgtctgtcctcagcttagtactacaacagtgcttccaataatagacaaggctgcctcaggctcttctgcctgctcttggatcccctttccctacctggactgcctggttgggcttcagtgggacagaatgtcttgctgggactagatgccccaaggtggggtagcttcctctttacttaggtgaagaagaaagggtaatggggagaaagatttgtatttcctgataaatttccatatgagtgatcatgttgaataattactataaataacctagtatttgatgcaaaactatttctgaatacacaatgaaatataaatgaatgaatgctatcaggatggtcattgggtaggagacagaggtccagattttaatgtttgtatatccctataataagagactctgaaagattctctctccacatttctatgacatcaacaaaatggacattttatttctgttctgctagtgggactcatgcaaagattttgtttggtttttgaaaacagagtcttttgtaaaccaggctgacctcaaactcatgatgtagttgagggtaaccaggacccctgtttcctgggtgtggtgattgcaggcctgtagctctacctctgggttatatagtactacaggttaaatccaaggttctacacatactgtgcaagtgttcaaccactgagttgcattgccaacccctatgtaagactatgcatgggagaggatgctttcattgtcttgcttactacatccagtgcagtgagcactgacatctgtgctccctttgctaaaagtccctcatgggaaaagatctggcctgccggtggagagcttgcctccagggagtgcgctgaccccaggactcaggggagatctccattttctctccggtgactgtctaaggtgggagcactcaggagtacacaggctgcagaagtggcagagcagctgggacagggtccttccagcctacatctgcacccaggaggtggggcctttctgcagccctctgtgcactggtcttgccaggagagagctggtttcccaggagtgctgacacaggcttacagactcataggagaaacaagctccagagacagcaagaacatctaacaccagagattaccagatggtgaaaagcaaacacaagaatcttaccaacagaaaccaagactacttggaatcattagaatccagtactcctaccatagcaagttctggataccccaacataccagaaaagcaagatttgggtttaaaatcatatttcatgatgcctgtagaggattttaagaaacataaatagctctctaaaagaaacacaggagaacacagctacacaggtagaagcccttaaagaggaaacacaataatcccttaagtagttacaggaaaacacaaccaaacaggtgaagggattgaacaaaaccatccaggatctaaaaatgtaagtagaaacaataaagaaatcacaaagggagacaactctgaagatagaaaacctagaaagaaatcaggagccataaatgcaagcatcaccaacagaatacaagagatagaagagagaatatcaggtgcagaagattccatagaaaacattgacacaacaaccaaaggaaaggtaaaatgcaaaaagtttctaacccaaaacatccaggaaatccaggacacaatgagatgaccaaacccaaggataataggtatagatgaaaaggaagatttccagcttaaagggccagtaaatatcttcaacaaaattatagaagaaaacttccctaacctaaagaaagagatgcccatgaacatatgagaggcctacagaattccaaatagtttgtaccagaaaagaaattccttccttcacataataatcaaaaccccaaatgcacaaaacgatgaaagaatattaaaagcagtaagggagaaaggccaagtaacatataaaggcagacctattagaattacaccagatttctcaccagagactatgaaagccagaagatcctggacagatgtcatgcagaccctaagagaatacaaatgccagcctaggctactatacccagcaaaactctcaattaccatagatggagaaaccaaagcatttcatgacaaaaccaaattcacacaatatctttccatgaatccaacccttcaaaagataataaagggaaactctaatacaaggaaggaaactacaccctagaaaaagcaagaaagtaatctttcaacaaacctaaaagagatagccacatgaacagaatcccaactctaacaacaaaaataagaagaagcaacaataacttttccttaatatcttttaatatcgatggactcaatttcccaataaaaagacatagaataacagactggttatgtaaacaggacccaacattttgctgcatacagaaaatccacctcagtgacaaagacagacactacctcagagtaaaaggctggaaaacaattttccaagcaaatagtcccccccaaaaaacaagttgaagtagccattctaataccaaataaaattgacttccaacgcaaagttatcaaaaaagacaaggagggggggcatgtcatactcatcaaaggtaaaatcttccaagaggaactctcaattctaaatatctatgctccaaatgcaagggcagccacattcattaaagaaactttagtaaagtttcacattgcacctcacacaataatagtgggagacttcaacaccccactctcatcagtggacagagcatggaaacagaaactaaacagagacatagtgactaacgtaagttatgaaacaaatgaatttaacatacatgtatagaagattttatcctaaaacaaaaggatataccttcttctcagcacctcattgtaccttctccaaaattgaccatataattggtcacaaaacaggcctcaatagatacaagaagataaaaataatcccatgcatcacctcgggctaaggctgattttcagtaactcttcagtaacaacataagtaatagaagttgaacaacactctactcaatgataacttggtcaaagaagaaataaagcgagagattaaagacattttagagtcttatgaaaatgaagccacaacatacccaaacttatgggacacaatgaaagcagtactaagagacaaactcatagctctgagaacctccaaaaagaaactggagagagcatacactagtagcttgacagcacacctgaaagctctagaacaaaaagaagcaaatacacccaagagaattagatgtcagaaaataatcaaacttaggactgaaatcaaacaagtagaaacaaaaagaactatacaaagaatcaaccaaaccaggagctggttctttgagaaaatcaacaagatagataaacccttagccagactcagtaaaggacacaggggcagtatcctaattaacaaaatcagaaattaaaagggaggcataacaacagaaattgaggaaatccaaaaaaatcaacaaatcttactacaaaagcctatactcaacaaaactggaaaacctggatgaaatggacaacttcctagacagatatcaggtaccaaagttaaatcaggatcagattaatgatctaaacagtcccatatcccctaaagaaatagaaacagtgattaataatctcccaaacgaaaaaagcccacgaccagataggtttagtgcagagttctatcagaccttcaaagaagacctaataccaataatcttcaaactattccacaaaatagaaacagaaggtactctaccaaatttgttctatgaagccacaattactctgatacctaaaccacacaaagacccaacaaagaaagagaacttgagaccaatttttcttatgaatattgatgcaaaaatactcaataaaattcttgcaaactgaatccaagaacacatcaaaacaatcatccatcatgatcacataggcttcatcccagggatgcagggataattcaatatatagaaatccatcaacataatccactatataagcaaactaaaagaaaaaaaccacatgatcacctcattagatgctgaaaaagcatttgacaaatccaacaccccttcatgatgagtcttggaaagatcagtaattcaaggcccatacctagacatagtaaaagcaatatacagcaaaccagtagccaatgtcaaactaaatggagagaaacttcaagcaatcccactaaaatcaaggaccagacaaggctgccaactctctctgtacctattaaatatagtacttgaagtcctagccagagcaattagacaaccaaaggagatcaaagggacacaaattggaaaggaagatgtcaaaatatcactatttgccaatgatatgatagtatcatagatagaagtgaccccaaaaattccaccagagaactcctaaacctgataaacaacttcaaaagagtagctggatataaaattaacttaaacaagttagtggccttcctctacataaaggataaacaggctgagaaagaaattggggaaataacacccttcataatagtcacaaaaatataaaatatcttatatcacttatatcactaaataagcaagtgaaaggtctgtatgataagaacatcaagtctctgaagaaggaatttgaagaagatctcagaagatggaaagatcttccacccttatggattggcaggtttaatatagtaaaaatggctatcttggcgaaatcaagatctaccgattcaatgcaatccccatcaaaattccaactgaattcttcacagagttagaaagggcaatttgcaaattcatctggaataacaaaaaacctaagatagcaaaaagtattctcaaccataaaagaatttctgatggaatcaccatccctgacctcaagctgtactacagagcaactgtgataaaaaacaaaaaatgaaaaacaaaaaacaaaaaagaaaaaacccaaaaaaactgcacggtactggtacaatgacagacagttagatcaatagaatagaattgatgacccagaaatgaacccacacacctatggtcacttgatctttgacaaaggagctaaaaccatccaatggaaaaaagacagcattttcaacaaatgatgctggctcaactggcggatatcatgtagaagaatgcgaattgatccattcttatctccttgtacaaagctcaagtctaagtggatcaaggatctccacataaaagcagagacactgaaacctatagaggagaaagtggggaagagtctcgaaaatatgggcacaggggaaaatttcctgaacagaacagcaatggcttgtactgtaagatcaagaatcaaatgggacctcataaaattgcaaagctcctgtaaggcaaaggacactgtcaataagacaaaaaagcaaccaacagattgggaaaagatctttaccaatcctaaatccaatagagggctaatattcaatatatacaaagaactcaagaagctagactccagagaaacaaacaactctattaaaaatggggtatagagctaaacaaagaattctcaactgaggaatactgaatggctgagaagcacctaaaaaaatgttcaacatccttagtcatcagggaaatgcaaatcaaaagaaccctgagattctacctcactccagtcagaatagctaatatcaaaaactcagatgacagtagatgttagagaggatgtggagaaagaggaacactcctccattactggtgggattgctagctggtacaacttctctggaaatcagtttggcagttcctcagaaaattggacatagtactacctgaggacccagcaataccaatcctgggcatatatccagaagatgctccaacatgtaataaggacacatgctccactatgttcatagcagccttatttataagccagaaactggaaagaacccagatgtccctcaacagaggaatggatacagaaaatgtggtatatttacacaatggagtactatgtagctattaaaaacaacgaatttatgaaattcttaggcaaatgaatgaatctggaggatatcattctgagtgaggtaacccaatcacaaaacaacatacatgatatgcactcactgataagtggatattaacccagaagcttcgagtacccaagatacaattcgtaaaacacatgaaactcaagaaggaagaacaaagtgtggatatttggatccttcttagaagggggaacaaaatacccattgaagtagttacagagacaaagtgtgtagcagagactgaagaccatccagagactgccccacctgggaatccatcccatatacaaccaccaaattcagatactattgtggatgccaagaagagcttgctgacaggagcctgatatacttgtctcctgagaggctctgttggtacctgacaaatacagaagtggatgcacacagacatccgttgtattgagcacagggtccccaatgaagaagctagagaaaatatccaaggagctgaaggggtttgcagccaataggaagaacaacaatatgacctaaccagtacccccagagctcctagggactaaaccaccaaccaaagaaaacacatggtgggacccatggctccagccacttatgtagcagaggatggccttgtcattcatcaatgggaggagaggcccttggtcctgtgaaggttctatgccccagtataggggaatgccagggccaggaagtaagaatgggttggtcagcagtgggagggaggaggaaatagggtttttttttttttttttttttttttttgggagaagaaaccaggaaaggggataacatttggaatgtaaataaagaaaagatctaattaaaaaaaaaagaaagaaacaatctgaatataatataggagtaacatgctcatttttttttctgggaatactttagtggattcatcatgtgtttgaacttgtaataagccattaaaaacttggagaatgccatggtaagccactacaagagtctggtgtctcccatgtgtctggtattgtgtgttgctctagtatgctgcctgtattatctcatctcaccctgactgacacacagtgcggaggatatgatacccctgcagagatgagatagagctgaccatgctaatgaatgcctttaaccccagctcatgagagccagattcaggagaatagcttcaagtctgagtccagcctgggccccctgtcttaaaaacagcaagaaacaaatcaagcaaaaaacaaaaatacctggagataaggaggcaggagttagagaggccacaggcctggatcagggccaggctcatatctctgcccttgacctctaagttacttagccctgacagctgacaatgaatgttttcactctgtggacggtgtttctcatggacatctctttatcccttcttttcagactgtctacgaccagtggttcatcactctttttaacattgtttacacctcactacccgttttagccatgggaatgtttgaccaggtatgtggtttttgctgtatttgttgctttctttctctgttgacttcttcagctgtggccagctagcttttaagtagaaggctgatcatgggaagattcccaggaatgcagtttttaaaagaagtgttacatgggtcacaaggccttctgggtcccttaccttgcccgctgcttctgcagaaaggttctccatccaagtttgcctcttctgttctgaggaacttacatcttgctgtgctgatttaaggtcctgggaagtcatgcatgaacttttcccctttcatttgagtccagcatttctcaaatttctgtgatttgaatcttttaaaaaatgtcgtagtttaaattaattttttaagaatttcataaacacatacaatgtattatgttcacatttactgcccccaactcctacgtcttcccagatctatcccaacacccccactaaccctcttaactctagatccccccctctttttaatgacccacagaatccaaattgtcccacctatgtatatgtggatgtgtggccacccagtggagcagggttgacataccagggacagcattatcaaacagtggctctccctaccttagtagtcatcagctgccatcatgaacccctatcctatccaatctgaaaaggtggctggcttgatcttgtacagaaaaccacagtcactgtgagttcactagggcagagaccataccatgtgcagaagaagctgttttctccacccttccccttgccctgatctctggctcttacaggattcaaccccctcttttgggacagtccctgagccttagaacaagacatgtgatactgagattcccatttatggcggcctgaagcctactgtagacattatcctttgtgctttgaccagttgtgagtttctgtattaaacatcatccacttcacaaagaagcctctctcatgaggactgggacgtgtatgaatccatggatatagaagtgcatgtttagagaccagtttgatactgtctgtgtccatttatcaaaataaaattagtaggttcaccccccgcccccccaggactgatgagcgtaccagctgtgggctattagacagatgtactgttccaacatgaggtgccgcccctggaccagaccttatccaatcaggaagtatttagttacttttatggcatatgtgttcctgttgtacccatgggtgtatcttgccaggctgttgttgcagcttgagggtttcacaacccggtaagactgttgacgactttcctcctttggtggcctgcggagaatcttctggaaatatgagtgttagcctgcagggaggaatcgtcctggtcggaaccagcttgatttttccatgttcaatgaccaaaatgtgtggtgtcttcagcaataggatctcacccacaaggttgtggagggggtggagtcaaccaagaacaatggcaatattttattctgggcttctctaggatactcctgaccaacaattccatgggaggtatcccaggcctattacttggatctttatttgccaacttagggtttttgggagaagtattattccctaagaagggtaattctaagtgtgtgtgtttctctccctcggccccctctctctgtataaagcttgtaaaacaataggtttctatatggcttaaaactgtcctagcgttagacacccctcttcccaccctctcctctgcccaccctcccatcccttctcctcttagacttccctctccatcactcctcttctcccttcacattacttgtatttcactatcctacctccttaagatcgctcttcctccaccaagggctcctctccagtttcctggcttcaacagttactacaggctaaacacacaaatcgaaagagtcaatgttgggacccacaggtctttcgcttccttatgtaactctacctttcctgttcccccctttcctcccattaaatgttagatcatagcttccgtagctttccccagctctgatcaggtcacactgaccctgcagtctgtcaagagttgacgggtgacttgtgtgattcttaaagcacacacacttggtgggggcgaggagggggtgttgggggtagctttcttcttctgctgcccaggacaaagacaactttgaaatatgtctgctttccaaatagtgcaatatggaaattcctgccatatccttgagagtctatagcagttaaacacaacacaacaacaaacaaacaaacaaacctaccaaccaaccctatgttcaggagactttaaggcctctcttttagctttgcatcatgctagccatggtggctgaatgaaaatgagggcatgactgctccaaggtgtggtcgaggagaagggttttattgtcaatatgagggagagaacagccagagaggcatctgggagactccagactgaactgggtcatggaggtgcgttgagggaaagcaagagggtgggggagcacatggctgaaatgccaggtttgtttcggtacgagaagctgtgggaaaggaagcaaagccccggggctggagaagttgaaggtaggacagtatgagaagttctgggaggagccacaggtactgagggagccttgttctgggttcctttgaggcctgacagtggctaatgctctcccggttggttcaagttttgtcctttccccttccagcatagttaacaaggctctttcttcgaatgaggcttattctgaaggccactctctgtctggtcctttcacgaagctgttgctctagcttcaaccatcaaaatgcctctgaattcacgcacttcgtggggaggtgccatgttagcctctggcaggtggagagaaccatgcagggttaaggaaaaatgggcagcacataaactgtcagcacggacagtggagcctcgttggccagcgcagagcagaaaagaatcccagagcgctgagcggcccatcttagggaggcaagcacacacaagccctcggtcatggagaggaagaacatggccttttgtctagtgtttatgtgtgtgagacagaagggggagagatcagttacaagagtggcgcttcatggtccactctggtttggaacgcactttctggcaaagggggaagtctggctgcctctggggaagtggagacctagccagcagagttttccatggcacaactaaagtgtagtgctttttgaaagttttttttttttcttttaaagtatttttgagaccagcttttctccgatctgttattagagctgtttactaggctccgtcttctggcccaaagctatctgttgcacaatacccatcctcgcactgcgaggtcactccctcctccattctctctactttgtagttggttccgagtctcctgtccatatgtaaaagaggggcatctgcacaaagcaccaaacttcaaaagaccttagacgtaaaggattaagcacatgctattccaagtgctggtgtttacaagtgtttcttttcctggtgctttgtagctgcccacaatgtggaatcaaatagtaaaaataaagcagttctgggaaaaaaaaaagccaaaacagttattgtgcaatttgaaaaaaagcaaagcaaaacaaagcacaaggagcctccttattgccatcgagttgaatggctgctctgctcttttcttggtttgtctgccttggcctttaagctgatggcagagtcacgggtgctgggctagacagccccagggactatctgtggtgtcactcattttgtctgagggtgagcaagccctgggaggttctatctagacccagataggccagccagtctgccagtctgtggcagaactaagaccaccacacactcacttgagtttggattgctacattttatgaccattattattgttttattcgtgttatgttagcatagattattggctgtttaatatgaggaaagaacatggcagaaacatctcttgaccatctatcacagctctgtgtctctgtgatggaggcattaccatttgcatttcggcagatgaagaaaccaagactcaggttaaaaaacaacactacactgccaaatcaatctgttgccagactgtgtgcttttaaagcctgtgcagataaagacaccagccaccaggacagggagaaggcacactcatatccaacagtttctccaggaaggacttctttctttaagaacgtatcgggtttcacagaatcccgttctatacagtctaagcgacaaagatgagggagaaatggactttctccagaagtccccatctatggctgccacttgtccacctgtggtcttctgttgtttgtttgttttgtattgtttcattttggtattttaaaatagtttctttgtgtagtctaggctgtcccagaactagctctgtagactaggctggcttcgaactcaaaagatccaccgaccctgcctccgagtgtagggattaaaggcatgcaccaccactgcctggctgctcttctgttttggtccagtctccgtcctttgggtattggcccttggttttggtgctcacaatgtggacattgacatcactttgcagctagccagaaatgcagactctgcttcattgactcatatgttcattaaactttagaaaactcagttaagtcttttttctagaacttgtgtggctgctaaatgtggagcctcttattctgtctggttctgtcccctgagctgttggcatttactactgaattctcactgggtaaatccctcagacactaagcgagcgttcaggctcagccctcttccccactttgaacatcacgtgctcttcctcccgtctctcattgttcctgctcgcctcatccccaaattgccaattctagctcctcagctctctgcatccatctccaggtcactaccacacaccccattagcaatttccttctggtccatgactatacataaatgtgctggaatcctggagcttgaatctttccaagatggcatcagtcacagccatcttttctctacatctgggatgtagatgtagagaaaagattttatttgagttgaaataggtgcattgaagttcagtcaagtcctagctctgctatagactggtgtgacctctcctctgtctctcttggggatgaaagcctctgcatagcaaactggggattgtttataatagggtgggttcttctgggaataaaaaccagataatgtcttgtttcttcccagggactagtaggtaacagagcatgcttacaacgaccttgtctatttctagggataggggatacagggcttctctgactcttccccaacactccttctctgaaattacactctgtttccaggacataaatgaacagaacagcatggactatcctcagctctacgaacctggacaactgaatctcctttttaacaagcgcagatttttcatctgtgtggcacatggaatctacacctcattagcccttttcttcattccctacggggccttttacaatgtggctgcagaggacgggcaacacattgctgacctccagtcctttgcagttaccgtggccacatcattggtcattgtggtcagcatacaggtaaccctgttccttaaagcacttctgctttggtttacataagtcgaagttcactgtcagctgatttggcttcttaagggagaaatgcgtgtgtgtgtgtgtgtgtgtgtgtgtgtgtgtgtgtgtgtgtttgtatttatgtgcagatgcactcacctttgtccatgcaggaggaggccagaagctgtgctctgccatcatttctctaccttattttttggggatagggcatctcaccaaacctggagcccccatttcaactagattgtctatgtgctgagcccctgtgatctgccatctctgcccacccagcactggggatacacgtctgggtttttacacaagtgctagggatctactcccagattcagatcctcttgcacacacagcaagtactttatccactaggccattgctccagccccaggattttcttgaaatgaagtcaataatctttaataaataacaagatgtgatgaattagtattaggagtttataacgtctgtgtttatagaaccacagcaatctcttatttaagttgggtattgtgtataaagaaaagtgattagggactgactggaggtgtggctcagtggtagagtgattgtccactgtgctcaaggccatgggttcaaggctaagtactgaaaaactagtagcccaacagagtgacacatgcctgttttcccagcactaagagactggagcaggaggattgctcaaagctgggctactgtctaagaccctgtctcacactgtatataaaagaaaaataataacaataaaaaagccatacttctattcccttcttgtgtttgaagaggaagcatttccaagaataacaaatgtttcctagaatttcagacttaataagtcccaggttttaaagtgacagctagaacttatttggcaatacacttttgatcattcaagaggctcaaatggcccatcaagaagacacttctgagtggggagtcctccatgttctgggctgggctttgaattgttttctagtgcagttctggttagattctggtgaattaggattcctgagaacatctggtccattaacacctgcagcacctgactgatgtggtgggtgatctgacctctgtggtttgtttttcattattgagcaaattgttacgaacaagaggacatcgttgtcaaaagttacagtcgtaagtggccatttcttgagtattgggtaaatgagggagatgataaaagggaattttctttctactgatccaatcataaaaaagagtttgtcagggtgtgtccaaccattagaaaaagaataactaaaactgacttgtttttttcagattatatctgcagtcttcagacacatccatgactagttttcaaatagtctgagaagcagtttcctgggctgaacctaggacaacaactgatttagctgtgggctgtggtctctcatgaggttctgaagtcttcaatagcaaagccctgtaggggagactcacacagaactccagctataagtgttcgtataggaaatttggaaagagcagaaaagtacagagaaaaatgaatattcacccacagtttccatagtgatgttaacgtagcaaaaataagagaaatcaaatttgtgtaattttatagctttgtttctctctgaactttgtctcatgtgtatgtatcttgttttaggattattctccaaaatgtcccttttcacagttgcaatgctttagcgtacaacatgccacaattcatcaaccaggacacaccgttagactgcttctcttcttttcactttaaacagtagtaaactttcgtaaagtctaattctagatgcttctttattgccttcaagtgcgttctttattggtgtttcatttggttgtatatttgagacagggcctcactgtctaccttgaaactcactatatagaccagactggccctaactcacagagatccacctgcctctgactctcctgtgtgctgtggcatcatgcctgggcaggctgtattcttcaaaggaaaattctgagtccaaggagatatggacgtttgatgttctttttatctcattgcaaacatcttcccaaatggattattttcagctgctgaatataaaataccctccttagccaggccttcatggataacaaattgttactctgaattagttcacaataaatccacagctttcggttgcctgggaaacaattgatgtgcatacacacacacacacacacacacacacacacacacacacacacacacacacacacacaaatcaagttcacaatttaagcaggttaattttaaaaggatgttatcctttgaaacaattgtagagtttcagaagtgttgacattgcagaggcagtgcctgtgtctgctcagcctgacttgttatgtgtgggactacacatgaccacgaggtacctgtgatggttacaagaaatgatcatggatacagaattatcccttaagctgtaggtgtggctcagacttctgtaacttatctgttagtaacttcctctattccagtgttcaacacagggattccacagggtagtgctgtcatgtcgctgtagtctctgacccctgatggctttgtggccatccttcatctgtgataactttgaggaatagtggtcagatcatttgtaaatgctctgcagtttgcattgtctgatgtttccttgacaggaaataggctgtggacttacagggagaatcatnnnnnnnnnnnnnnnnnnnncttctgtgtttgctgggccccggcatagtctcacaagtatacagctacatctgcgtcctttcaataaaatcttgctagtgtatgcaatggtgtcagcgtttggatgctgattatggggtggatccctggatatggcagtctctacatggtccatcctttcatctcagctccaaactccgtctctgtaactccttccatgggtgttttgttcccaaatctaaggaggggcatagtgtccacattcaagtgcgttctttattggtgtttcatttggttgtatgtttgagacagggtctcactgtcttccttgaaactcactatatagaccagactgaccctaactcacagagatccacctgcctctgactctgactctcatgtgtgctgtggcatcatgcctgggcaggctgtattcttcaaaggaaaattctgagtccaaggagatatggacgtttgatgttctttttaactcattgcaaacatcttcccaaatggattattttcagctgctgaatataaaataccctccttagccaggccttcatggataacaaattgttactctgaattagttcacaataaatccacagctttcggttgcctgggaaacaattgatgtgcatacacacacacacacacacacacacacacacacacacacacacaaatcaagttcacaatttaagcaggttaattttaaaaggatgttatcctttgaaacaattgtagagtttcagaagtgttgacattgcagaggcagtgcctgtgtctgctcagcctgacttgttatgtgtgggactacacatgaccacgaggtacctgtgatggttacaagaaatgatcatggatacagaattatcccttaagctgtaggtgtggctcagacttctgtaacttatctgttagtaacttcctctattccagtgttcaacacaggattccacagggtagtgctgtcatgtcgctgtagtctctgacccctgatggctttgtggccatccttcatctgtgataactttgaggaatagtggtcagatcatttgtaaatgctctgcagtttgcattgtctgatgtttccttgacaggaaataggctgtggacttacagggagaatcataacgaggtgtccttcatgtttcttcctccctctaagagcacagtcactctgtatctgggagtgccatgtgtacacatcacattctccttggatatctgtcagttgatgaacgtctgggctgattccattttcagcctgggaagttgtactgtagcatgcagggtccaagcactaggcaagactgttgtttcactcagaagtctacagagtgtcactatataagctaactagcagggaggaaggtccccagttagttagaaattgacttctgtatgtactgccatcaaagtgcgtggtgttttcaacaatagggttttatcatctaataatggtggtcagccaagagcagcggtgatagtctggttgtttggggggaacctctgaagacaccttagccaatacctcacagggtgtgtttcatgtatgacactgagatttttgtttagtaatccatgtcttttgggaacaacactgtccacccacacagggcatccctatccaatctcctctttaacctgttcccccatctcctgtcacgccacatgcattcccttccccctttcgtgaacattttctaggtttttgatgcttatagacaccctaaataaaacatacaaatctaaaactgcaaagctaggattcacatttgaaagagcaagcagccattgtctttctgggcctggattcttaccgagtctaatattttccagttatgtctattttcgtacagattttatggtttcatctttctttacaacttagcataactccattgtttatatgtaccacgttttcattatttcttcactggttgatggacatctaggctgtttccatgtcctgctgttgtgactagggcagcaacattcacagctgtccaggtacccctgcggtaggatgtggactctttgggtatatgcgcagaagtagtacatacagatcaaatagcttcacttctagttttcttgcacaactaccacactgatttccatagtaatgacaccagtttacactcctactaacactgaataaggtgtcccccttcctgtgatcctcagtagcctttgttgacatctgctttgttgatcttagctattctcaatggggtgagctggaaactgggagtattttaatgataaccaaacattttacagtcttgttctagatctttcttcatccacctcgaatgaaacaagattggaactttttttcttctagttttttaacttatttttttctttgtattgaaatagattttttccctcacacaatatatctggattacagtttcctgtcctgcaactcctcccagttcctccccatctctcctcccgtctggatccacctccttgtctctcattagaaaacagacttttgagagaatatcatatcatatcatatcatatcatatcatatcatgtcatgtcatgtcatgtcatgtcatatcatatcatatcatgtcatatgataaaacaaaaacagatcagagctgtattcatgtgtatgtcaatcatgttgatttagaaggccttgtttccttggtgtcctccagccactctgggctgtacactctttcttccttcttttccaaagggctccctgaaccctgaggggaagaatttgatgacgtcattccatttggtcaagtgttcccaggtctttcacactcatgtctgctgtgggtctctgtgtttattctcatctgctgcagggggggagcttctctgatgctggctgagcaagccctgctatatgaggatggcagaatgtcattaggagtcgtgttattgctactttttagctcttctataatagtggtatttggttttaccctacgtctcagtgctatctagtctcaagcagtgtcaggtgtgggttccatcttgtggagtgggtcttaagtcaaagcagatattggttggttgttcccacaagctgtgtgtcatcatttcactagcatatcttgtagcaggacactattgtagggtctgtggctgggcccgtggtttgaggctgttgtgatttttcttttttccctctgtctttactctcatcctcaattctggcttataaatgacggcatgttttgtttcagaatgctactgactgatactcctttaacataggttctgaagttggttcagaaagagtagttggatgttaaaatttgagcttaaacatcctttatctttgtatttaaacactatattaagtgagaataagactcatcagctagagctcctcctgccccatcaccgccccttgtcaactttattgctacatttctatagcccagtttcactgtggtagatagatgttggctgattctttttatattcggatagtgccttcttgatctaaaagcttatgttctttataagaacaccaccagaatgtgatttgtttttttttaactgatttgtcagggatttgaacggtcctctcagtctgaaaatctaggctactgttggctgaggacaattttcttttagcatacctttgatcggcacatctttatctaccctttattttgttcaaaaatccaagtaactgtaattgggcttatgactcagatagctacagattcacaaaggtttctcggcctgtgctccctgttgttggcacttgtttgttccaggatacacaggcagctctcaccagtggggatttccctttggtttttctgtttcatgctttaacatcacaagtgggttttatcctcagggttgtttgtgtccccttaggaagtcccctgctgcttagcggtccccctagagcttctcagtcacactgattggttctgtttcaaggggagaaacccactcttttagcagggccctcattttaaaatgtggattatgatttcttttccttcttataacatggaccaggctattttcttttgcaggtgatgaaatgacaggtggtggaagaaagaatttcaggtttgggtttactgtcctggttgcccaatacattagataattagcaggtcttgaccaggatggactgcagggctgtcttcaggtgtaacggtcctggagttcattatcttctgcttctagtgtctttagtgctcacttcaacactttggagggtagcaaactacagtgggaatagaacatatttctgtgtctacagagggatgtatttatgctgcagatagagtaggggtctacagtcctttacctgcatgtctcctgaggcttctgaggtgtaaattgcattacagctgccacacaagatacaggaagggaaaaagggatgggggacacattcccacaccacacagattgtatgataaaaagtcagagattcttcttttctgtgacttgagaaatacaagaaaggggtcataggaatgagttgggatggttatatcaaaatatcacataaaattattaaataataaaactcttgacagttccccttctgaggctgttttaaccttggcagatatagttgcccatatacctaagtgctggacacttgtctagcactggccatttgggtgtgtacagaagtggaggtgtgtggttggtccagtaatcttcgtgttccagagcaatcctggaggcaagcttctgtgtacaccatctttttttttttatgtctaaaaggcctctcttttggcatttgactttatttgcagatagccttggacacgagttactggactgtggttaatcacgtcttcatctggggcagtgttgccacctatttctccattttactggccatgcacagtgatggtgtctttggaatcttcccacgccatttcccctttgttggtaagtgatccttcctgttgtgaggccttgtgacacactcaaagtcctttgcctctatgacttgtttttgtgtcatgtggggctagaaatggtcagcactctttttttctaggagttgattggttcacccgaagacttccagacatgaaagaggttctaagagactgcttttttttccttgccggatagatcttatagcctcccttggttaagatgcagtaggctgttctctagaagacaagggtcattgcatgtgtatttacagcatgagaaaagttgttttttattctaaaacagggaaggggaaaagccagctctccttataccaggttaccaccagcatatctgccagagttctacagacatcatctgcatttagatgaaagagaagtgattcataagttagcgctttctacagatttctgagcatccttctagaagtggccagaagactggatagatataagggtttaaaggccagctccaccacttaacaaattgtgtggtgttgaacaaattttctttcctttccatgatttaatatttatctattaactgggttattaatcgttcctattttcaatagaaaaaagtgaagataaatgagttattacatatagagcattgggatggatcctggttaaataaacactgactctgatgagagttgagtgtttgtcttggttagggttcccattgctgtgacaaaacaccatgtcaaaaggcaaatggaggaggaaagggtttatttcatcttacatatcctgaccatagtccattatgaagggaggtcaggggcagaggctcaagtcaggaacctagaagcaggaactgatgcagaggccatgaaggagcataacttactgacttgctcaccatagcttgctcagtctacttacttatagcaccccagatgactataagatataagtggcaccatccacaatgggctgggtcctccaatatcaatcattaattaagcctgataaacagcttcaatgaagtagctggatataaaattaactcaaacaagtcaatggcctttctgtacacaaaggataaataggctgagaaagaaataagggaaacaacactcttctcaatagtcacaaataatataaaataccttggtgtgactctaactaaggaagtgaaagatctgtataataaaaaacttcaagtctctgaagaaagaaattaaagaagatctcagaagatggaaagatctcccatgctcatggattggcaggatcaacattataaaaatggctatcttgccaaaagcaatctacagattcagtgcaatccccatcaaaattccaactcaattcttcaacaaattagaaagagcaatctgcaaattcatctggaataacaaaaaacctaggatagcaaaaactcttctcaaggataaaagaacttctggtggaataaccatgcctgacctaaagctgtagtacagagcaattgtgataaaaactgcatggtactggtataatgacagacaagtagaccaatggaacagaattgaagacccagagatgaacccacacacctatggtcacttgatctttgacaagggagctaaaaccatccagtggaaaaaagacagcattttcaacaaatggtgctggcacaactggcggttatcatgtagaagaatgtgaattgatccattcctatctccttgtactaaggtcaaatctaagtggatcaaggaactccacataaaaccagagacactgaaacttatagaggagaaagtggggaaaagccttgaagatatgggtacaggggaaaagttcctgaatagaacagcaatggcttgtgcagtaagatcgagaatcgataaatgggacctcataaaattgcaaagcttctgcaaggcaaaagacaccgttaataagacaaaagggccaccaacagattgggaaaggatctttacctatcctaaatcagataggggactaatatccaatatataaaaagaactcaagaaggtggactccagaaaatcaaataaccccattaaaaaatggggctcagagctgaacaaagaattctcagctgaggaataccgaatggcagagaagcacctgaaaaaatgttcaacatttttaatcatcagggaaatataaatcaaaacaaccctgagattccacctcacaccagccagaatggctaagataaaaaattcaggtgacagcagatgctggcaaggatgtggagaaagaggaacattcctccattgttgatggaattgcaagcttgtacaaccactctggaaatcagtctggctgttcctcagaaaattggacatagtactaccagaggatcctgcaatacctctcctgggcatatatccagaagaggtcccaactggtaagaaggacacatgctccactatgttcatagaagccttatttataatagccagaagctggaaagaacccagatgcccctcaacagaggaatggatacagaaaatgtggtacatttacacaatggagtacgactcagctattaaaaagaatgaatttatgaaattcctaggcaaatggatggacctggagggcataatcctgagtgaggtaacccaatcacaaaggaactcatacaatatgtactcactgataagtggatattagcccagaaacttaggatacccaagatataagatacaatttgctaaacacatgaaactcaagaaaaacgaagaccaaagtgtggacactttgccccttcttagaattgggagcaaaaaattggaaggagttacagagacaaagtttggagctgtgacgaaaggatggaccatctagagactgccgtatctggggatccatcccataatcagcttccaaaagctgacaccattgcacacactagcaagattttgctgaaaggacccagatagagctctctcttgtgagactatgctggggcctagcaaacacagaagtggatgttcaaagtcagctattggatggatcacagtgcccccaatggaggagctagagacaatacccaaggagctaaagggatctgcaaccctataggtggaaaaacattatgaactaaccagtgccccggagctcttgactctagctgcatatgtatcaaaagacggcctagttggccatcactggaaagagaggcccattggacttgcaaactttatattccccagtacagtggaatgccagggccaaaaagggggagtgggtgggtaggggagtgggggggaggatatgcgggacttttgggatagcattggaaatgtaaatgaggaaaatacctaataaaaatatttaaaaaaagaaaaaagaaaatggactgtacacttgtccacaggccaagcttatagagagtcctccctcccaaataactctagcttctgtcaggtttacataaaacaagtcaaccacagtattattatgcaagaaattgtgacttgactatgggggcatcatgggagaattcggatgtctgatggggtatcaaggaacccctaaaatttcttaaagtcttgaagttacatttaataaaggggatacatccagtgttcctgtgttaaggtccatgcttcaaaatgagtctgccaccatcactgactcgtacacaagaaccattaatacactttccaagaagtttggaggatcnnnnnnnnnnnnnnnnnnnnnnnnnnnnnnnnnnnnnnnnnnnnnnnnnnnnnnnnnnnnnnnnnnnnnnnnnnnnnnnnnnnnnnnnnnnnnnnnnnnnnnnnnnnnnnnntttgaagtggtggtcttcacaggggcctggcttctgtttccatccagctgtgtgcgtaagtgtggggacactgtttttcaactttgtccattccttcacatacagtaactgcttcaaatcctaacaatcttgcttagtacaccacattaatactttgtttaccaaaagattccaaccatgtagaggcatgttggttagtcatcagaacatgccagttaggaaaggaaggctcaagaactgtttttaaatttcagtttatttatttacttttgtgttaccaaatgttcgagatttggtgcatttctagtctatgttagaccattctaacatgtgaaatgggactgcttcccctggagattgtagtttgtgtgtggactaatcctttcaatttaagcatatgccatcccatgaattaattaattactaagatccaatgaaagtttacaaaagttagattaacattggagttttcttaaagaaagagagagagagagagagagagagagagagaaagggagaaagggagaaagggagaaagggagaaagagaaagagagaaagaaacaaaaagaaaaaaagaaatgtttttttccttagtaaccaggagcagggagtggcgtggctttaaaatgaagcctgtttttctcaaagttgtctgtgggtaatgagcttcaaggagcttaaaaagacatttaattgattgaatcaagtttgtttctgcccttggcttacaacaactggagttggctgctctttggtagacagatttactttccaaagctagaaaaagcagacataccaatcagttgccaaactcttatacccaaagcccatttgaatgctgttaacacgggtacactgggatgcaggcctggctggttgaaggtatcacgatgaatccctagaaaatgaacaggggcagggatggtgtagtcccacgaaatctgcctgcctccctttgcttccatgattagacaaacaataaatatgtgagaaatgagggtaaagtctggaagctggctccaggcttggcagtgagtttctctggcctgccctctctcatgttgggtagctgactcagtgttcacaggggaactcttctcatcaaactaggagcctccaggatctcctcagatctttagttcagaaccaagggagcatcaaaaaaatagcaacttccttttgaggcagcttttctgggctggtgcctagaatttcaaaggttacccttgtgctagatgtggcgtttccttatgacacaggcagtcagtgaggtcgttgtttgcgaataggcctgcatcaaatcattgatcaggaacaactctaaattggtcatggatcgtaaggttgaaagaaaggaacccagcaaagctggaaggagtctaggtgagggaacgccccatcaggttagcacttccccgggctttcctaatcgtgtcaaagatttgtctttaaatgcagatagttatcagtttgattcataaccactaactatagctgtaaattaatttttgtaattattgagattttatggtgatttggagttttatagccaggatgtctatgtctctaatggcaggaaatgcacggcactccctgagccagaagtttgtctggcttgtggttctcttgacagcagtgacgtcagtcatgccagtggtggtggtcagatttctgaagatgtatttatacccaagcctgagtgatcaggtatgtttgagatactgtgagtacttgaaggatggctggtggctttcatgaatgacgtccttctctttccaaacagaggcacaggaatgactaagggaattttcctaggtccatggtatcataatagagtagatgattctctcccccaacacgcatcttgaccatactagtcctgaatgtcagtgaaaagagttggattgggctatcagtgggtatggagtgatggattagaagtacttttacccctgactcactggaatcattttggagtattactgtaagagaagggcaagctaccgggaaagctaagggtaccgtatagggaatctggacaaatgatgtgaaagggtctcatcatttggatggaaatagagtattggcttgggaaataagtgagacctgttacctgaggagcagagactaaaagggaacagcagatcgctgagtgcactgggaatgcagagatagaagaacaacagaaagagcggggtatatagagaagcctggaccagagattagaatagatctcaatggctcctaggagacaggacaaacacagcagtgctgggctaggctgagactcatggcagagagaagagaaggagagggagacacattttatcatcccacaaagaatgataacatttgtttgtagggtgagggaggccagaccagtgaggcccagggctctgagcttttcttaccatcatgtttctcacattctggggcatgtgagtcacagaatccccgtgtcggtccttttgagttggttctgagctgaatccatcccataaactgatgggcaatctgaggatgcccatttttcttgtgctaaggataaatgtcatattttgcttagtgagcatcctcagacctgaaaattagaatggatcacttacttaggcaaagcctctggtttccactcactttcctagggagagggaaggcacattgggacctacccaagtgatgtttaggtcttatttatttatttatttatttatttatttatttatttatttgagagctgttgttgaacgttgatgggtacatataccctgtcaggtttcgggacattacctagaagcaggaatctgttcctctgggtccttctgcaccccccccccccacaatgttttcctgagcctctgattttggggctgtgctggagatgttgtttaaaaagcaacaccttcatatttgtaaattacatacacacagagacatatgcagagatacacatacagacataaacacacacacacacacagacacacacacagagacatacacagagatacacatacagacataaacacacagactcacagacacagacagacagacatacacagagatacacatacagacataaacacacagactcacagatacacacagacacacagacatacacagtgatacacatacagacataaacacacagacacacagacatacacagacacacacacacagacacacagacatacacagaggtacacatacagacataaacacacagacacacacagacagacagacagacagacagaaaaacagacagacagacatagacacacacacacacacacacacaccccaaaccagaataaatgaaaagctcagaagtctcatgataagatgaccttccttaagagggagagcattctgagtctaatttctgaaaatttctcctaattcagttactagtgactgcaagatctagagagcctctaaaagggaaagagaggtgaaagacggggtattgggactatagacataacattctatacaaaagtatgctcaagatcccgggctctgttcccaacactgttactaaaacaaaacaaccccctgaccccccaactcaccatatggcccatgaaattgagtcagtaatgaattttatcagaatgtttcttgtttacacgagaaacttttggtagggaaaaaattgattagtgtctagtgtcctctttgaggtggagaatgttatggctttaggcttaacgtttccttttggagtaaagacaaagattctcttgttgtagccgttcaattaagtaacaaaaatggcttccgttttactcggtgtctgggtgtctggagtctaatgcttgggttcacggttgcactgtggcgctctttctctccagatccgccggtggcagaaggctcagcgaaagaaaagacccctgcgaagcagaaggcctcagacccgcaggtcgagctctagaagatctggatacgcgtttgctcaccaggagggctacggagagctcatcacatctggaaaaaatatgcgagcgaaaagtccagccccagcatcggggctggaaaagaagctttataataacacgagctggattgaaaatttatgtaagaaaaccacagacgcggtgagcggctttagtcatgataagacagtgaaattgtgagtcaagatagacttgaccacaaagccgtcttttcacctcatctggggctgagcttaggcagctcaggggccaggagcagggcagatcacattgcttaacttaaatccatggcctccagctgccaacgcctgtcagatagcgatgttttctgcaggattccaggccagatgggcactgtccaatctgtgattctgtagaccaaggcctcatgggacaagtacagattttattaacttaaacaccaatccatccgaattttgaatcttatttatggaaaaaaaaaaaaggccgtaaattagcatctatgttggatgggtcttaggtatgtaaaaggtatgttccaatgatgtgtttcaaccaaaaacgcatgtcaacagatacaccacgtacgtgaagagtgcctttcccagatgcaattgcagaatttaaagtatgtggtgtggtgctctcagatcgagagtgagtctttctctagacttgagctccccttgccaggataacaaagccttacatgctcagagaatgcattaaaaagtccgtggggttatctgtttacaaacagggacaaaagcaactgaatgtttctgccgagggggctgctaacatggttaggtttatagagagagtgttcagactgttccatgtggggacaaaatacagtggctcctctaatgtccctaatgtgtcaaggacttgtgtgacaatgtcagtagtaatccgttgcatgttacatggatgcagacagaaccatcagcgtggtagaacactgccctttattgacagtgttccatgcaggccatgggcaaatgctgctgacagatcccatttaaaaacttgaaacttgaaagtctctacaggcagtctctactgttaccattcactcaggcttaggccattgagactcagttccttttagtgtctagctgtcctgtttatggctcaaacatctaaatgtatagatatatagatgaagctgatttttaaaatagacattgcagcccaatttggggatctgtagacaactcactaggttctgtattcaaattgctgctgacacccacttacctccgtgatggggaggtaaggtgcctttcctgagactcctctacaaagtcaggacgcactacctacctcccgtggttgatgactatcaagcacacattctcaaaccatcagaaacacaactcacatacgaatgtactcatcaggctttagctaactcatcatcagagaagcagaggggagagacttcaggacctgggatgccagtcgccagtgggactgtcaaagaaatgaggttgctaagtatgatagaaagcaaataaaactgtagactggggaatagatttatctacaaggaaataaacaaaaccaaacaaaaccaaccaaccaaccaaccaaccaaccaaacaaacaaacaaaaagtcatgttttccaaaaatcagcaattagctctctagccttccttctctgggttcccaggcaattgctgatcaaccaaaactactttgcacaaagagcttgttaatcttatgtggtcttgatggatgatgggctgggatggtgttaataggtcagtgtcccctgcccaatgggtcttgatttctaagcctaatgttttctaaatgatactcagtgagataatcggtatgcagtagcctactacctagagcctttacccatagcaaatgcttgtcatgattcctttctctatacatatctacctagaaaaaaaggtaagattttcatgtctaatgatcagctaaagtgtgcttgtttatgttttataacaattttgaagactttggatatttccagtaaatgttttaccatcgttggtgtttggtgttttctttctttcttattgggagctcactggggaaactttttgctatgtcgtgctagctttctcaattgagttctctctctctctctctctctctctctctctctctctctctctctctctctctctcatcttttcctctacttaccccccgtccctcctttatatgtctggaaaaaatatatgtcctttgtagcactggagtcaagaattagatgaaccaaacggattcatgtgcaatactagaaatggtcaatttggcaagttcagctcaaattttaaaaggtcatttataaacagatagttcaagagaattgtgggagaaacattttattagttttattttggtcttatgcaaatttggagctgaaacgaaaggatggaccatccagagactgccccacccggggatccatcccataatcagccaccaaacccagacactattgcatatgccagcaagattttgctgaaaggaccctgatatagttgtctttggtgagactatgccagtgcttggcaaatacagaagtggatgctcatagtcatctattggatggaacatagggcccccaatgtaggagctagagaaagtacccaaggagctgaaggggtcttcaaccctataggtggaacaacaatatgaactatccagtgcccccagagctcgtgtctctagctgcatatgtagcagaagatggcctagtcagccatcactgggaagagaggccccttggtcttgcaaactttatataccccagttaggggaacaccggggccaagaagtgggagtgggtgggtaggggagcagggcggggggagggtataggggacttttgggatagtacttgaaatgtaaatgaagaaaatatccaataaaaaaaattggaaaaaaaacccaaataaacacacacagcctactttagatactgaaccataggggatcattttaaacccgaatgtggtgggtgagatgtaattaaaataaattcagttttaattttacataaatgtatcagattatttgtagagtctccctttaaaaaatatattcagaacttaaggtggtaaccttgactttggaaacctcaggaggctgagtttgaactgttacaggcaagagcaaattgtatttccctcgggtgggtgtgcaatctttgctgctctcagggatttataccaaggaaggaaaggagagaaagaaggtaaggaaagtgaaagggggggaaagatggagggggcaggcatggttttatgtctcttgagatggcatgatttttttattagatattttctttatttacatttcaaatattattccttttcctggtttcccctcccctctccacctgctcaccaacccactcactccctcttcctggccctgacattgccctacactggggcatagaaccttcacaagtccaagggagatggcatgattctaagaagcaaatatgatcaatgtcttggaggaaaagaagccacaggcatagagacttatagaacagaacatcttcacgtcctgtgtgtgctcaggaaaaatcttctgcagcagagccaggaattctggcttctcatacctgcatcttgctgctgacacctaaggagctttgtaacctcattcatcgtctgggaagttggacagttttgtctccaaggtcctttctcctttgcccattctgcaacccatcctggtcctctgcactgctatgtgccattggctttgatattcaggagtgtgaagaggggaggagaaagggggcaagcaagtgaaatcaaactggatgctctcttgaggatggggcctgatctgtttgtgttcatctagaacagtccctttcttagctcttgacagaggtgctgtttctatgatggtgcctctcccaggttttgctgaacacatacctcccttccctttctttgctaccattttaatatcaaacatactcagaccagaaggtcagatcctcccagaaagtgagagaaagaccatttaaaagtatctctgccttgtctggagtcaggttaaaaacagcgtccaaaggccactcttcaggatcacagagcacagggtagtgtgcgcatgtcttcagacagtgttttctggtctgtgtagccagtagtgttcagcacacccatgctcagactgattttttagcaaactgaggcatggccagtcgaagagctgaactccctttgatatttcacagaaaggcctgttctgcagtcagtcacaagagtacacacacaagagaagcaaacacatctcaaaggaaaaaaagaaattttagaaagaaagaaattttagaaaagataaatcaaaaagccttacctactattttaccacaataaattgtatcactttgtatgtatttaaccaaagtccctaagattgattaaactagtaataattgttgattatgtcttgaaatgattttgtcttgaagactagaggattaaaagagaatccagaagctgcgacttgtggagtttggtgggttttacgggttgtgggttagataaccatgaggagctgtgatttccagttttgtaccaacatctggcgaaaggtctgcagttcactctgctgcgtcacatacaattcctcaccaggaaatcacagacttttgcaattctcaaagccaggccttctgcagaactgtctggaagccagagatacatggcccttgtatttcaatgggctcatttcgacagacttggaggctcgctgtgtgaaagtctaggtttacagttaagacttaaccaagaaggtgacttatctgccctgagatttccaaactccctgggagatctattttgaaattgatgcagaatgtaaagcagctttgagatgcaggcataaatacccagagtaccaaaaccgatgaggtggcctgaagtctgtggatatctcaatttgacctccataaagcttaaagacaagtttacatttttaatgaattaccgctcaggaaatatacataaaaatcttattggatcagcatgcaggtggttaccttaatttggaaataaaacaacgatccatctggttgtctcattttgtcacatatatgtccatacgccagtgtttgaggcaagcactaatgatgacatttggtggctgatggttttattctgactcctgttgtggtcatctctgtgtagaaggcagcattgtataggtatttagtcataagtcagaacacaaaatacggatagaaataatattgactacatatggagcagccccggaaagaattgtttttaatcaaatttttattagaaaatttaaatgtacataatgcaaactgatgaaagatgaaagatcaagatcaaaatgaaaattaaaaccagttggaacatttgaatgtacagacgtgcaaaaaaaccagacttccatagcattttcataaggattactaattagaagaggaaatactgtcacagggaggccaccaaagatgactactcagacagtttgagccagtggaaagtctttattccagccagctggggctacattcaacttttcgagtcctaagtgtggccccgagtgtccagagcatggggttttgaaggcaaacaacaacaacaacaacaacaacaacaacaacaaaacaaacaaacaaacaaacaaacaacccaaaacacatgctggcatctttcttggtagttacagggagcctcacagaagcaagtagtctaacagaaacttagataaacagtcagccggaggggtttttgtgcaagaagtcaatttaacaaaggctaagataagctgttggctagaagggcttggttcctcgcagtttaacagaagctaagataaattagctgggacatcttgaccttttggctcctaaaatagtttggtaattttccatgggattttccatcaaggagataggattctagttaatggcctcagccagaatacaagatggaggaacctctgtcacggtacaaatggaagtaaatttgaacagcaattcttaacagaacagaattgggaatttaaaatagctcttatagtcagatgctagcctcaccaagcacagccttttaggttataaatacaggatagaaaacatcaaatgagatttaattacagagtaattctctattggaagttatcttttccctcacacaggtccctgtctatttcctgaaatctacccttcctcactcccacgcagatacacacacataaaagattagaagctcagatcctcacatgctgtttgtctttctgagcctgggttacatcacttaatataatattttccaattccatgcatttttttttggaaaattacataattttatttcctatggctgaattaaattccactgtgtccaagtgtgccacattgccatcctccacaataccaagatgaatgtccaggatgactcagcgtccctgctgctgtgaccagagcagcaatggatgtggatgagcaaggttctgcttttgctttcatgagccaaggtcttttgtgctcccaagtgaattttaaagtcacttattctacgtccctcaatatgaagtttatattttgatggaaactgctttgactctgtaggttgtttttggtaagatggccatttccacagtattaattcttccagtacaagaggataggcactcttcccagcttctagcaaaaatttttaaatttctttctttagtattttaaaggtttcattgtagaagccattcacttccttggttaggtttattccaatgtattttctgaagaaactttgagtgagattatttctctaatttcatcctcagaagaaaccaatgtttgccattgttacataggagggctactgacttattttgtacattcatattccaccattctcctgaaagttctttatcagttctagatgctttatactggtgtctttaagacctcatgtaggaagccgtaccatctgcaaatgctctctgacttctcccttttctacatgcatccttttttatttgtttttcttttgtattgctctagctacaacttccaggtttcattaaataagattggagaaagcacttttatcttgttactgaatttagtgcaatgcttttagctttcccccatttaatatacatattgatcaagggggaaaataacactaagttgtaaatggagaggaaacagcagtatgatctaaggggggagttcattaagatcagagatgtttatgaggaagtggagcaacaagatgatgtaagggaggggaaacattccatccctcagggaagctgattaatctcaggaaataaacaaagagccccaggaagtccctgaaactgaccaggtttactaggatccctcctccccaggcatatataaactgtgggaactgctgggaggcactctcagacaagcagaattcccaagaaaagtgacagattacccaagctgtccaaaagtagtggatatcagcccatatcagccctactccctgggagaagcagagagcagctgagctgcttggaaaggacactctacaagctattgcactgcctctagtctgctcagtgtgctctcagtttctagcttttgtgagccatcacttatgctggagaggactttgatgctgcaactctctttgagtcatttctgcccctttcagtaactccccacccatattcctgtaagaaacaccaataaaattcatcggcttaccaagttggactttggtggtatctgttctttggtttgtcattgggtttatctgagctgaatatatgggcttcccccaacaagtctccccagaaatagtgtcacagaatagagcacagcttttgagaatcagttctctccttctactttatgaagtcagtagtatcctcatatattaagcagttaaagacagcaacaaaattatagatacacttcccagataatcataaatgtaaagtttgtccataacacaaaccaaacacaagaacaaatcaaaaagacctttctttgaaatcaagttggcttcgttccagagctgtaggaaatgttttaacacacataaaacagtaaataaaattcatcacgtattcaatgacaaaaatcacatgatcatctcaattgatgcagaaaaagctttaacaaaatctctatctttttatgatacaagtcctggagaagatagggatgcagagaatatctcaataaaacctataccatagggatgtagagaacagatctcaataaaaccattgccaatatcatgataaatggaaagaaccttgaagcattttcattaacatcaggaacaagacaaagctgtctaatctccaccactcctattcaatatagtacttgaggtcatagtgagagcaataagagggggaaaataacaaataaatattcatttattacaaataataataataaactcaccactagactgaaagacttctacagtgaaaatttaaaggtcttaagaaaaaattaaagacaccagaaggtagaaagacatcccacggtaaatatagaactaacattttgattcaatgtagtacaaattccaattccactcttcacaggtatagggaaaaaatcttaacattcatatggaagcacttcagaccctagatagccaaaggagttctgagcaaaaagaacattgctgaaggcatcattacacctgactttaagttatactacaaatccattgtaataaaaactgtattactgactcaaaaataggcatttatcccaatagaataaaatacaggacactgatacaagtctacacaactacaatctgatatttaccaacaacataaagagtacagattggatagcccagcaaaatagctcagtgggtataagttttcctccctcctctatcttattagataacgtgagaaatagtggtagttcttcagagttttggttgaattcggtggtagactctgagcctcagtggattttggttggaatgggtttcattgccacttctactgtgttatttgttagagacctatttaaattgttatatcatttggtttaatgtttgtagttcatatttatctagaaattgatttatatcctcttatattttccaattgattaggacagagcttttaaggcatgtcctgatagttttctgagttcctttcttttctatgatgattggaacacatttccatttcctactctaatcttattattttggatttaattttattaatcattctcctttgattaaattgttggagggtttatcaatttggcttatattttcaaagaaacatcttaagttttattgattttgcttatttatttaacttctgttttattattttctgctctgattgttatgaattttgtgaatctactactttggggcttgttgcttgccttttcctgtcttaggatttctatggctgtgatgaaacactgtgaccaaaagaactggagctataacttctaccttaggactgccttcatcttatcccattggttttggaatgttgtatatttgttttgtttaactctaagacattttcttttcctctttgatttcttcaatgacacattaatcattcaataatgtatggttggtgtctgtgactttgcatcgatcccagagtttctcttgtgtggttttctagcttcatcccattatagtcagataaaatagaagaagttatttaaatttttgtatatttattgagatgtgctctgcatttcccatagatgatgtgtcttagggaaagttccactggctcctgagaaatatgtatatttttcagtgcttgggttgagtattctgtaaatatctgttatgtctgttttatatattatgttataaatctgagagtttttttttttttttggtctggatgatctatctaatggtgagaggaggatattgaagtcatccaccagcactgtattgaagttaatctgtgactttatgtttactgatattttaattttatttatgtttatgtgtgtgtgcacatgcatgcctatgtacatgtatgcccattggatctcctgaaacttgagttaaaggtggtaatgatctgccatgtgtgctttgataccctaatctgggtcttcaacaagagctataggtcctcttaaccactgagtcatctctgcaaccatgggtctgcctctgtt

SEQ ID NO: 730 - DNA, 2287 bp, Mus musculus
aagtggagcgggtggtgaaagccaatgaccgtgactacaatgagaagttccagtatgcggacaatcgtatccatacgtccaagtacaacgttctcacatttttgccaattaatttatttgagcagttacaaagagtggcaaatgcctactttcttttccttctgatactacaggaaaaggaggctacggacttctcaagcaagtcgaaatcagaaaaaacactgcatttctttgaccagagtctaatggaatccattgagctgggggaccccaaagtccatgaattccttcgcttactcgcactctgccatactgtaatgtcagaagagaacagtgcaggacaactggtttaccaagttcaatcgcctgatgaaggagctctagttactgctgctagaaattttgggttcatttttaagtctcgaactccagagacaattacaatagaagaattgggaacaccggtgacttatcagttacttgcctttttggatttcaacaacatccggaaaaggatgtctgtcatagttcgaaacccagaaggacgtataaaactttattccaaaggggcagatactattttgtttgaaaagctccatccttccaatgaagacctgcagtccttaacatcagaccatctcagcgaatttgcaggggaaggcctccgaaccttggcaattgcttatcgagagcttgatgacaagtactttaaaatgtggcagaagatgcttgaagatgcaaattctgccaccttggaaagggatgaacggatatctgggctgaaagcaaaggaaaatttgcttggacaaagcacgagtttttccaatggacatgcagtttatgacaacaagcagcggttggggttggacgcgggtgcaggagaggctgtgacaggagaatatgccttagtcataaatggccacagtttgaacggtttaaacgcttttggaagacggtgggggatggcgcagatcagtttttcagttaccgttcttgcgaaggcccatgcccttgaaagtgatgtcgagaacgatcttttggagctcgcctgtgtgtgtaagactgtggtttgctgcagagtcaccccactccagaaagcccaagtagtagagttggtaaaaaagcacagaaatgctgtgactttggccattggtgatggggccaacgatgtcagcatgattaaaagtgcccacattggcattggcatcagtggtcaggaaggactgcaagcagtcttagccagtgactatgcattggctcagtttagatatctccaacgactgcttcttgttcatggaaggtggtcctactacaggatgtgcaagttcttatgctatttcttctacaagaactttgcgttcacccttgtgcacttctggtttgccttcttctgtggcttctcggcacagactgtctacgaccagtggttcatcactctttttaacattgtttacacctcactacccgttttagccatgggaatgtttgaccaggacataaatgaacagaacagcatggactatcctcagctctacgaacctggacaactgaatctcctttttaacaagcgcagatttttcatctgtgtggcacatggaatctacacctcattagcccttttcttcattccctacggggccttttacaatgtggctgcagaggacgggcaacacattgctgacctccagtcctttgcagttaccgtggccacatcattggtcattgtggtcagcatacagatagccttggacacgagttactggactgtggttaatcacgtcttcatctggggcagtgttgccacctatttctccattttactggccatgcacagtgatggtgtctttggaatcttcccacgccatttcccctttgttggaaatgcacggcactccctgagccagaagtttgtctggcttgtggttctcttgacagcagtgacgtcagtcatgccagtggtggtggtcagatttctgaagatgtatttatacccaagcctgagtgatcagatccgccggtggcagaaggctcagcgaaagaaaagacccctgcgaagcagaaggcctcagacccgcaggtcgagctctagaagatctggatacgcgtttgctcaccaggagggctacggagagctcatcacatctggaaaaaatatgcgagcgaaaagtccagccccagcatcggggctggaaaagaagctttataataacacgagctggattgaaaatttatgtaagaaaaccacagacgcggtgagcggctttagtcatgataagacagtgaaatt

SEQ ID NO: 731 - protein, 756 aa, Mus musculus
  VARIANT (1)...(756): Xaa = Any Amino Acid
VERVVKANDRDYNEKFQYADNRIHTSKYNVLTFLPINLFEQLQRVANAYFLFLLILQEKEATDFSSKSKSEKTLHFFDQSLMESIELGDPKVHEFLRLLALCHTVMSEENSAGQLVYQVQSPDEGALVTAARNFGFIFKSRTPETITIEELGTPVTYQLLAFLDFNNIRKRMSVIVRNPEGRIKKKGADTILFEKLHPSNEDLQSLTSDHLSEFAGEGLRTLAIAYRELDDKYFKMWQKMLEDANSATLERDERISGLKAKENLLGQSTSFSNGHAVYDNKQRLGLDAGAGEAVTGEYALVINGHSLNQAFGRRWGMAQISFSVTVLAKAHALESDVENDLLELACVCKTVVCCRVTPLQKAQVVELVKKHRNAVTLAIGDGANDVSMIKSAHIGIGISGQEGLQAVLASDYAQFRYLQRLLLVHGRWSYYRMCKFLCYFFYKNFAFTLVHFWFAFFCGFSAQTVYDQWFITLFNIVYTSLPVLAMGMFDQDINEQNSMDYPQLYEPGQLNLLFNKRRFFICVAHGIYTSLALFFIPYGAFYNVAAEDGQHIADLQSFAVTVATSLVIVVSIQIALDTSYWTVVNHVFIWGSVATYFSILLAMHSDGVFGIFPRHFPFVGNARHSLSQKFVWLVVLLTAVTSVMPVVVVRFLKMYLYPSLSDQIRRWQKAQRKKRPLRSRRPQTRRSSSRRSGYAFAHQEGYGELITSGKNMRAKSPAPASGLEKKLYNNTSWIENLCKKTTDAVSGFSHDKTVKX

SEQ ID NO: 732 - DNA, 37256 bp, Homo sapiens
ctcattttctgttatatagtagttcttttgtctttttgtctcttgctgtcttcctttgtgttttgtcagtctttcgtattaagatgctttgattcctttctgtttttcttttatgtaagttctataggtactttttctgtttgccttggagattacataagatgtcttatagttatgatagtttaagttgataacaagttaaatcacatacaaaaatgctatacttttaaatgtcacaatttgcatctgttcattttatgtacctttaagctattgtggttacagttattttaaatagtttggtctgtcagcttttatatttgaatgaaaagtgatttaactaccaccattacagtaatacagtattctgtattcatccatatatttacctttaccaatgactttcatattttttcacgctatcatgttgctgttttgcatcctttcatttcaatctgaaagactccctttggcatttcttgtaaggcaggtctagtggtgattcactccctaagagtttctctctgagaaagtctttatctctctttcgtttttgaaggagagtttagctgggtctgttattctttgttggcagatgtttttttcagtcctttgaaaatattgtcccactccctcctggactgcaaggtttctgctggaaaatctactgatgatcttgtggaggttcccttgtacatgatgagttgcttttctcttcctgtttttaaaattctctttgacttttgacaatttgattatattttagtgtggttttttttttgtttgtttgtttcatttaatttggtgatctttgggcttcttgaaaatggatctccatttccttctctagagttgggaagttatcaggcattatttatttaaataagctttctggtcctttccatctctcttgtcctcaaactctcataatgcataagctgttctgtttaatggtggcctatgagtccataaagattttttcacctttttcattctttttctcttttttccccttaactggataattacaaatgacttgtctttgtttggtgaattttttttcctgtttgatcaagtctgctgttgaacccttgtagtgaatttttcaattcatttattgtattcttcagctccaaaatttgtttttaaaaatttttttaaagtctttttgttgatatttgtaaagataaaaaaaaatttttgttaattttgcttatgcgtcattttcttgagcttgtagagcatctttacaacagctattttgaattatttgccaggtaattcatatacctctgtttctttagactaatttctggaattttattttgttcatttctttttattttattttttatttttttgagatggagtcttgctctgtcacccaggctggagtgcagtggcgcgatctcggctcactgcaagctctgcctcccaggttcatgccattctcctgcctcagcctcccgagtagctgggactacaggcacctgccacctcgtccagctaattttttgtattttttagtagagaccgggtttcaccatgtttttttaatgactttttttttaaatgacttttcttacttctattcctctttaaatcactaggatgtggggagatatgggactactgtgttttctgtagtttcttttttaccccagtgctctctccaatttcactttagtttctgcagtagccctatttttttcttcttttttgaagactgccatgttattttattttctgctgattttctaaatacctcctccccaagtttctgtcttgtgttattgctttatagattgttggcttcatccaattttccttttttaaattaaggaggaaatgtttggtcacagttttcttctgctttattactagtgaatgtacttcatcttttattatttttttctgtacattacttttttttgtagtatcattgtatgattcctatagaggtttctttttattttatttttaatatagttttatttcaatagcatttggggtacaagtggtttttggttacatggatgaattgcagtcgtgaagtctgagattacagtgcactcatcacctgagtagtgtgcattgtatctcatatgtagatttttatcgcttaccctcttcccaccctcctcacttctgaatctgcaatgtctgttacaccactctatatacctttgcatacccatagcttagcttccacttataagtgaggacatatggtatttggttttccatttcttagttatttcacttggaagagtgggctccaacctcatccaagttgctgcaaaaaaacattttattctttttttatggctgagtagtattccacggtgtatatataccacattttctttatttactcatcagttgatgcccgttttaaattggttttgtatctttgcaattgtgcattgtgctttgataaaaatatgtgtgcaggtgtctttttatatgatgacttattttcctttgggtagatacctagtagtgggtttgctggattcaatggtagatctactttcatttcttggagaaatatccatattgttttccatagagggtgtactaatttatattcctaccagcagtgtacaagccttcccttttcaataaaggttttttttaaattattcattattgtaggaactgaatttttctttgatcagttaattgcagaaggttcattttggaataagggtaagggtgatttctttgttctggttcaggattttgtattaaatgtgattaggtgttaccttgcaccagcctatggcaataggtcaaactttttctctctgctaacccagagtcagcatgtttcctggaaatttttattgtctctggaattccttgtttagttttgccttctttgtctctgggatcaaaccaagtccaggaacctcctcttgacagttgactcacaccctttactattatagtaaataaaggttatgttccttccctctaagcattgtgtgttagtgggctttttttcctgtgagattttaaccactgtgagtgctctctttgtattatcttgactcttctccctttattacccctcccctataaatgtctactccctatcccccaccataattctttcttttcccagtttggttgcaatcacacctaattcaaaaaggtgtggcttgggttctattaatttccctaaaaatatagtttgctttctctttctcattctctgtcttgctctctctgtctttctctctatgtctctcgagggtgaattctagcaagacaaggagggactctgtttttatgctgtgatgaacaagtcaaaaatctaaatgttattgaccaattggtgctctgcctgaaaattcctccttttttgatttcagatacttttagagtgcaataggcaaatcatccagaagtgaggaaagaagccttagtaattgtctagaagagtttggccttttgtagactaagtcattgaggacctagccccttattctctttccagattcattttcggccacatgaaccagatacttcagccatatggtactccttagagtctttccaaataaaccaccctcatttttctttgtctattttgtttgttgattaaaattttttttataatttcaacttcaatttagattcaagggatacttgtgcaggtttgttacatgggtatattgcatgatgcggagatttgaggtatgattgattccatcacccagggagtgaacatagtactgaataggtagttcttcaacccttaccccactccctacctccctgctgtagcagtccctggtgtctattgttgcacctttatgactatgtgtacccaatgtttagctcccacttataaatgagaacatatagtgtttgattttgtgctcttacattagtttgcttaaggtaatggcctccagctgcatccatgtggctacaaagggcatgatttcattcttttttatggctgtatagtattccatggtgtgtatgtaccacattttctttatccagtccattgttgatggcacctgggttgattccatgtctttgctattgtgaataataccatgatgaacatacaagtgcatgtgtattttcggcagaacaatttattttcttttgggtagatacccagtaatgggctgttggcttaaatggtagttctgttttagattatttgagaaatctccagactgctttccacagtggctgaactaatttacactcccaccaacagtgtataagcattccctttactccacatcctcaccagcatctgttgtttttggctttctaatgccattctgactggtgtgagatggtatctcattgtggttttgatttgaatttctctgatattggcctgtagttttcttttatcattgtgtctttggcatattttctatcagggaatgctggctttgtagaatgagttagagaagagtccatcctgctcaattttttgtagtagtttcaatagaattggtaccagcttttctgtatacatctggtagaatttggctgtgaatccatctggtctgaacgtatttttggtttgtgggtttttaaattactaattcaatttcagaactcaatattggtctgttcaaggtttcaatttcttcttgtttcaatcttgggatattgtgtgtttccaggaatttatccacttcctctaggttttccagtttgtgtgcatagaggtattcataatagcctctgaggatcttttgtgtttctgtgagattgattataatgtcacatttgtgttttttattatgttttttggatcttttctcttttttttctttgttaatcttgctagtggtctatcaatcttgtttattctttcaaaaaaaccaacttttggttttattgattgtatagacttttgggtctcaattgcattcagttctgctgtgacatttgttagctttggtgttagtttgttctgctagctttggggttaattttttcttgttcttttttttgtaggtatgcgttaagtcattaattgagatctttctaactttttaaggaaattgtttagcattataaactttccccttattactgcttttgcctcatcccagagattttgatatgttgtgtctctgttttcatttatttcaaataatttttgacttctgccttaatttcatactttacccaaaagtcattcaggagtgtttaatttacatgtaattgtgtggttttctgagatcttcttggtattgatttctatttttgtcctactttggtctgagaatatgattcatataattttgatttttttgactttgttgagatttgctttatggctgagtatgtggttgatcttggagtatgtgtcacgtgcagaagagaagtatgtatattctgtggttgatgggtagagtattatgtagatgtctattaggtccaattggtcaagtattgaattcaagtccagaatttctttgctagttttctgccttgatgatctgtctaaagctgtcagtggggtgttggagtctccctctattattgtgtggctctctaagtctttttgtaggtctagaagtacttgttttatgaatatgggtgttccaatattgactgcatatataatttggataggtaagtcttctggttgagttatatcccttatcattaggtaatgcccttctttgtttttttactgttattggtttacagtgtgtttcatctgttagaagaatagtgatccttggtcttttctgttttccatttgtgtgacagaactttctccaactttttgctttgagcctgtgggtgttgctacatgtgagatgggtctcttgttttatccagtttgcctctgtgtgccttttaagtggggcatgtagaccatttgcattcaaagttaatattgatatgggcagttttgaccctaccatgaaactgtcagctggttgctttatagtttctattgtgtggtagttctacacggcctgtaaactatgtacttaattgccacactcactttctcacataggcctttgcaaattatacccttggcttgaaacaatatttgcctacctttctatctgggtaactcctgctcatctcttcagctttggcttagatgttacttgtttgggaatatttcctgacacctctcttccttcccccgggtccaacgtgcttgccttatcatggcacttaccatatatggcctgtttttcagtgtcccaaaatagactggatttcattgagggcaggaatagcatttggtttaccattctatccccagcactcaaaacattgcctggcccacagtaggtgcatgataaatatttgatgaataaatgttcactgcctatttcaaagcatactgtattgtgtattaatcaatgaatggctgatatatcctgaaattctggacaatatgtgtgttcagtactggaattactattaaaatattctttttaatatttttgtcttttcataagagttaaagtactcatattttgtgtttcaaatatcttaatagttggctgaaaaatgtcaaaccatagatagtctaagatccatgaggctagagatttttgttttgttcatttctgaatccctatcacctagaaaagtgcttggtacgtactgggcactcaatacatgttttctgaatgcacaaatgaaaacacggagtttgcctccttaaatattgtgaactatacctgtctcttgtcttacctagtcctggccctgtgaggcttaattgaatatgtgaaggtctattgaattcctccctgcaaaaagaggtcttcagtataaacatagcacatattttctgggtagaattggggcagctaatgagggtttttgtgccctagtgaaaagtctgctacatccttgatcttaggggcttgaaatcacaaggaccaccttctctctcattcaccctaaagtgaaacgtgatagccaataagtcctgcctttgtagagttcgctcagtcttggtgttaaagatgcctgagcagtaacaagtcactgtacattaggaacatttctgtgataaatgtgagagataaaaaccaaaatgcagtaaaaaatatgacctaagataattaagaaaatagaacagaacccaccaacagttataaactataaattggaaaactcgaacatcagcacagagatttgggaagttataacatccatgaaacaagaacaagatgctctggagagaacacaggaaaaaaagaaaagagttcctggaaattaaaaaaaaaaatcttgacaaaccaaaacattcaatagaagggctggaagattaagtcaagagactctcccagaaagtagaatgaaaagaaagactcagaacatcagagaataaagacaaaataaagggtcaactggcagatccaaaatttaactaagactgttttctagatgaaagaatggaaaaacaaacaaacaaacaaccaaaaaataatgaagaggagaaaattataaagaaatatcagaagagaacttccccaaatcttccaattgaaagagtctcctgaatactcagaaacaatgaatgaaataagatcaatacctctaaaattacaaaccagaaaggataaagagaggaacttaaagcttttaaaggagagaagtggggcacttaccaaaagatgaaagtcagactaacatcagatttaccatcagcaacacaagatgccagaggacagtggagtgatcccttcaaatggctctcaacctaaaattcgatattgtgtcaaaccatgagacaagtgtgaggcaggataaagacattttcaagcagaaagcctcataacttttgcctcccatgatctttttcttatgaaatatgtttaagatatgctacaacaaagcaagagaatcaattaagaaagggggtggcatggggtgaggaaacagtgactccagcccaagagagtaatcccaggatgcagctgagcagcagacctgacaaacaatcagccttgagtgggtgacaccacgaaggcccatataacaaagtgcacattttcctctgctgtgaaccatagttcaaagacagacttatgtacatatcttttattcattttcaacttttagaatcaatctttagaccaataaaaagtatttaagtttggctacagaaaagaacacaaatgttttaaacctctatagtgaaatagaaaaaaaaataaataggttggagggagaagtgaagaggagatgaggagtgggtaataacgtcatcttaccagttagggagtgtttataattgatgaactgaaacaaaacaaaacagccttctgtatgttacttagagttgcagaaataatcattaaggaaattaaactggatatgcctatatttttggaaaaagaaagtggagaagtaaagtaaatgacttaaatcttcgtctgattttggaaaaggtctaatatttataaatccagaaatggtaatatatgtacataatttacagtttttgggataaccgtttgatgtaccttctgaagtttgagagtaattttctctggggagtgggactggggctgtggtgatggaggtgggggcatgaagagtctcttgctttactagatatgccttaatgtagtatttgattttgtaactctttgcatgtattgctttgattgaaaacattaaaagtacttaaaaaagaaactagtatactgtaaacacttgatatatggcagccgttattatattagtaagggggcagggaaataatccagaattatattaaggagttgttatggcaaagtatttgaagcatggatttttggctaagtttgagtcctggctgatggatgtatatggttggccttggcaatgctcaggttctcatctgtaaaacggggataatagtagtatccactacacatcattgttcggaagattatacgtaatattccatataaaactgttagcataaagtcgggcctattataaagataataataaatatttcttattttattcagtattattaattttagaataaatttgatttaaaggaacaaaggacctacatgtggctccaattttactgtaggtattaacaagctttgtgacacagaatagataattgcaattgcccacagcattgtttctctttaaaaaagtagttataatcctatctgcttttgtaactttagaatcaattgcaaaagttaatgcagtttctctttaaaagagtagttacaatcctatctgctcttgtaactttagaatcaattgcaaaagttaatggagtctttaagaataaaaactttagcaataatcctgggggaggaaatgtggactctgcagctgataaagctcttatatgtaagtgttcagagtggaaccttctgtaggcttgctcctgaaatagatacaggctcacagttccttatcgaaaactttggagccagatatatttagaaatttaggattttctggttgtagaaagacaatatggtgttgtctgccattttattgtgcaataactccagtgacatctgagaaagtacctgtaatcaaacacattaatgtttttatattagaaaatattaattcacaagtattaggtaggctttaagaagccatcattaaatacataacattccaggtcagatattgctgcacaaatgggttcaagtcagatcaggttttgccgtaaagtaggttttgaaaaaactttgcattttctgtggttttttgtattttgaagttgtattgagcatttgaggatctgtacagccatcccatatagttttgtgatttttctttcccatatacttttggaaagttcacttctttggtacatggttctgaaatgagaagattatatttaacagtaatgatgaaacagccattttagtgccagacatttgaggctgcaaaataatacactaaaaatacttgggggaactatttttgaattttaaaagataattattggaatgaggttttggttatttttgttgttgttgttctcctacaggaaaaagagcctgtggatttctcagtcaaatctcaagcggatagagaatttcagttctttgaccaccatctgatggaatccattaaaatgggtgatcccaaagttcatgaattccttaggttacttgctctctgccacactgtaatgtcagaagagaatagcgcaggtaagtgaaaagttatgtctgagtggtgaaccttgtttttgttttttaaaattgaaactgacactaaatttgaaggatttacaaattaagcatttgagcagtgagccttgttttttgtttttgttttttaacacagaaactgatgttaaatttgaaggattttcaagttaaagatagaacatagtttatatcccatatgttttgaaaaaatgtggagagatttaagtgaaaaagaaaagaaacaaggacaatggaaaagtgaggacccaaatatgctagtcaagggatgacatcgttcttacaattgagcaccacatttgactgtaagcttctgggtagccaggacaaatactgaaatacagttgagtcacacatctctcattattagtatgcatatctaatagatgcagatgaccttcagacatatgcttagaatgaattttcccagtaacagagataaattgaccttgatattagaatagtcttatttaggctccattatgagaaggtcctcacacttgtgagatggttgtttggaactcagggttcataggatagaacaaaaccgcttgggccacttaacattttgaagctgtgagacaggtagataatggtatagtgaactggcttcttgccctagttgaacctaatctattccatttatatgttttcctcagcccactaattcttcctacaaggtctttggttctttctcaaatctgtttaattttatatctcaattttatttcttgaaatctgttaaatatattgcatgtgctgtttctgatacttccaatatctaatttttttttcagatcttattctgcattgtttctgttggttcttaggttttacttgttgttgttgtatacttttcactgtgagctgaccattttactttgaacttaatttatataaattttttgggtccagttggttcctccagaaaggatttacatttgcttcaatgttctaatgtagaaacattttaaactaaagtttcaacttgatttctttcaggccacctagatattgtgaattcagaatgcaagtttacatgagagtcagtgattggttataaattcttggcagatatttttttcccttccaattataaggagggttctatttaggcaagttttattccaagccctcttcaagggggcatgggtgtccagtttacccttatattgagagtagtctttgggggacccagttttgagaggccatctttcactggactctcaccttagacaggtactgggctatggctttttaaattaaagcccagagacattgaaaaccaatgatcaagttctcctggttcagaaaacaccctcaaggcaaatgctggctaatgtgcttctttaatcccttaagtgttctttttctcagtctctgacctgaacagttcttactttcttgcaagttcatgaatgtatttaagaatattaaaatgcttttatagttgtttgtagcagttgagattggtcctgacacccattccaccatgttaccagaggtagaacttatgttatttcgtgggtagatcaagtaattgctttaagttttttccttttgtgaatttcaaaaattcattcatgtctattgtattaagtggaacaatacaatacaaaaatttataaaggtgaagctaatggtagcttccctgaactccagtctcacccctacagaggtaaccactggtaacatctagtgtttatcatttcaccctttcctctggctcataaatatatacatatattcaagaatatttctagatatttaggtgatttgtttctttttaacaaaaagaactcatagtatagccattaatatgcaacttgtttacttaacaattatcttggacatgactataaatcaggaaatatgggtctagctatgcctaattaatagtctttaaacattaattaattttcaaattaatttttacatataaatataatataattttatataagggcttactttatatatgctgttttataaactctctctctctatatgtatatatacatataacttattttattctttttgtctcctctcccctcttacccccactccaactacacataatatcaggtaacaagtattaatatcctggtttgatttcttacatttcaagggatttcttgtatgcattctcataaaatggtcattagtggcagactgaagtagaatttggagtatctctccatcactctttagctgtgtgatctcatcaaactcatgtaacctctttcagtcataggttccaccagtataaaatggaaataataattttaataatctctacctcaaaggctgccctgaggattatttgggttaatatatattaaaatgttttagtttacaaaacattcatggcacatctctagtcacagaaaatacaaaggtttgatctctaacctaagaaactgagcacagtgaagaggcagactcagaaatggatgttttcctataagatgacaagggctatagcagtgatatgcatagagtcctatggtatcccagaggacagataccagattgagctgttggtgagtagaaaagatctgaggacaggaaagatttttagacctgatgcttgagttgggtgttaaatactgagttggagttggcattggaactctatgaatgttagctgttagtcagtattgatacacttgtttctttaccttttaggagagctgatttaccaagttcagtcacctgatgaaggggctctagtgactgccgctagaaattttgggttcatttttaaatcccggaccccagagaccataacaatagaagaattgggaacactagttacttatcaattacttgcctttttggatttcaacaacaccagaaaaaggatgtctgtcataggtatggttggtagctaagactatttttgatcttttcatactgttgtggttatgcttttcaaggattaatttcacttttggctatgtgctgagggttgtgatagttttgaaactttatgtataaactcttgtgttgctcaacctagcctcaatactgcagtgatatataactaacatttatcaagtgctcattatgtgcccagcactgttctaaatgccttatatgagtatgtacaatgtatcaataaaaatataaaaaaattttaaaaataaaccacaaaaatgctctccatgaattaatttattcaattgtcccaacaatcctaataaggtaggaactattatatttatacccattaacagataatgaaactaagacacagaaaggttgagtaacttgcccaggttcgcatagtttgaagtagaatagctgggattcagacctaggaagtgtgactgcatagcccattcacttgttcactatacagtactggctccggatgagtttctaaattgcttggcacatgacagttgttgtgaacatcgtcctcagcctcctcattatcattcattttctctgtccacctccattgctggagaggaccacctaatattatatttagcaccacaacaaatctgtgctttcctgactcaatgctaactcttagtgctgtgtcaatgtcactctcattcatatttagtgcctttttccattttcacaatagatattctaaaccttggctgtttcctcaagttctcaacactgctacaatcttctttactcttgaaagctaaattcatctcctatttctctaagaaaataaaggccctcaggaatgcacaccattaagtcttttccccatcctccctcttcatccctaagctgtatctttaataatttactctcctgcatcagaaaacaattgctctttttccttttcaaagctgaaggtttttccagtcccattccttatccctccttgcttgctcacttcttgcttttgccttcaatttctcaattactggctccttccttcagcccacaactatattatcctcctgtttccttaaaaatattcttcatatgctggtgtccactgactttgccactatatttttctgctttccatcccagattagtttctcaggtcagtttttgcttcttgcctttcttactcttttcatcccattagggttaagtttcttcttcctctactcaagaagaaatgctttctcagaggtttccattaaccttgtaacttcccagtccaatggcttttccttattaatctgttcatctatctatttttttaaacttagtagtatttgagactgttggccctgttttcttgacactcctgttttggtctctgtaaactttctggctcctgtttctcttcttgtcccattgttttctttctcaagctcctttgctgactattctccttcatcccattcttcaatattgatgtccttttctctttttagctcctgtgttcttcttggatgatcttgaccacatacatggtggtagctattgcttatattctgtgaccttcttatacagctgtttagcttcgatctctttctagagtccaaacacacattttcagcttccgttatgtcctgtcactggattgttacctaaagttttatgtcaaatatggaactttctttctcacaactatagttctttctataatctgtattaaaattcacagttacctctctcattgtatgcttgtccatgaactttataatgaattcttttattgaatcgttgcaactgcatgtaacatgcatgtcccatttaagacaagaggagactaaatgcaaagattttaagtaacttgccaaagattgtcacacagctgtaacacaacttgtggcgcagttgggtaagaggcagatcagatatgtgaacccaggttttccaaaatctggtcttttaaggcctattatagctcactcacttttttccatagcttttgtgccccttggctgatggttctcaaactttacctcccatcagcgtcaccaggagggcttgttacaatacagattgctgggcctcagcctctagtcttatttagctggtctgaggtggggcccaccaatttgcatttctaacaagcttgtgggtgatgctgatgccactggtcagggaatcacagtttggggaccacttctctagactaatagatcctcaaatactatccattattttccccagagatgtttgagacatttctctaatccatctccttctcttccagtctcaggccttaacatctctagaatattctattgtcaccctgtttgtaagtctctcctcagaggcatcagaataatatttattaaaatggcctcataaacccctttttaatcatgaaagctttttgtccttttttcctaattcccagtaccctgccttagttaagtttcttgtcactgcttgcttgtattattgtaatatcttcaaaattattcgcttttaaaataatcctctatgctgtcaccaggatattctttctaaaacataggcctgattttactaccccctacttaaaaagcataggtggcttcccaaaccttaaaagaaaaagtcattagtatgacgtgcaaaattatttgcaatctgatctcaatctacttttcttctactttccaaaactttgagctcaactagacctcaccatccctggatgcattgttgctgttataccctttggacatgctgttctcctgtcttgaatactcctttcccccacttctcttcttggaaatgttccctactactcatctggtaatgtccaattcaaatgttacccatttttcaattctttttctattctccaaataaccacattcttctgtgttccccagaatgccttgttcataacaccagtgtggtattaattccatgacactcacaactatcctagtcattaaactgtgtgctacctcaggcaagtgctgtaccttagtcttcctaaactgcccaaggcaaagcacagagcttggcacatgataagttttctataaatgtttatgaaatactactcaacccagcactttgtaaattatgaatatcctactcatggtatttaatcaatttcttactatttaaaaagtgtttatacgtaacagtagggtttttggtctctaactactagaaactagccttgaaagatggctctcagcaggtaaaaaccaaataacatctgagaatgtttatttttatttttatgttttgacaacagggaagtcatcaccagtgccactgatgagcacacatgccgttctaggtgttggcttaatgttgtatcagcaggagctatcttctatttacagcctcagggaaggtgttattgatgttggtttggcccagagttggtttctttttgctctgagggtgttgacaaaaacctaaaattgctacacagggagatgtttggcttttcctcagcattggtcaccattacaggctgtggagaaattgcagcctaaccacaaacatcagatgtttgccttaatggatcccatatgaggaaaggtagtgctctaccacagaatgcatgaaggtttgctggatttatttttattctgcttggtttttaatcaggaggatttttagagggactctaccagggcagaaaagtctttgcatgataacaaggcagaaaacaatcctggtctcatgatcgtcacatgggttggtctgtaggaacaacaccctgatgcaaaggctcaggcattgcttctgttgctgctgatcctcccctttctcctcctccctcttctgcttccttgtttttgggtggcagccattattcactaaatcatcaatgtataatttcaataccagtagtactttcattctgaagaaagagccctgatttaagtcagaagtatctacataaaaattgatttctataaaggatttttttccagagggaacagaatatactatattagtaaaaaatataaatgacattatatagttttggaaggaccaattctactaattctgtaaatagaaatacagagataaaattcagagatagctattaacaggggcaagtggcagataaccgttaaagaagaagaaattacaagaagcttcttggaaggctcttacgagatctttagataaaagttgctcaactctaaactttttcaagattatcaaagtacaaatcacactgtcatgtgacaggcatttctctgtgtagatgtatgaacagcggcgatatggcaaaatagaattatttaccacccttcacagtgctgctgttgcatctaactggaagccatttgtgacattttttctttcctttatgtcacaaaggcatagcttctgctttcaataaattgtgcacaattttggttcatcttaattaagtaaatattgatttaagttccccatatgttccagggccttcaagctaagggagaatgtgaaaagttgaaaggtagttctatgtggctgcctccaagagaacatggtaaaacagactggatagtgcagctgttaataagctctatatgtcatgtcaaggagtccaaacttaatagaagggagagggaagctattgcaggattctaagcagcagcatgaagatgactgtaactggaatatacagaagagtctggaaggaagcagtactggaatgggtaaaaccagttaggttaaagtgattttctaggcaagagagaagtggcaagagaaatccgtagcttcccttagatgtatggttggtgaagggagaactgtgagtgatgcctagatttctgatttgggagactgaatggatggtgaagctgattactaagactggggatataagaggagtagctaattattggaggagggtaatatgtccagtatgagtttggtgtgcttgagcatatccaagagattttcaactggtagtcggatgtgcaggtcagaatggagtgctagagatggattggacaggagatacacatttgaaaacagcctggtgttggaacctgaagccatagaaatgatgcagttgcccagggacagtatgaaggatgggaagataaaaaaaagaccccaagtaaatctctgaagaacactaatatttaaatggaaagcattgggagaagattttataacctaaaaactgtaacctttgtccaagttctggccatatgttatcgtgaccatttaaaactatgtcctttttagtttatttaagaaatactaacttctgaaatgacttagattttattaactttgaacagaaacgaccagaaggcttggaagaaaagagatataaaacttgctgctaaagcaaatgtttaatgagtaaacataagcaggattccatgaaattggatttccacaaaatcaaatttaaagggacaaatactaggttaagggaaagtatcagggatggaaagtatttattgaatcagaaaattgtactgctgcaaaggacctttgaagttagattgtttaaacatctcctttttacatgtagaaactgagatacagtgatggtaagggatttacacaaatcacaatcagtttgtgattcttccagaccagtgattctaaatgtgtggtccagggaaccttagggaactttgtgagtttttcagaggatgcacaaggacaaaagtattttcattataatatcactattatttatctttttcattctttttctcatgagtataccatggagttttgcagaagccacgtgacatgtgatgtcacaacagaatgaatgcagaaacagatatgggaatccaaccctcttttattaaactagatgttacaaagatctgtaatcatgtaaaataatgccaatctccaaactaatattttttggaaaatatagtttttttatagaaatgttatttatgcttatatgttagatttacaataataataattatagtaactagtgttataaaactgatataataaaatttctcatttttaatttctaatatggatattgatagataacattcacttaaaaaaactttttagaatcctcactcagcattgaaaaattataaagaaggtcctgagaccataagttagagaactaatgtcctagtctagaatacaaaatacaggcaaatgtaggttattcatcgtttgcctttatacctctggtgttggaagggagaaaatataagggaaattattcaattggattattgtacaagaaaatcaagagagagtctttcctaggattaagtttccccccctggtttaacaattagataaattgcatatgtttttctctttctttttccccaatgtaggggttagagctagagtacaagaaaacccacatgagttctggcaattaggcaagctaaccaagggtcttaaaacagaagacaagacctagacaaggcccagtcctaaaaagcttccagggtatgttattagatctatgtaagccaggaggaaactagaatagataagtgtagactggggtagaggggagggtaacattgtattttggtttttatatttttttaaattaagcactaaattttgtacgccattttctttggcattacattaacagtaaataatagtaaacatttatgttaacctttttttgaggcattctctttgtagataaatgggataattgagtagaaagcatgtaatgatctttgactgaactgatgaagcctatgagggcaagagtattcagattatgaagttgtgacaaaggcagttgtcttaagttgtaggcagttctgggaagaaatacccagccatgtcattcattcattcaacaaataattattaattgcctactatgtgtcaagctgtacaactaaacctaaaaagttaggccaagtgttctgtggtttgaaagaaagctttgtctaacagcaatatgctgggggttgtcggtgggaatggagttgagggtagcctaggaagggctgtcagtctcaaacctgtggggcaggttaaaaacacagtactaccgatatagacttccagtgggaatgaggtggaaactttatttttaaaagcccctctgtgaagtgtgttttcagccagaattgttacccaggaacgaaccaccaagaattaatggacttttccggagtaaaagggatgaagaaatatgtcagcaagggccaagaaaaaatgcataaaccatgactttgaatggctagaattgcatatggagatgatttagcatagcactgatactgatttgaacagcaggtcttgaatttcacaccaggagacaggcaaataaagctctcaattctgcttaatatggagatgaagacttaatttaaatgtatcaacccttcagaaatagtaagcaaggaaaacaggaaggtcatgtgcttcagaataaaaacacttgtttctgaatttgggaaatcaaagattccagtagatggagcatttcttaagttaataaatgagaataaagccaagtgacttaggtaatgacctaaccaaaggcactgagtgtcttactactggctaaaacattatgcccatttccaaattgccaggctggagctctgggagaatctaattttgatgtatgacgttgattatattctgcttttccaaacttttttcttttcagttcgaaacccagaaggacagataaagctttattccaaaggagcagatactattctgtttgaaaaacttcatccttccaatgaagtccttttgtctttgacgtcagaccacctcagtgtaagtgcctccgtcttaaggttagcacaatggcccttttgccatctcctatggttaggtcttgtttaaaaaaaatagcagctagatgatttgactactgaaatagaaagcatctggagaatggttccacaggaagctgtgccaatgattgtctgggaattggcacaaggaccacccccctttctgccccgttggaagtccagtcagtctctacaggtggaggaacacacagcaactgagtagtagccacagaatgtgggcgtctagggaacctgctgtaactcccctgcagcttcatgttgctcctcttggaagactggactagttttggaaagaggagacagagagctccttttccttgggttctgatgtgtttggcaccagtggaatatcttatgattacctctagggaaagtttagagttgtgtttagattgtgagaggaaaatagtctctggtgcacactttctcctctaagggtctttttattcaggtcataaatcatgatgagtcacttgtgtgccctcagacaccaaacttgtatattctgagaccagcataatttctttccaaaagctttctgaaagaagtaagagtgatttttggcacttttttgttaaatgccaaaaagtaagggaatgggaattaatatgagctttacttgttttaaacctgagattcaagtgtgtctcaaatatttgcctatggttccatttaagggcatctggtcaaaactgtcattttctcattggtttctttcctttaagatattattgagtattcatgttctttgtcagaccctatatttaatgcaaaacattccctgaatctttaaaaagcaaataaacaaataaaaaaaatcctctgtctcactttaaatttaaaaaatgatggtttggtaatattggttacaaacatagctattgttttttgtctttccaatagagaattgattttcttttaatcttttccaggaggccagcatggtcttttaaattttttttaatgaacacaacactggaatcataagtgtctgacttattgccgttactcaaacaccaaggccctggtttttcatacattctcctttaatactaaactataggaaacctaatttggtctttttacatttctctgcaaaataattttttttcaggtaatataaatttaacttgctctttgcttcattcactttattcattttgacttctagattctgaggtcttaaatgtttatttaattactgatttcgaattgtttaatgataggaaaagaccttaataaaatgctcatttaggattgaacttgtgtttcatgtactaattaaataatttaaatcatccgtttccttttgtaatgtcatcttattgttcattcactgttgtgcagaacagagaggaaggcagtggtaatgcccagtggggatgcaagttaaaggcaaaaaagtgcttgtgtgaattaagaggacaaaagatcattacaagacagtagctagattttcagatccgtaggggatccagttgtggtcttgaaaggcagggcttgcaaaatgtgattccaatatccgaagtgctaccaactgcctactatagaaatttggatactttttctcaatatctgtctggggtaaaccatctcattgcagtacgcattgacttttctatttacctaattacagtatctcacagtttaacctacgcctgattataaacctctatgtgtaccatacgccaaaacaccacagaggagacatactcaatggcaatacccaaaggagcagaaatggccataaaaatgctttacttgcagtgtagaggcccataaaatgaccactggaagcacaagcggaatgggagtttttgagcatttcccccaaagcaatctacgtatgtttctagttactatggctgtgtgagacacttagcaaataccagtctcctctttttcttttcccctactattaggataaagcaccaaaggtgtttgagattgtcacgatacaggaaaaaggaagagtatgcttccccaatcagtttgactaatttagtactaacttcatagaatatagcttctaaaaaataataccttttttgcactaagctgacttgataatggtatctttaaaattcccaacaatttgttattattaagataaaactttaatacagcaaaaaataaaaagtttcacggaggagtctataatgaaaagtgaaggtcagcctccacatttagtcctgcttcccagaagcaaccacctatattagcttttcttcctttctctccccttttgccctagaggttattgttataaccttaagtaatatgcttaaacttctaatatctgactatttaacatctatttattcatttattatttacttttagctttttatcatgaaaattttcaagcatatgcaaaagtaggactcaattttaggcataggcatatcactagggggaatgtgacaagacttgggtgtgatgtcatgttgtggttcctggggagagcctcctgcctttgatttgaggactatggcttctctaagggtcctttcctcttcactgaaagctgaggtccataaaacacactgggtccctctcatggccagaaatgcttccttccgtcaaggacagattggaaacaaatatatgttgccataaatgaatatctcaagtcatgggtgtcactgatcacctctcaactaggacacttcagcaggcttttcagctgtgtttagggggaagacttgctcccctgcatgttttaacctcatagaaataaaacggaaaacacacacattatctcccatttctgaggagattaaaaagttgagagtaaggatagccaagcagtgctcttggtacaaaatgaatttgagtgaaaaatttctcaccaattatttttgttgttgttatttctgtgcttattgtttctttgatggttcatgagtctatgtcatctctggcaggaatttgcaggggaaggccttcggaccttggccatcgcatacagagacctggatgacaagtactttaaagagtggcataagatgcttgaagatgcgaatgctgccacagaagagagggatgaacgaatagctgggctatatgaagaaattgaaagagatttgatggtatgagtttagaagcatgatggtttgtgtttacaggaaagatagtatgtgtttagagatttagcacaggaataagccattggctaagtcatcttgcacacagcagatgtttctctttcaatcactgaatcatgctttatatgttggctttgagttttccatgtatggtcctagagagcctagaattgtatttctattagcagtagcttatgcaattggaagcttcccaagagtagaagatagtaggctacctattctttgtcaacctctgatggtccttgatgttatgggatttttacttttctccttgttttattacccacctttttagagcagagaaatttgctgtgaagaatggggctacagttctaaaccatcctaagccatgagattctgatgatatctgtgctatccagagcatggtctattctaaaaaccactcttacctgaagccccagtggccaggaatacctcacccactgtgaggtactagagagtatgctttgctcaacttttgatgaaaaatcgtggccgggcgcggtggctcacacctgtaatcccagcacttcaggaggccgaggtgggcggatcacgaggtccggagatggagaccatcctggctagcatggtgaaaccccgtctctactaaaattacaaaaaattagccgggtgcggtggcgggcgcctgtagtcccaactacttgggaggctgaggcaggagaatggtgtgaacccgggaggcggagcttgcagtgagccgagatcgcgccactgcactccagcctgggcgacagagcaagactccgtctcaaaagaaaaaagaaagaaaggaaaaggaaaaatcatgcaggaactttcactttagtttatggcgtctgctggtttgttaatgtagaagaatgactagactttttgtgatcagcttcctgactatgggatgaaggctattctttggactcctccactgttgatataagtggggaagcagctggggagttcttaagtccaaatggcttcctactgctcacgctaacatgttatctgagcatatcagccccttcaagtaaataataagtcccaagatctctgctaagttggcttgatttgggaacttccttctggagtccttcccaatccactttcacacaaaataggatgcctgctatatcaatgtatcataatttctgtcttcaattaatattctttggcctccagaatctgtgagtgaaatccatagatgttatagatattgtttgcatgcattaacataaacttttctctctttttcaataaagctactaggtgccactgctgtagaagataagttacaggagggtgttattgaaacagttacaagtttatcactagccaatattaagatctgggtcctaacaggagacaaacaaggtaacttgaaaatggatgttgatgatattttgaaaatggggagatgacttatatcacaaaattttaattaaccagaaaggttaattaattaaatattcacccaatcttccacataggaaagacttgaaatagagaagaggaagttaatgtattgcaagaatctattttaaaacaaaccaaactaacaaaatgccttccatagtataagctggagtcagttaagtttcggtccaattgcctcttgaatataatcattacacctagaggcaaaaatggtatttaaaatgtttaacaattggtttatatgaacactgtccccattcaggacagatattggcacagaactaaagcaggatattggagaccttgggttactcctttagtttcttgatggtggggaatttgaaggatcttaggggaagtgtcagggtgatgggaacactttgaagaagctcagggaaacagctgtttatcaacaatttatagaaatattttggtattttaataactactacagctgtaacagtgcaacctggctgaattccaggactgtctatacaaggtacagtgagaattcattgaccttcaggcttgacaaaatgccaaatcattagtgaatcatcgtgttctactatgtttcctatgaaagaaaaggggaccaacatatttttgatctactgctagcagtaatggttaaaacaaaaatgattttatgcttggctatttgtaaatgaaaaatattcaactaactggcatacacctatgttaaaattctatctacttattaggtattttttatagcattaggggatctgcacatgtgatgcatcaattctctacatctttatccaaatcattgatcacaaaaaataaacagtagaaagttgagcactccggtgtgttactaggtagaaactctctagagtttgattttggtcagttacagccgttctattattactaatatccatgagtttactattatttagctttaatttctgtggtttatacaaggtatatgctgagattttatcaattaccttccttaatttaggacaaaactaatgattccatagaattagctagagtctaattattctatacagttagagacaatcaaataactctattagatagaaggagttatctgattatcttaggttccatttctataaaattagaggaagaattacccaacaccatctgattctccagttctctaggagaacagtgctgggtggtttttgagatgatagtcaaattccaaatttccatatatttaatgggaaaatggcaatgttgtgtgtgagagaactataaaaatttcataagagcatttttttttgtcattcaactgaacattttgtgagttttttcttcaaattgtcttccatttcagaattaaatattggctaagtttagtagtttatctctcccaagacagtattcagacttctggtcaaaggttttatatttgtacatattatgtcacaagatcttattttcatgagtgctaatttgggaatgaaaaggtttttctgaaaactagatgagaaggctgcacattcattagtgttgctacttgtgcatgggtttagcaagtagggaatttgatcctgaaacccaggtctttgaatttccctctgcactgcttgtattttatcacctgttgtgctctctctgacatcagccccctgtaggctttaagaaaatacagctaagccctcaaaactttcattaaaaatggacttaggttattaagtaacattttaactgaattgggctttattttgtgttagaaactgccatcaacatcggttatgcctgcaacatgctgactgacgacatgaatgatgtgtttgtgatagcagggaataatgctgtggaagtgagagaagaactcaggtaggtgttgaaggaaggaggaaaggatggaaggacgagagggagggagggaaaaaagatcagagagttgagaaagtgaaaagctatgctatagtttcctgtggtcttaacttagtataaagttctttgtgcatgtttcctaaacttcctttcattttggtgacaaactgagatgaagctgatatcagtaatgaattattgtcttcaggcctccaacatttctcaactatttttagaaaagaatttcaaatcagctatgttgagttgtcctttaaaattgtgctttggttagtacctgctcactcttgcgtggtgatgagtgatcagtatcatgagatacttcttaaaaataccaatgccctagcttcattctgacctacaaattaagaatctacacggaatgggatatgggactttgtatttaataagcacctagatgaagcttatgatcagataagtttgggaaacagctgtaaacagcatataaagatggaatagagtctttcagcattaaagaaagtagatattttgatgtagttactattgaacccagatatacactgtttatgtgaaataaaatactgtgagatttgtgtaactactgcacagtaccagaaaatacgtaagtgctgaaattggaggtagcagtggacagacattaaagtttgagagataatatttcttaagatgtaccaatttatttcatttccttatttcttgttactttatttggagaagaacgtttaaaaatctacaaaaatattttcctagaacttaaaaaatactgtcttataacaatttttgcttgcttgctgcttgtagtagcttctctaagctcagctcacttagacactggccaagcagaatgatgacacagatgcaaattacttatcgcttgctccattctagatggggagctaaccttccttcaatataatagtagagctctgtggcttcccaaatatgtctctgtcattaaactattcttcctgaactttaaaaaaaggaagtcttaaaagtcagcaccactacttgatggtacttgtacacgaatctcccagcctctcggttttacctgcagttaaaaaaaaaaaaaaaacctgctatatcgtgctggttagaaactatgactaaatactgcacatgtctttgccaaataaaaattgggaaatttaattagctactactaatataatttaaatattattattggtataattttaatgatagaccccatagagtcagttggggaaatattagtaacttatttaataatcaattaaaattttaaaagtagattctttaccttttgatttttggattgactctttaaattgatatacaatatttatacatattttgggggcacatgtgatattttattatatggatagaatgtataatgttcaagtcagtgtatttaggatatccatcactttgagtctttatcatttctttgtgttgggaaagaaagtcctctcttctggctaacttgaaatatacaatacatggttgctaactatacccaccatattctgctgttgaactttataatttattccttccatctaactatacgtttgtactaattaaccaacctctcttcatcccccgcattcccacccatacaaccttcctagtgtctggtatctatcattctactctctatgagatcaacttttttagttttcgcataggagtgagaacatgtgaaacttgtcattctgtgccttatttgacttaacatggaacccgtggttccattcatgttgcttaaaatggtaggatttcattcttttttgatggttgaatagtattccattgtatgtgtatacaccacattttctttattgattcatccatttatggacacttgggttgatttcatatatatttgatattatgagtagtgctacagtaaacatggggtgcagatatccctttgatatagtaatttcatttcctttgaataaatacccagtactgggattgttagattatatggtagttctatttttagtttttggagaaatctccatagtgttttctctagtggctgtactaatttacattctcaccaacaaagtgtaatagctccctttaccagcatctgttatttattaatttatttatttaatagtagctattctagctgaaataaaatcacatctcattgtagttttgatttgcatgtctctgataattaatgatgttgagcatttttcatatataagttggctatttgtgtgtcttattttgagaaatgtctattcatgttctttgctttttaatgggattgttttcttactgttttaattgagttccttgtatattccagatattactcccttgttagatgaatactttgcaaatgctttcttcctttcaacagactgtctcttcagtctgttgattgtttcctttgctgtgcagaagctttttcatttcatgtagtctcacttgcctatgtttttgttgcctgtgcttttgaggtcttagccgtaaaatcattgcctagagaccagtgtctggaagttgttttccctatgttatcttctagtagttatatcattttggggattatatttaagtctttaattcatattgagttaatttttgtgtatggtgagagttaggggtccagtttcattcttctgcatatggatattcagttttcccatcactacttattgaagaggatgtctgttctctagtgtgtgtacttagtgtctttgtcaaaaatccattgactgtaaatgtttggatttatttctgggttctgtattctgttccattggcctatgtgtctgttttacaccaataccatgctgttttggttactttagtcttgtgatatattttgtagtcaggtagtgtgatgcctccagctttgttctttttggtcaggattgctttggctatttgggctcttttttggttccatatgaatgttaggaattttttttccatttctgtgaaaaataacatagtatgataattttaacaatattaattcttccaatccatgagcatggaatgtcttttcatttgtttgtgccctctccaatttctttcactggtgttttgtagttttccttgtggaggtttttcacctccttggttaaatttatccttaagtattttatttttttacagctattgtaaatgggattgctttctttctcaggtactttctcaggtacttcattattggtgtatagaaacactactgattttgtatcttgattttgtatcctgaaactttactgaatttggttatcagttctaagagtttttgatggaatcacttgaattttttctgaatgtaagatcatgttgcttgcaaacaggaacaatttgacttctatttttcaatttggatggcttctatttttttctcttgcctgattgctctgactaggaatttcagttatgttgaataggagtggaaaaagtgagcatccttgtcttgttccagttcttagaaaaaagggtttcaactcttcctcattcagtatgatgttagctgtgggtgtcatatatggattgtattatgttgagttgtgttccatctacacctagtttgttgagagtttttatgaagggatgttgaattttatcaaatgatttttctgcatcgattgagataactatatggtttttgtccttcattttgttgacgtgatgtatcatatttattacgtatgttgaaccatgcttgcattcctgggataaatttcacttgatcgtggtgtattatatttttgatctgttgtaggaatttttttctttgagacacaaaaaaaaaagccaggtgctctgtcacctggctttcactgcagtggtgcaatcgtagctcactgcagcatcgacctccggggctcaagtgatcctcccacttcagcgtcctgagtagtggggactacaggtataagccaccaccacacccaactaatttttgtattttttgtagagagagagttttgccatgtttcctaggctggtttcatattcctgtgctcaaatgatctgcctgcctccgcttcccacaggaggatcatttgagcccaggagtttgagactagcctgggaaacacggcaaaacaaggcatggagccaccacactcaagcctgctgttggacttagtttgttacttttttgttcagaatatttatgtctatgttcatcagagatattgatctgtagttttctttttttgttgtgttcttctctgattttggtatgagggtaatgctggccttgtagaacaagttagggagaattcccttctcttcagtttttttggtatacttaaggataatttatagtaattcttctttacatgtttggtagaatctggtagtgaagtcatccaattctgggtttttctttgttgggagactttttattgcagactcaatctcattattggcttttggtatgttcagattttccgtttcttcctgattcaatcttagaagtttgcatgtgtccagaaatttatccatttcctctaggttttcctgttagttagcatatagttgttcttaaagtcttgatcttatatatttctgtggcgtaagttgtaatgtctttgttttcattcctgattttgtttatttggatcctctctctttttttcttggttagtctagctaaaagtttattaactttgttcatcttttcaaaaaaaccaagttttcatttcattgatcctttgtattttttagtctattttatttacatatgctctgatctttattatcttttaccttctactaattttgggttttgttcttgcttttcgggttctttcagtcatttcattatattgcttatttaaaatctttttacttttttgatgtaggcatttattgctataaaattctctcttagcagtgcttttgctgtattccataggttttggtatgttttgtttccattttcatatgtttgaggaaatcttttcattttcatcttacttttttcattggcccagtattcattcaggaacatgtttaattttcatgtagtgtattgtttctaagttccttttggtattgatttctagtttcattccattgtggtctgagaagatacttgatatgacttcagttttcaaaaatttgttgagactgattttgaggcctaacttatgatctatactggagaatgtttcatgtgctggtgagaagaatgtgtattctgcaagtgttggataaaatgtcctgtggatgtctgttcagtccatttgatctaaagtccagtttaaatctaatgttcttcattgattatctgtctaaatgatttatttaatgctgagaatgtactgttgaagtccctcattattattgtattggagtctacttctccctttagatctaatgatatctgctttatatatctgggtacttcagtgttgggtgaatatatatttagaattgtaatatcctcttattgtaatatcctcttactgaactgatccctttatcattataaaatgataattttggctctttttactatttttggcttaaagtgtcttgtatctgatataagtatagctactcctgtttgcttttggtttctgtttgtgaggaatatctttttctatacctttactttcagtctataggtgtctttacaggttaaggagtttcttgtaggcagcatatagatcacatttttatagatccagatccaggccatctggatcacatttttaaaaaacccattccgccattctgtatttttcaagcggaaaatttaattcatttccattgaaagttgctattgatatgtgaggttttgttcctgtcacattgttaattgttttctggatgttgtatatatcttctgttcctttatttcttttttattatatatttttgtgtcagtagttttctttagttgtaactttgagtcctttctcttcctcattggtgtgtttgctttaccagtgagttttgcacttttatgtgttgttcttaatagtagatattgtccttttgcttccaggtttaggattccctcaattattttgtagggcttttctagtagtgttgaattcccttagtttttgcttgtctgggaaagactttatttccccaaagagggtaattttatttctccacaataaagtaactttatttagaaataaacttatttctccaaaaaggataactttgctgggtatagtatttcttgacttccagatactgtctttcagcactttgaatgtattatcctgttatcttctggcttgtaaggtttttactgataagtctacggtaagtctgatggagactcctttataggtgactagatgcttttctcttgctatttttagaattttatcattgtcattgactttagacagtttgactataatgtatcacagagaaaacctttttgcattgtacctgtttggggattgctgggcctcctgtatttcaatgtctaaatctcttgctagagttgggaagattttatctattatttcatcaataggcttttgaatgcttttgttctctcttcacctttgggaatgctgataattcagatatgtggttgctttatgttgtctcgcacgttatgtaggctttgtctactcttgctaattcttttgttttacttttgtttgggttatttcaagagacctgtcttcttctgaaattctctcttcttcttgatctagtctattgtcaaaactctcaaatatatttttttatttcattcagtgaattcttcagttgcaggatttctgtttggttcttcgttatgatatctacctctttggtaaatttctcaatcatatcctgaattgtttttttcatttctttgtattgtttatctttgttctcttgtatctcactaaacttccttaatatcattattttgaattatttttatgggaatttcataaatttcctattcattggaatctgttactggagaattatggtgttcctttggagttgtatttcctagctttttcacgtttcttgtgtccttacgttgctatctgcacatctggtataacagtcgcttcttccaattttgtggatttactttcataggagaggacttcctcaatatgtatcttggtattggttgggtagggcactttggctttgattctggatgtgtgcagtagtatagtctccatataatttatttggctttcttttttttttttttttttttttttggtaaacaaagccagtggtgtctgtgacttcctcagtggcttagggtgtggttgttaatggagactgtagtgaagttttattgggcatggggacagcaggtgggacagtccttgggccccagtgggagcagtggtaggctgagcctgcctgtctttgggtccaagggtagcacatttggcactggcattagtgtgtcctggtgggatgattcttgggccaccaggaggcttgctcaggtgacagcagtagaaacagtgggctggaccttgggcccctgggctgcaggcatggcataggcaatggcagtagcagtggttggacaactctctggctcccaaatagcctatgctggtgttggcagtggctgtgacaggctggtcaggccattccccaggtccacgggtggtaagtgcaggtgggtgctagctgtggtggtagtggcaggctgggttagtctgtcttccagtctctgggaggagtggtcatgatggtggatggagccacggcagtggatggtggatggagcagggtgatccccaggcccctaggtggtatgctcaagtactggggtggggggtatggagtgcggtcaaagccagactggacagacctgtctgtatgttccccttctccccgctgtccagtggtatgtatgggtgctggctgtggtggcagggacagggttatcccaaggcctctggtggaatgctcaggtgggggtggcagtagctgcactctggccgtgctggctgctggggtgagtgggattgcttttagtagtagcagccttaggcaggtggctgggaagtgtgtgctttggctgtaggtggcagctatatgtaaggtagcctatccttagggcatgtggaaatgtgaggaagtcctgttgctggaagggtagtggggttgctgtcagcgtcttgcactttggccatggtggcagtggtggcagtggtggtggctgcaggtggggaatgtcagtggagctccaggaatgtggaaagccaagtactgttgggccctcaggcaggatgcagtctggtggggctgggctctcaaaatgacactttgctgtcattttgtggtatgtgggacccagtgtgagctccctctctggggcaatggcactgccttgtcttcaggcagctccctatgttaatttcagggtctgaaagggttgagaggctctcctatggctaggagtggagtctgtggtgagattgtggaccactgggcatccctcacttatactttccctacacaggagagcctttctgggctcccagccagacaggatgccttgtttccctcttcttcttttaggtgtttcctgtcacttctctcttgaactccaatattttctcttagatgacatatttgaagtatgattatctactctctatcttggtgcttctttgtggaggaggcaactgccagatgcctttagtcgtacatcttgaaggaccactctcattcagaacttgactcttgctgaaggaagatagatgcaaacagatctagattttaataagcctgttgctaaatgttttgagacagtgcctggaagagtattgtaggcagtacacatgtattacctcattttgttcttaagaaactcaatcgtaggcattactgttttccctgttggacatatgaggaagtcgaagtatatagagggtaagtaacttgcccaaagtagtccgtggttcaggtgggatgtgaatctaggcagcttggtcccagaggctgtgcacttgccatgtgtttccctaaacatacctcagatttatttttattccctttaataattaacctaaaaatatagttgttaaggtatcttactgcttcacttgagtaaatggtcagacaccagattagcaagtagagtcagcagaaatttccaggggaaatagcagatgtaggagaaagagtatgggcttcatgtcagctggattcaagttggaatctcagcttcatgcttaggctgagtgggaaacttttgatatgggaataacctctgtttgcttggtttccttatttgtaaaatggggatacaaatatctactctatatcttattttatttgggggattagataagaacttaaagctttatgactgttccatgcgcatctttcttgccttcctcattccttgtctatttcctcccttctcccttccttcattctttcagccactgatcccaatctttccaccaacaaggactacttttgtaactatttccccaataagggcagcaggcctgaaacagtggggaaggaaagggtagaataaaatagacagctttttggaggtagaatgaataggtcttgtaatttgattggatgtgaagagaaatagtaggaggctttgtcactgctaggtttcacagcccagagtgtgctcaggcatgcaagaatagaaactcattaaattttctaaaactgaacttgaacctctttctgtctgaggacagaacaattaaactaggcattttcagttaaatttagttcaagtctgggatgtacaattgcctcacctgttactgttcatcagtgtctaccctgctggcatccagcacttcccacgtctgtgttcctgtctggtctctgctctcttagggttgttgttggctttccctcttggctgacttccacactctgctggggaaccatggaaagtgtggctgctcttcctcacctctctatgcccaagatgacttgtgttcttatatggccacttcagtttctaaaatccctttactctgctgattcccctaaatttatctgaggat

SEQ ID NO: 733 - DNA, 855 bp, Homo sapiens
caggaaaaagagcctgtggatttctcagtcaaatctcaagcggatagagaatttcagttctttgaccaccatctgatggaatccattaaaatgggtgatcccaaagttcatgaattccttaggttacttgctctctgccacactgtaatgtcagaagagaatagcgcaggagagctgatttaccaagttcagtcacctgatgaaggggctctagtgactgccgctagaaattttgggttcatttttaaatcccggaccccagagaccataacaatagaagaattgggaacactagttacttatcaattacttgcctttttggatttcaacaacaccagaaaaaggatgtctgtcatagttcgaaacccagaaggacagataaagctttattccaaaggagcagatactattctgtttgaaaaacttcatccttccaatgaagtccttttgtctttgacgtcagaccacctcagtgaatttgcaggggaaggccttcggaccttggccatcgcatacagagacctggatgacaagtactttaaagagtggcataagatgcttgaagatgcgaatgctgccacagaagagagggatgaacgaatagctgggctatatgaagaaattgaaagagatttgatgggtgccactgctgtagaagataagttacaggagggtgttattgaaacagttacaagtttatcactagccaatattaagatctgggtcctaacaggagacaaacaagaaactgccatcaacatcggttatgcctgcaacatgctgactgacgacatgaatgatgtgtttgtgatagcagggaataatgctgtggaagtgagagaagaactcaggtag

SEQ ID NO: 734 - protein, 255 aa, Homo sapiens
MESIKMGDPKVHEFLRLLALCHTVMSEENSAGELIYQVQSPDEGALVTAARNFGFIFKSRTPETITIEELGTLVTYQLLAFLDFNNTRKRMSVIVRNPEGQIKKKGADTILFEKLHPSNEVLLSLTSDHLSEFAGEGLRTLAIAYRDLDDKYFKEWHKMLEDANAATEERDERIAGEEIERDLMGATAVEDKLQEGVIETVTSLSLANIKIWVLTGDKQETAINIGYACNMLTDDMNDVFVIAGNNAVEVREELR

SEQ ID NO: 735 - DNA, 40495 bp, Homo sapiens
ttcagtacgttgcttatgttgtgattggcttgagatgtacagtgaaaagaacccgcggaccagactcccttttgtttcctatgttgggtggaatttcctgggagaagcagcgggaacaaagaacaaaaagtatgtatcttgttgaacctagaatctttactctggcagagaatttcagggacattgagtccagtccctcgttttacagaggaggatcctgatcctgcaggagctgaggatcagcggtaggcaaggctaggaccggaaccaagtctcctggctcccacttcagcgctctgcctactctacctgatgataagtgacctcttgggttgtcataaatttggaaaagctaatggccatatcctttttttttttaaaaatactgtcttccctcaacccctaatcagaaaatgtttgctttatttggaatctaaaggagaaatatccagaaacactcagttcaatatgactatgtggaggaaatgagctctctattgaaagagacctcatgacttgcggggtgtgtcatagcttagagctgtgggagggacaggcctgtccctaggcgaactgtttgtagaatcatctggaagcttgaggacaccttctgctggcaaacgctccaactcaactgccactgagaaacaaattaaatataatttgttctaatgagatttccagccagatttctggaacagagaggtttggataaaggagactaggtctctaaactgaatcatggattctttttaaggacatgccttatcccaatctattattgaaacccacatgagttttgtggcatccactgtgggtttggattcacaatttatacctgtaacttattttaaaagcaccctatgccttcaggacttttcgtaaagaggaactgtcccctaccaaggatacagccaaataaaaaaaattggttgaagtcctatttagaaaattcatgcttaaaattatgcaactactggtactgtgtacttgtgagatgatattatctgatgacaatttatcattgtcagtgagatacagggctgtgtattttttttttcttcaattctactgtgatatggaagcaattatcttgtcaaggctggaaaaactttagttctgtcaaacagtataataaagcaacaaaaagtttggaaagtgacgtgaaagactgcgactaatcttaaggctttgatgacttcatggatttggttacctgtgagcccgtctccacctggcatggtagctctgctccccctcaccttccagatgtgctctggggaaagtccaggactggacgagtgctcaggcctgggtcactcctcctggatgctgcgagcgggtttttactaattacacaaatcaataacagatgtgctgaggctgagcacctcatatttattccacaatgtgttttctttaaatgacaaatgttttttaaggcccccaaaaggtcattagataggtttcctctgcaacacataggaaaagggggatacacatctccaaagaggtagtaagttcatcctgttatttgaacaaggagctcagccagtggtcgagcagaaagagcagagaaagccctttgcagctgtttaagaactttattaaggtttatttaaatgtgtcattctataaatcataggttttgtgttctccaagctgtttttagattgtaatttgtagctggagtatttttaactctatgtaaaatggttgataaggctgataaattgctcccataaagaagggagcgaggagctttccttaaatagaaaaaacagtgaagttggaaaaatgaactctcctccctgttttttttttttctgatctgtgaagagacacttataggattttaaacagacttgtgacatcttgtagtagcatggcttttctctcttgttcagagtattggagatagggaacaaatattttggaggcagaggtgccatggcttcccctgtgagtatgggtgccctagggaaaatggttttttgtgggactccttttatataaacaatttgagtcacccaaaatcagagtgtcgacctagaaatctgaaaagagtcatcatccctcaacctccaccctgcccctctcttcagggcatctggtcaacctgtgttgggtgggttgggagggaagaagaggtggtagagtgcccgagcatgcttggaaggggagaaacagggaggttgatctgggctcatgtgcccctctcagctagtcctagtcaccagaagggggccttaaaatttttccaaggggatctaaggaccacaagtagaagtggggcatttactagaataactattcgagtagctggagatctcttgcaaggattcttcaacagaaacctgttgtagaagaaacattgcttggccaggaacggtggtttatgcttgtaatcccagcactttgggaggtcaaggcaggtggatcacctgaggccaggagttcaagaccagcctggccaacgtggcaaaaccccgtctatactaaaaatacaaaaattagccaggcatggtggcaggcacctgtaatcccagctactcgggaggctgaggcaggagaatcgcttgaacccagggggcagaggctgcagtgagccgagattgtgccactgcactccagtctgggcaaaagagtgaaactctgtctcaaaaaaaaaaaaaaaattgcttgtggccttaatttctgtgaaagaccctgaagtctaaactgtgctaagccaatgcccatatggcaaagttggtttctaaggtaaaggactcaggttaacacattttggtagagcctgagataaaaaccagaattagagtgaacagtgattgaaataattaagtattcatgaagaaagtaattgtaccaaggtactcatttttctttaaatcttgttctgatgttatattgatctcatggctaccatagtttattatagaaataaatatctatggttaattgtctcaataaagaattctatttttataaaaatatgattagcatgaaaatgtacctttttatttacccattaaacacatctcttgaagcttggatccctgcatgctccccccatcctccctcctttcttccttccataatatggtgctcacttattgagcagtgtctttcaggtgctgtcgtggcatttacctcatttcattgaatgctcacagcctccctgtaatcctcattttatagcctaggaaaccaagacacagagagattgagtatcctactcaaattcacacagttctgtctgccgactcccttacccttaagacaccagcttccttttattgagcaggttctgagtttggttcttgggccccacgggtgagttagattacccgctctcaagtagctcacagtctagtgagacagggctaggaaccagcatataaataattgtaagtcagtagttaagaagcagtgaggtataggggcatcatggaactaccgatgagtggtccagaagccactcatggaggcacggagtggccaggactcagaaaggctcctggaagaccctggccattccccttcccatgctggaccttcccggatcaaccatattgaagcagatgagaagtaagaggatggacatcccagcagaggagccaacaggaggaaagttccagcagtgaagaatagcttgggcaggaacacaagccatcaggtatctggggagtgatttgatatggggtgttccgcagagggccaaatctcagatttctcccccggatgctaaagaggatgtgatggtatcagatactggtatagggaacccaggaggggcgtctggttaaggtaatatgaggatgagctctggtcttgatatattaagtttgaatctatggtgcatctatgggaaaatgcctagtagaaagttaaatatgtagcatttactaaaaagttgtaaaataattaattcaacaagtatttatagagtacctacagtcaacaaatatttgtagagtatctaccaatggctagatcctgctctgggcattaaaattatagttgtgagtaaatttctgttttcatggagattatattctagtgggatgaagacagataataaagacataaatcagtaagataatatcagaattgttaagaaagaacttggtaatgtaaaaggtctcactgagagggtgaggtgacactggagttgtgacctgagtgttcagaggaaacttccatatgaataccttgggattaaagtgttccaggcagagggtacagccagtgcaaatgtcctgaggcaggaatgagccagataagttggagaaagcccatcagcgaagcctcagctaggtgagggagggtgagaatgttgtgaggtgaagttgaagagtctggcaggcaggggaccaggaagggctcttaggacatgacgaatagggagtctggattcattccaagtaaaatggaaaaccattagagggttttaacccaggtcaatgctaatgttgttattttaaatcagtggtccccaatctttttggtaccagggatgtttcatggaagacaattttccacagaccagtgggggtggttttgggatgagactgttccacctcagatcatcaggcatagaactggcatatgcacagttcacaacagggttcatgctcctatgataatcttatgcggctgctcatctgacaggaggtggagctcaggctcgcttgcctgccactcacctgctgtgaggcctggttcataacaggctatggactgttataggctgttggggacccctgttttaaatgccaaaaaatagcatataaaattgtgtatgctctcaattacattaaacaaggtgagggaaaaagccttcaaggaaactttctttttttttttttttttcctttttttttggagacaggatttcacttctgtctcccaggctggagtgcagtggtatgatctcggctcactgcagcctctgcctcccacgttcaagtgattctcctgcctcagcctctcaagtagctgggatcacaagatgcacaccatcatgaccagccaattttttgtatttttggtagagacaagtttcaccatgttgccaaggctggtcttgaactcctgagctcaagtgatccactagcctcgacccccaaagtgttgggattacaggtgtgagccactgtaccaggccaaggaagctttccaaatgacaccactgattgagagaggtggtttcatgtagtggtcagtgttgtgggcactaaggttcataggcttggagttagctctgacacttgcttggctggcgttctcaaactttgtgatctcaggaccccactatcaatatttattatcttaggaatgaaaatgaagaaaaaaatctaaatacttttattaatttgttaaaaaatagtgaacccatgatgtgtttacaaaatgattgtattttccaaaacaaaaacaagttaatgagaagaatgccattgttttacacttttgtaaaactagttaacataatagaagacacctgggttctatatcatctgcattcaaccagctgtgatgtcacatatcatacagactcatgagagaatggggtgaaagggtaaatacataactttttgtattattgtgaaaatagttttgacattatggatcccctaaaaggttctgaactatacttggaaaacctttttttcccctttgggtttttttttaatataatttaaaaaaattgtgggtacatagtaggtatatgtatttattgggtacatgagatgttttgatacaggcatgcaatgtgaaataagcacatcatggagaaaacctttgcatttaaggtatgacattgagcaatctcctaaccttgataggcctcggttttcccatgtataaactgggaactatcaatagtacctaccttatgtggttgttaaaatttaatgagccgatatatgtaaagcacttaaaatggcacagagtagatgtttagtaaatatcagctatttttatttctttttgttattgtgacactgagtggcagcaaaacttctgagaatttgcagaaactcattgaaaccttactctgatttttccttcctgtcttctcttgctccagctgtgaaatgagtcttcaaatctgagtgccggttgacaaatgctgatagttgtcaaataagtgtagcttgtaatgcgagcccatttgtgatgatgagggcacgctatgccagactttcagctgtccacagttgagtacgccataatttctcagattctttctctcttcttaatacctggaacagtcagatgccatcatcaatgagttgaagatttgtgtcagctgctctgctttaaaaaaaaaaaaatggaagtgagtgtaattcccaatcttggcttcacattggaactacctgggaaaaatttaaaatgaccaaaacttagatccttctcccagagatactgatttaattggcctggggtgtggcctgggcatcaggatttttggaatcttcctactctctgaaatctcactgggctataactataaaagaaggtcacgtgtttaatttttaaattttttatcattggtaaagtttaacaaatatattaaaaagtatataaatatcagcttaaattgttgtgaaatgaacacccatgtaccatgatccagtgcaagaaatataacatttccaaacacccaacagctctcctgcttttcctcgagacctctttccaatcctctagaggtgaccattaccctgccatcttatagtcacatttcttctgttttataactttaccatatgattaggagttccgaaacaacataggaatagattttcatacttttgcactgtatttaaatgcaattatgcctttgcatctggcttcttttgctcaatattatatgtagtttttattcatttgttttgggatatagttataattctttgcttttcattattctatagtattctgttatatcgatacatgataatgtctttatcccacacttgaaggatgttttggttgtttttgtttggggactattatgaccaatgctgctatgagtatttttatatgtatcccactgcacgaagatagacatttgtgaacatatgtatctagaagtagagttggacacattcactcatcagaaggaagataaagaggcttagctgcagttttggtggactcttgagggtagataggagttggatactgggaccctgtcacaactgctgctctgggctgggaccctgtggggtcgcactgctctgaaccatgtaccttgggaatgttgataatctacaggaggcaactgacagattgagctgtgccttcagtagtttcctgggctgaagggagaaggttcagtgcctatcgagggtagagatcatgatgaaacccttcctactctgggctgggacccaaaggcagcctcccagcagtgaggtcacagactctgccatagcaggacagttggctagcccagaaaatatcaggccttcgttctgtcctcgacagctgatagaaggaaataaacatagagtctggagaaggatcgcattatcctaggccttgagatagttattaagttctaattctcttcttgatcttgacaagtcattccccactgtcttgttagttcattggtactttgatgaagatgcatttgtttttttctcaacttttttcgttatcttcagcaggaggtttggtatgaatcaattattatggcacgtgccccctatcctgtgtgataaattcaggcttctttcagatacctctgctaaatacccaggggggttccagggagtgccagccagcttttccagtctgttctcatggttgcctgactagtggactactgccctgcccttctgcaggttctctcatgccacattgagtgcattatccttcaggtagctgctgcaggttctctcatgccacattgagtgcattatccttcacgtggctgcagctgtcttgtatcactttgctcccagcatggacctaggctgtggtatcttggaactggcccatactgattcacaagagctgattgttaaattttcatgaattttgtgagccagtggttaaatacagccattattaaacgttatataaatttacaatttaagttatattaaaaataaaagacagttaatatactcaaaatgaatcccttgctaattattttcccatgttttactatttatgctcttgagattatattgggtctgtatagtagaaatactatataatggtgagtatgtctcaactccacattcagtggcatcattgcttgaaatcagtcatggaggaatatttataccatggaaattggcaaatgctacaaatcaaggcttttttttgtttgtttgtttgtttgttttgagacggagtcttgctttgtcacccaggctggagtgcagtggcgtgatcttggcttactgcaacctcagcctctcgggttcatgccactctcctgcctcagcctcccgagtagctgggactacaggcgcccgccaccatgcctggctaattttttgtatttttagtagagacggggtttcaccatgttagccaggatggtcttgatctcctgacctcatgatccacccgcctaggcctcccaaagtgctgggattacaggtgtgagccaccacacctggccggcttttttttttttttagcctgttgttaaacatttatcagcatgtcattggatatagtccccctttctaaatccttacagctgggtttagaccacataatgaaaataggaatcagagagtaacaaaggagagttaccatgaagagaacttaaaatttgttattagaaatagttattctgagtcataagctttcccacttccaccattgtcttcagtttcttctcagcatagcatccagagtaatcctgttaaaatataaataagaccaggttgctcctttgcttaaagtcctctaatgtcttctactttcacttaggtaataagccatgtttagttacataggattgttcttcttacctcctgacatccattattcttcctacaggtcactctgctctacccaactgggccaccttgctgttctctgagcatagtggatgctttcttgccttagggttgtttcatggggcctacttgcagtatagaatgctgcacgtcccagcatttccagctgtttcagaaagctgcatgttagatccatttccttcaggtcttatctcaaattcacttctcagtgagactttcttcaatctgctgtattacaattacagccctcccacattccctatcccctttcctctctagcacttactaccttctaactaattaagttgattttaatttttgcttttgcccataataagctctgtaaccgaaaggttctgtttccacaactgtgtgtactcataggcaaaatggggatatatgcctgcttcacatgcctcattgacttttagtgaggcccatgcagggaattcttgtgtaattagtctacaaaggtgtgaggggatatttttgttgttttgctatttatgcccatcttgctttaaaccactcccccgcaaaaacctctccattttaacacaggatagaaataacaggcttattactatatttatctctgaagattttagtgaatcctttgtttaccacttggatcagataattggactcattataagccactgaaaacctggagaataaaatggcaacccaccacaaggtcaggggctcatacgtgtcccgcactatgttaggggtactgctgcatgtattattttgtcctcactgccacactgcaggaagggtatacatcactttagagataaagaaactgccgtttagagagatctagtatcccattaaggcaccagagctgataagaggcaggtctaggaaagaattcatatttgtctgattccaaaagtcaactcccacccacctcagaaaacctggttatttaacctaaatgtgaatattctcactactatggatgatgtttctcacttatatgttatatttcttttcagactgtttatgaccagtggttcatcaccctttttaacattgtttacacatcactgcctgttttagccatggggatttttgaccaggtatgttttttttccatctttataacttagtttctcttttatgccttttagttttttgtgggttctaagtagaaaacacaattctaagtagcagccctaggaatgcagttgttttagttgcttttgcatggatcacacatgcttccaggtccactgtgcctcccttacccctataccctagcttccccaaaagcattatttgataaaagttggttactcttctcttagaggttcacaccccatagattgctctaaaggctctagaagtcctgtacgaagtaatctctttaacttcattttaacccagcatttcccaaacttctatgactgtatatgttttcatatagcacctattaattaatatgtctcagaactagtgtctgtggttcacacacggggaaatgctgccttagcctctgagagcttataaagaaccatgcaatgatagaaaatcatggggctaggttggaacacagggggctaacacctgcagtgagactcccttgttgcgaacatctgcagtgagacttccttgttacacacagcccagaacaggagccacagaccagtagagcagtctgccagtgggagaggaggatgagaagctccatggccaaggaaagaaagagcatggatttcttttgtcccagcatcaatgtgcttgagtggggagaaaggagaggatcaatcacaaaaatggtagatccttggcatactcagagccttggaagggacttcctggaaaggggaaaaagtctggctgcctgtggggaagtgaaagactagccagtggaatttccgtggcacaattagagtgtcttatttttaaaaagactttttgttttttaaaaaagtatttttaaggagaccacattttctccaggctgttgttagacctatttgctaggcctcattttctgggccaaagccgtctattgcaaaatataaatcttcacattatgagctcactccagtctcccatttggctggctttgtagtcagttgttaagtctcccttctcatatgtaaaaagggcagtttgcgaaaggcatattttctggaattatacaaaaaagtaatgaacttctgaagaccttagatgtaaaggattaagcacattcatttctcagcgcccatgtttacaagtgtttcttttcttggagctttgtagctgcccagaatgtggaataaaataataaaaataaagcagtttctgggaaaagatggttattgtgcaattcaaaaaaaatataataaggcttcctattaccatcaagttgagtgtctgctcctctctcctttcctgctttgtcaaccttggcccttaaactgatcacaggatcgtggaatgctatgctggacaggcctcagcaatcatcaacagatctgctcattttttaaggcagaaaccaagccttggagagtcatttccctaaagccacacagccaataagtgacacggctaagactagaaccaggcctcttaactttgaggttgctacattattgctattgttgttattatcattattttattaattgttatttatagaagcatctggcatatttattacttacgatgtggcaagaactctactaaatactttacatactggtttaatcatggcgatagttccatgtgggaggtgttattgtttgcatttctgggcatgaggaaaccaaggctcaggcggattaagtaacaggtttaagataacacaccagctaaacccgttaccagggattgagctcatgactgtcttgtttcaaagcctgcgcacataaccctcagtcactgaactaggggaacaagcatccaaaagcatctaaaaacaggactctctaaagagaatatgcctgtgtttttccatgggactctgtttggagagacctgggccatcccacaagcaggaaggggaatgttcctctcccacaatagttcaccacctgtgttgcttccactttcgcctcttctcctccacctgtggtcctctgatgtcccctgtggttgattcttgccatcctttttggtttttggcatttggctttggtgctcactgtggttatcagcattactttggagctggctggaaatgcagtcttgggccctcagccctattgaatcacaatctgtttcccaggcgatttgtgtgcacattaggtttgagaagcatttagtttctcttgggacctggttggtgtcaaatgtgccaccttctcattctgtctatattctttctttgtcctgaacacctggtaactgctgttaaaattctcactgggtaggatcctcatcccagcctccttctcacctggaatcccaaatgcagtttccccttttccctgctctcttcttcctgctcacttccctccaaagtcatgagctctgatttgacaattctgactccacagctctctgctgtcatctcctggtcactaccactcactaccttgacaattaacttctggggcccattggctgcacatgatgtgctggaattctgggagcacgaatgcttctgacagcctgcaggagagtgtaggaaagaaacttcaatttgaagccaaatagctaggctcaaaccaagccctggttctgctacttacgagctgtgtgacctctcatgaatctctcttggagactcaagctccttctctgtaaagtagagatcattttattatcttctggtttattgtgggaatacaaacaagataatgtcctgttctggcccagtgagtagtgcattttaggacatgtttaaacaggcatttgctatttctgaagatagggaatacaaggcctctctgactctttttaatccttctccactgaaattacactctgtttacaggatgtgagtgaccagaacagcgtggactgtccccagctctacaaaccaggacagctgaatctgctttttaacaagcgtaaatttttcatttgcgtgttgcatggaatctacacctcattagtccttttcttcatcccctatggggccttttacaacgtggctggagaagatgggcaacatattgctgactaccagtcctttgcagttaccatggccacatctttggtcattgtggtcagtgtgcaggtaacgctgtcggtgtaagcaccttaacttgatgggtttacaacttttactatttcattgttgattgattttgtctacttgttggggggaaataatcctaaaggaatactggggctgtccttttaagtacacattttgagatgaaagcaggaagctttaacataaattactggggagaattagcattaggcgtctgtaacatccatgttagtagaaacctcacaatgtatcacttctttgggttgtgcattgtatgtaaagagaaatgattatactattatttccttcttgtatttgaagaaaaaaaaaattccaataacagaaggagaaactttcccatgatttctttaagacttaataactgccaggttttaaagtgagatctaaagtttgcttggcaatacatttctatggagttattcaagaggttcaatgctatatctgtggcatatccgaatctcacactcagaggagctcttctggtggggatgattttttgaggttccattgaccttcttccatcttgagttgtgtctctatttcctttttactgtgaatgtggtcaatgccattagatactgagttagagttcacaaaaacttttatttcttgagaggaggccttgctatgttgcccaagcttgtctagagctcctgggcttaagtaattgctcaccttggcctccaggtggctgagattataggcatgcatcaccgcacatagttagaaaaacttttcctctattactatctgtagctccgagtaggtacagcaagctatgtgacctctgttttattttgttgtcttttgattactgagcaaactgttaataattaggtgatcttctctgtcatgagggtacatttccaattctctggattctccttccatagagaagacagtggtggggtgtacagggacatctttttagtggtaacagctgattcacctctggctcagacctgttcctcggtactccaagagattatttgaaaggtagtaactgaaataaaaggccactatctgaagaagcagcaaatagaaaacattcttcatactgtcctgttaacatgatctgtttataagtaagggtaataaattacctggaagagtcattgtaggtgtgacatgtaacaagcattaaatgtttgtgtgtatgtgtgtgtgcatgtgtacatgcatgcatgtgtgtgtgtgaaactggtgttcacaattaaccctacaatttttggttaacttaatctttataattttagaaaaagcctgctgttatgcccatgcatctttttctctttttttttgcttgcccataatttgttttatgtgctattacaatagtgccagtgccatgtttttatattaactttatgtttagaagctgtttttctcataaaacatacagttcttattccagttgaatgttgaaatcacatttctactttctcacaagttgagagcccacagaaactatcacattttaaaaacattgtttagtcacgaaaaaattacagaacttcaaaagtttattttaaaagcttcaagtgacttcttgtcgcttgaagtttttaaaataaacttttgaaatttctaacccttgattatccaagttttataagaatgatatagaatgatatccatgttttttcagagaggattcacaccttaggctcaaagtaaccattagcccctcattcaggatgttttgcaagaggaaatccaaatccatttgcttcagaccttaatggccatttgtctcttcaaaatctattctctgccttccatctcctcaaggacaatagtggtcctagccatccctccaatcccattactcacacgccccagccacactggcttttgttctgctcctggaattcaccagtctcttgcttgccttatggctttgctctttcctgcctggaacattcttctctcagtttccctcacatgtcatttcttcagaggggcctccctggatccatttaaactaaggcccctttattttctctagtggaatagaaatcaattattttatctcatagttgtcatctccccttgtaagtacaaatttagtggtgtgttctctcgtttaatgtctttctacctcctagagtgtaaccttcacgaaggcagtggaaatgtctgttaatcgctgtatacccagagctgagcacatcacctgttagtgtgacacacaatggatatttcttgagtattgaataaatgagggagatgttgagaggaaattctcctgctactgatcctgtcataacaagagagttcatctgggtgtgtcaagttcctaggaaagaatcattataactgatgtgtttacagattgtgttgacagttttcaaatgtgcccaaagtttccaaccagtctgagagagggtcctcctgtgctgagtccagcagaatgacccagctgtgaaatgtggtatggggaaaagtgagagattttagatgccttcaaaagcaaggcagtgcagggagagtcaagtactgcatggcctcagaaggtgggatgtgctgcggtcgccacacctcctgcagccaggcagaaacttaggccatgtatgtacctgtggagcctctgccctaaaaacacaaaatccttttagtcttattataaaaggaatacattgcaggaaattcaagaaaagcataaaaatgcagggaaaaattaaaattcacatgtaatcacaaatcagggttagcatgaaaaaaatggaaatcggattatatatatataattttatgtcttattttttcacttaactttgtgtcacaagcatttatcttatttataaaatattctttgaaatatcccttttaatggctgtagtattccaccgtatgaatatgccataatttattcaaccatgttgctgttagattgcgtctacatttcactatggcaaatgatacaatggcaaagtttcatgtagtacataattctcagcatgatcctctagttattttctaaggttatctccttaaaggtgggaattctgggctagaagacataaggaagtttaaggcacttgacacatattgccaaatggctttccaaatagattgtatcattttcagctgaagggtgcaaattacccttctcagcagcccttcactgatttagagtattactttgaattattttataattaaaaaatggataaccttttgttgcttgggaaataatgaatacatcttgttcaaacaggaataatttctttaaaaaacttttaatttcggaataattttaaatttgtagaagagttgcagatactgcaaagacagttcctgcataccctcacctagcttttctctgatgttaatattaacatcttacctcaccatggtgcatttgttaaaactatgaaattagcattggtataatactattaactgagccacagatttgattcagatttctccagtttttccattaattacccttttctcttctaggatccaatccaggatccaatccaggatcccacattgaatttagtggtcatgttccttagtctcctcccatctctgacagttctatagtctttgcttgtctttcatgaccttgacacttttgaagactggtcaccaggtattttgtagaatgtttttcagtttgggttttctgatgttttttcttagaaatagactgaggttgtggatttggggaaagaatcacaaagagtgatgtgttcttgtctcatctatcagggagcacatgatagcaacatgatttatacaggtgatgctaatcttgactacttgcttacaatgatgtttttcaggtttctccactgtaagctgactatatttccctttccatactctagtgcctaaaagtaagtcgctgagtccaacctacattcaagagaaggagaattaacttttacctcctagaggaaggagtatcaaagaattagtggttatatgttaaaactgtagcaggtgtaattttaaataaaattgctataataggggccccaaaggtataagggatttgcccaagatcacacagtgacaacattgcaggtttagcactaagatccaacagtctgatttcccaagtcgatgttctttaataaaggcatctgtgattattctgttaaagatttgaggcaagcatttcctacagcacaattattactgggctttgggtagttaggcatagttgggaagcagtggaatgtaatcctcatcattgcaatgcagacagaaagtcgtgtactttaaaagaggtggtgctgcttgtcacccctctgtggctgggatcactttgccacgttacagggttgaagttccctataccttatccatatactcccagcccattgttttctcccctacctaatttctccctgccctcactcccagtcccactcccaccattaattctgagtgcttgagggcctaaaacagctaggagattgaggataactttctggagaggaggatgaggttagaaaagatccaggctagaaatggtggcctagaagcagaatgagtagaggcttccagtgtctggcatgctttggttgccactgcattcctaacggaaaccacagggctaaagaatacaggggcaaagggatatgaggagagaggttgaaattgagcaaaggaagtgaaaataatttggttgtgttatccacctatccttcaactctgtctgtcttaacctagatgaccaaagcaggcctgtccttgatggcagctgtaagagacctgtatcatcatcaccaccatgagtgataccatgcattatacttgctcctcatgatgccattatgcagtaaatattatgggctgcttttatagataaagttcagagaggttaaatgacttgcctgaggtcacacagtaagtcccagagccaggagaatccagttctgtctaattccagtgttatctggaacaaagtctacagtgagactggttaaaacacaaaattttcaagaaatatgagaacaaaccttatactgagcgtaaaggaaacactggatactgtgccatatactgggataatcccattatctcatttaattatctttatggtcctatgaaatgtaagtactattaccaccattgagaaaacagacttaacaagaagattaagttatattccaagtcatacaaaaagtggtaggccaggatttgaacagaggtcttctaactccagatgcccagctccaaagctacgtgaacctcccttctttgtaaagataagtagaagctgtgggcctccccagtcacatagtaagtacagggaattcgtggtccccacctctctcactcatgtgggaatacctaggataccagtatcacccttggctaacatgggagacaaacggttaatagatgacaagcacataggtgtttctttcaatggcagagtttcaacttgaggaatatatagactcccagcttctgtcatttcagtctaattctttggcaaatattaccacttgtttttatttctaggaagccctgaaaatgtctgttttaccataccagagttcttagacccaagtatgtaaatgtttgtaaccatggatgctaggcaattttggcttcaatcaatcaaaaactgtggtctttaatatatagaataataactttaaggaattctgtgaataagctcactttgacagcagcattaatatcctttcctcactgtttaagcttgacttttcattgtggtaacaaccccatgaaatttccatggtctgtaattacagttataaatcttatgtcctgctgatgctacaggccaaatttaagtagtctctattgtttttttaaaaaagtatttttcaattatttgaattataaaatgctcttttaaacatttcaaagagtacaaaagtgtttaaaataaaatgaaccatcttcctttccttcccttctttaactactatgatgatgaccatagcttaaatcctcccatacattttctgtactttgagacgacgcatacacacatatttaacaaaaggggataataattatgtatactgttctgtaatatgcttttcttgcttaactagatattctggtcagctttccaaatcaacacattcagatctatcttaattgttttaatagctgcacagaaattcataatatgaatgtataagtatttatcatctattgataaacatacaagatgtttctatatgtgttttgctattaaggcaatgctacaatgcatatattagtacatatattttatatactggcagataagttcctagaaatgagacttctggggttagaactcctaatttttaccaatctgctggataaagaatggtattttgctgttttcattactgggtcagagagtatgtacatttaaaattttcataaatattgccataatacgttctcaaaaagatagtagttccaaatgacagacactttaaaaatttaagctaaaaaaagagctttattaaaacatattaggtagcttcagtggaaacactgctgttattacaccttacagcttggttgtcatcaccctggggacgggttgccaaaaggttcgccatagacttccagaagaaccatcacctttgccatcatgtctgtcaaatgctgagaaaagcatattaaagtttgccattgtgattatgattcctattaagttttccgtgtgtttcaaagagatttttacctcatataatttaagctatatctttgccacataatggtttctgattgttaatttttctttgtagtttttatcttttttcataataaaagattcttaagttttgtatttttatattagttttcttctcttgcttttttttagtttacatttgcctgatacataatctgggccaatttcttaatttccatttatttcttgtctcattctattagtcttccttgataagaatgtttaagctactcatttttattataataacttgtattttatcatgctatattaatattattttctgattacttttaattctgcttttcaattttttttttaactttttcatacttgtatgcattaattatggttttaaaatatcccatttctggccaggctcagtggctcacgcctgtaatcctagcactttgtgaggccgaggcgggcggattacctgaggtcaggaggttcaagaccagcctggccaacatggcgaaaccctgtctctactaaaaatacaaaaaaattagccaggcatggtggcgcctgcctgtagtcccagctactcaggaggctgaggcaggagaatcgcttgaacccaggaggcagaggtcgccatgagccaagatcacaccattggcgacaagagcaagactccatctcaacaacaacaaaaaaatcccatttctaatgaataacttacaagttttactattatattcttattttactagtgatttctctttattttcatagttatttaaatatatatatttccatattggcagaatggaactccacagataatatgaaattctatccttcatcaaatgtttcactatcttgttctaaacctttccttatgcttcttcaattaaacagttttggcaatgtttttatcttacttacccttctttgtccttactcccatccccaactcttacatgttaattatttagaatttaattccaggatgttattaaatgctcctcctgtaacatatttgctgactattcccatttttttccaaattaatactgccctcatacattattactcatctagaactaactatttacaagaatcattgctcaccactatttttatgacctgtcttctgttattttgaggtctttgtacagttttaatttttatttcagtgcagaaatatccttgagtaatttcttcagaaaggatattgagatgttatactttttagcttaatgttttctgtctttgcctttacatttacatgatatattggacgagcataagatccttgagtcagtctttttctttaggaactttgttgttgcttcactatatagttgttgtttcaacaattttgtgttgtttcacagtttcactgtgacagtttgatgttaggttgattctttttcctcctctgtataaaagattatgtcaccagaatcttctttcattactttggataggacctaaaggaccctctcaatctgaaaatctatgctatttgttatcacagagcagttttctgctgtcatttctttgattgttacttttctatttattcctttttctctttctaaaatgccattatttgtatattggagtcatagatctgagatctgtgaatttgctattcatgtctcatatctttttgcaaatggtttccatgtctccaagtctttgttctctattgtgagatattatttgtattgttttgtccagaatattaatttagttctattcattgactattctttggttttgctgttgaatttttaaattcaggaatagtgtgtttttctttcagattatttttttctgtgacctaattgcatcttcttacggggtcttattatattttgttgttgttatcgtgcttgtctgtctcttctattagttctgcttcaataggagccacctattcttgctttttcagctgaatccttttaaatgggttgtaatttttctttgcctactcttacccacacagatcaggctatcgttgactcttgagagtgttaaactaacaggtggtggaaggtaaagttggagattttggtgagatgtcttggcagccaaatgaactggaaagcgggcatgtctttgctgaggcatggatggcagggctgttttcagacctcctgaggggagaaaaggctgtacttttataaaccctgtagttcacatcaaaggctgccagcatcattttaatggggaaacattttaagggacagtaaattacaagtgggaagagaaagtatgtctcagcatgttgagagggatctatttactaagcaggtagggccccctcagacagatgagaaatctttagtcttgcaacaaactactagaaatacaaaccttcacttggacgtggatcacttgggaactatgagatgcaaataatgataccagaacctacttttttattctctgaagaactcaagtgttcatatttaccagtggtgtccttgattctccagtagcagaccactcttctagctgagctgccgcaacaagttactagaaggaagaagagctcgtgaccatgcttccaggccattgtgaatcccagtttctgaattttatgccaaaataaggctgaagaattttctttgttataagttgagtaattgaagagaaaggatcatcaaaatgagttgggatattggtgtaaaaaagatcatgcatgtgtaaaaatggtattgtgaaaatttacttacagagtataaaatgttgcacttgcccattacagaaagaatttttttccaatagaaaagttttgagagacatttgtaaagtaacttaaaaattataagcccttgtgctttcatatttctcacttaaaagaagtttaacatgtttaacatcttacctcctgattctgactcgaccttggcagatataatggcttgcgtatagaagttctaaagtcaattttctaccagaaatatgaagtcagatcagtcccctgtgtgtgttcagaaagtggggatgcccgcggttggcttggcaactaggcaggtgcaaacttcctgccacagggcagttctcgcgaaacatcacgaggtaaaatgatgctgttttaatcctcaaagacctcccgtttgcatttgattttatttacagatagccttggataccagttactggactttcattaatcacgtcttcatctgggggagcattgccatttatttctccattttatttacaatgcacagtaatggcatctttggcatcttcccaaaccagtttccatttgttggtaagtgagtcatgttgactagtggaacctagtgtctgctgctgtttacttgtcttataatttattttttgtgttaggtagagctggggatgattagtgatcctttgtccagaaattgtttgagccaggcatctgaaggcttccgagtttaaaagtggctctaaaagctcagtttctgctgtctctactggatgcagaagaatcactcacagtagcttacaggttctcaacagcttacatgtagtaggctgtctctttgcaaatgagaggcatagcacatacattagggctacctgaagacctgtcaaatgctcatatatggtagagagaagaaaaagaaatactagactctccttttatgccacattatcaccaacatctgccaaaattcacccatagaacttatttgcatttagataagaatgaaacaatgtataatttagagccttctaaaaattcctggacattaatccataagtggcatgaggagtaggctttgtagttagtcagtcagggttcaagcgccagctgtgccacttaacaagctgtgtgactttgggcaagtttcttctttccatgcgagaatatataggaataaacaaaactcagtttctcctatactctcattcagcaagcaacacagaagacttctgtgacctctggtcatcgagaagtagggatttcttcccaccaacaaccaatgaggtgtttctgcagaggaccccagctggatgttctccaattcaattccggcaatatctccttggagggagtgtcagatcctacaagttgagggctaagttccgcatgactgcccccacacttccaatgctagtagcaagccacaggatgttttacctctacttttggccagctggctataaattggggtttccccccaaccccctccctgggtttgattaatttctagagtggctcaaagaactcagggagacccatttactggtttactataaaggatattacaaaggatacagataaagagatgcatagagcaatgtgtggaggaaggggcgtggaacttccatgccctttccaggcatgctgccctccaggaacctctacatgttcagctatctaggaactctttgaaccctgttctttaaggctgttatggaggcattttttatataggcatgactgataaagtcattggccattggtgatcaatttaaccttcagtccctcttcccttccaggagattagaggctggggctgaaactcccaaccctctaatcctaccttagtctttctgatgagcagcccccatcctgaagctacctagggacttccagccatcagtcaactcattaacaaataaaaagacacatatcactgaggatttcaaggagttttaaatctatgccagaaaacagagaagaagaccaaacatacagctcacaatattatactatgcattaatgtcttcacttataaactgaggatattaataagcctattttcatggaaaatttatgaggattaaatgaaataatacatataaagcacttagcatgtatcctggtacatagtactttttaaatgttaaccatggtgatggtgattattattattcatgcaaatgtggctcgattactggtgggaagattgcagaggaatttgaacatcagatgagtagcaaaggaccctctaaaatcccttaaaaaagattctattattctacaaagagtatacctctggtctatgtatagggtataccatcattgcactccacatttcaaaatgattcccagcaaaggccactgagctttataaaagagggatattaatatactttctcagaggttttgaaatctctagtgtgtgtgaaataagctgctaaccgagttcatctaaacaaactggaaaagagagatgcgcagtgaccaacattcttgaacttaatcaggcaagagtgagatttgtatccactaattgaggaagtaaattcttggactaatttatgtagaaagcaaaataagaccacaaggactaaaataggattataaggttagtaaggttacaaatccacattgatgcaaaggcacctgaaattgtaattcaatttaaattcacgcatacacttaaaaatgttcttcaccttttgccttttcctacatgtaaatggaaatctttaagttgcaccactcttacttaatatgtactggtaatacgttgtttaccaaaagattccaactatgtagagacatgttggtcatgagtaagaatgagcatattgggaaacaaagacaccaaaactatttttgttttatttttttaagatcgtttgccaaaatgaaaagttcagtgtattgactagaagatttccagtcctaagagagcactgtgatgcataatgagactagaatgcctcaactggagaaagtaatttgtgcagggaccactcttttccagctaagcacaagccatttcagtaattaattactgagctccagtgaaattttttaaaagttagatcaacattggggtttcaggaaaattttttttttccttagtagctagcagcaaacaggagtgtggtttcaaagtgaagcttgttttcccagccatgcctgagggtactaagcttcaaggagctcaaagagacatttaattgattaagtcaagtttgtttctgcccatggctgaaggcaactggaatcagctgctcttgggtaggcagattcctgtctctaaagccagaaaaagcagacataccattcagtagccaagccctcatacccaaagcgcatttgaatggtggtaagctttgaatactgggataggggacctggataactgggggtatgatgataaatctctagaaaatgaacagggacaaaagtttattttggtgatataagcagggttggcatcttcccatggagcttgtctgcctgccttactgacccgtattgccttgtttaaacccacaatggggtatgtgaggtgtgagtaaaaagtaaggaaactggcttcaggcttggaaatgagtttcactgtcctattgccctagcatgttggatggctgcatcaacagtctcctggtgagggaatgttcttttcacaaacccaggagccttcttgatcttggaactttgaggacttcataaccaagtgaacaatagagaaataacaagttcctctgaggcaggttttctcgggccattgcctgaaattaaaaagttggtcctgcaatagataaagctccccttttatgacaagccaatcaatgcgatcattacttgagattgtacctgcatctggaacattttttgtgtagctttgatgtgatagttttaattcaagagtccacaagggtaaagggtaaatgtgccttttaaaaataatggctgctttgtaaccacaagatcttgatgctggaagagagaattgtgctccgtgagtgatattagactgagcctgggtgagagaatgcttggctcaggctggtaatctctaagtgatcaggccactaagccgttcctgagggtgatcttagcacttctgccttcttatcatcatggtgacattaggtgatccaaatctcaccattgaaaaaagatcttggccaggcgtggtggctcacgcctgtaatcctagcactttgggaggccgaggcaggaggatcatgaggtcagatcgagaccatcctggctaacatggtgaaaccctgcctctaccaaaaatacaaaaaaaattagccgggcgtggtggcgggcacctgtagtcccagctactcaggaggctgaggcaggagaatggcatgaacgcaggaggcagagcttgcagtgagctgagatcgcaccactgcattccaccagcctggaagacagagcaagactccatctcaaaaaaaaaaaagatcttgtaggaacaaagaacctattaattaataattcagtcctacttgtaaccacagtgtatattttctttaatgattgataggtaatgcacgacattccctgacccagaagtgcatctggcttgtaattctcttaacaacagtggcttcagttatgccagtggtggcattcagatttttgaaggtggatttatacccaaccctgagtgatcaggtatgtcacagtgctgatgaatacttgaaggctggtttttggctcttgaaatggtgtccttttctgccttattggaagctcagagatgggctaatgaaattgtcacaagcaaacacctactggtgcatgagatcacatcagaatagatgggacttcccacatcttgaatgtactagtccttagtgccatgaagagaggcatctatactaaatgtggatggggagtcataaattacaagttgaactgggtattttaaaaagctgacttttaaaaagaagatcacaggcatcattttggacaatttttccaagggaaaggcaagctataggaaaagatactgatttgagggcaagtacaagcacaataaaagagagacaagcatggtatgagtcaaaggggcttaacatttttgtagaaatccagtagcagattcagaaacatgggtgagatgttaccttctgaacagattaagaaggggaagagcagcatgctgggtagattagtacacttggaaggaaaataggaagaacaggttatagaaattccttaactggagaattaacagaacatatttcagaatttcatgggaagaggagtaagtaggacaatatcaacttaggtcaggactcagataaagcgtgaaaaggagaaagggagacaaacattcatagccatgtcatgagaagggggaacatgctgctgtggtgagtgggaccaggccagtgatgctgagagagactgaggtaggtaggtaggtaggtaggtaggtaggtaggtagatagatagatagatagacagacagacagacagacagacagacagacacacacacacacacacacacacacatttttttttaatcatgatgtctctgacattttgggaccaaagtgtaaaaagattccttccggaaaaattcggagtcccttgtcatatctgtcctctctctttggttctccaagctcattctgacataaacccagaaaatggcggatgagttaaggaaggaaggatgtgcttgtttgtccgataagtttgatcgtgatgttctgcttgatggttttctcctgacacaaaagtcaggatccaagtgatttgccaaaccagagaacaaggttgcttacaacaaacctcaggtctttttctccttagctttacagggaaatgaaagagtacagcaaacctcaggtctttttctccttagctttacaggggaatgaaagagttgtgggaaacctactcacataatagggaacatttagaaaggccatacaaacctaagaaatcaaaaccctggaagtctcatgatacgttgagctaccacaagaattgaatatttctgactcattttctgaattttcttctagtccagttactgacaactgttggatccagagaatctctaaaagagaggaaaaaggctgttttgggagaatgaaattataaattattatgctgactttgggcggtgcatgttagaaaatctttctatacaaatgtatgctcatatgcattgaagatacatgagagacaataatgaaatttgtctgatatttcttaattacttaatagtgtctcgatagagataaaaatggaccagtgcccccccagtgttatcttttgggtggaaaatttcttagtttttagatttaaaacttccttttgcaatgttgtttttacttataaaaaaaaaaggctttcactttacaaagtgggccactgcctggagtctatcatttggatgcatcatctcactttgggtctgtttctctccagatccgccggtggcagaaggctcaaaagaaggcaaggcctccaagtagccgaaggcctcggacccgcaggtcaagctcaagaaggtctggatatgcttttgctcaccaagaaggctatggagagcttatcacatctggaaaaaatatgcgagctaaaaatccacccccaacatcagggctggaaaagacacattataatagcactagctggattgaaaatttatgtaagaaaaccacagacaccgtgagcagctttagccaggataaaacagtgaaactgtgagtcaatatgaatttaaaccacgtagttatcttttcacttcaggtggagctgaaattctgctggctccagagtttgagatttgaggcaagaggtggggcaggcagattgcctcactttacttaaatctgcggcagacaactgccagtgcccatcaaacaggagtgtgcgctatggaaaaccaggccagagggtcactgtctggtttgtgatttggtggacaaaacactcgctgttacaagtacagattttttttttttttaaatcaacctagataccaattgacctgaactttagaatcttatttatggagaaaaacttgtaaagctgcatattcactgaatggatcctcaggcggataaaagggtgcattttaaaggtatatatccaagctgaaaagcatgcctattgacagataaacatgtatctgtaagatcagcctttcccaaggtatacttttaaaatttaaagcgtgtactgtgttgctttcagactgagttgcatgtcactctttagtcttgatatctacctgtctgttcagccaggacaacaaatggcttccaagcctgaagaatacaaaagtgtgcttgtgtttctcatttttataccagtctagggacaaaggagactgaacatctttgcagcaggataggctggtaatttgatcaaatttattcaaaaagctctcagtctgtgtcatgtaaggacatgcttatgaaatgtgagagaggctcgccactaagtattctaaatacttttcaatggcttttctaacaacctcagtagtaatttgctgagcatcatccagaccattaatagaatcagcaaagcactggaatttcacactttaatgataatattccacatagtctatgggcaaatattttcaacatttccaatttttaaagcttcagaattgaagccaaacaaattaataaataattgttttaattactatttaaaaactcaggtttagattgtttaaaattagttgcttttgatactcagctgtcatgtttataattcaaacatgtagtaaacatatgtaggtaaggttgtttttttggagatgttgcagctcaaatttcagtccacatatgaatcatcagtgtattttccataaagtgattcgggcatatttgtgtgaaaacctcagttctgtcacttcttacctctataaacttggacgataatgtgccttctctgagactcagtttcttcctctgtaaaatgaggacatactacctacctcacgtggttggttgatgattgtctgtcaaagcacaaactctgaaattattaaaaacataattatttcataaacagatgagttaagttccagttaactcaacatcagtataacagagcaattggaagagaatatgaaaaaactggaatctaaatagtcagtgaggaaggctttgataaaatgaaattgccagaaagatataaaactggttagggtcctacagggaaataaaattataaccgtggaggtacatttctctaccagaaagcaaaaataaagcatcatgtcttaatggttttctacaaatcaacttctaattctacagagtccttaatctggtccctattaaattcttggtcagacaaagttacatttcccaagagagtcaggtgacacttgagtgagtttgatggataatgagctaatgtgatatctataggtcacaattttttaaaaccaaaattttcaagtctgggataatctttcctaaatgggatcaaatgaaataatatgtgtaaaagagtcaaatgcagtcctttaccatagtaactgcctatggacgttgtctttcccttacatgcctgcctacacttaaccagatgttggttttcaatgtctaatttgtcattagtttcaccacatttgctcactttttgtaacatttttgcaagatttgaaaactttcagtaaatgttttggcactattggtacttgatgttttatctcttctttatgggaaattcattggggagatttttgttacattagtccacgggtatttttttctctcctttacatgctggggaaaatgtactcattcttagaatcagagtcaagaataaaatgaaacaattggacctatgtgtaagggataggaaagattagaagtggtccaattttgcaagtccagtttaaattaaataaggctgtttataaacaaatagtgtggatgattgtgagagaaacatattatcagcttactttggccccatgagatccaagtaaactcacacacccattgcgagatcattcaattacaagcgccagggattattttgaacctgaagatgaaaagtgatgagaggtgggtagtgatggtgggggcactggggaataataacattttaattttacataaatgttatcaaattatttggaaagaaaaactattttttctagatttaagctgataatcttgtgtttttaaaatctcagcccaagttttgagctattataggtaattgcaaattgtgtttccctgacttagctctgctatctttggctctctcctctgcctccagatgtatatacttatgaaggaaagaaagagagagaggaaggaagaaagtaagacagataaagcaagagaggaaaaagtaatggaggaaaggatggtgggagggagaaaagagttttccagttatatgtttttttgagataatctgactctctgaaaaataaatgtaatccctcaaagaaaaaaaaagtggattatatttgactcttgaatagtaaaatttccttcacatcttgtgtgagaacaagaaaatcttaccagaatgggggccgggagccctggcttcctgtcacagtgatggtgctgatctgtgtgagctggggcatgccacctgacttctccaggccttggtgtccttgtccattgatagagaaattgggacaggatggtcttaaagcccttttctcatttacccaatctgtgagctgttcttgtcagtgttgtctgttgtgtatttgcaattgcctttgttagagagacagattttctatatatatatatatagagagagagagagagagagagagagaagaaactgacttggatgttctcttgagggcagggcctggctcttcaggctgttgtactggtttgtatttctctagactagcccctgatgcactgctgtctctggcttttctctcagctcaccacagagctgctaaaccctgtggtggcattttacctgggtcagttgaatgctgtttcttgttaatgattcatgaaggtatctccacaccctcctttcctctctcatcattttgagtaacaaaagtatccagatgtgaaggtaagatactcatgtcctgttaagaagagctcatttaaaagtcctccctaccttgaatctgggcttagaggagattctttgagcctttgttcccttgggaccgaagttgaagcaacagagcttgaacaattttcttcatagttatagagcactttgcagtttgtgtatcattcttacataaactgtattgtgtctgtgtagatgtaaagtgtgcagatttagggaaaagtgtaaataaatgtaaaaatgttcagaaatatatgtttcaaatgttcttttacctttcagtgcaaataagaaaaatctcccttccttccttcctttcctacagcatttagtgacgtcaggtaggtgtggaaggcaaaggaaataaaaatgtctcaaactatttctaaaaagtcactaggaaatccaactaatgagaaaagctctacttctgatttttatggtaagaaattgaattactctgttagtgtgtgcacaaaatgcctcaagattgatataatctaattatctcagttatatgactcagaattattattttacactacaaagagtaggcacaaagttaatagtgtaggaatccaggaataatgatgacttacagactttgtgatggaattctgcaggccatgggtcagataaccgtgtgggggggggggtcacaattttccaatttttacattaacatctggtattaaatgtctgcagtttgctctactgcgtcacatttcattccttggtgagaaatcataagcttttgcaattctctagcctaagcctttagctgaactgcctggaagccagaactaaatgacccacgtattaccaaatgtgtattgcaaaagatttggaggaccttgctgggctaatctgtagtttggggctatgacttaaccctatctgtccttgaatttcaaaacttcctggcagatctattcctgtaactggtgcagaatacaaatcagcttggagctgcatacataaacatccagatttcaagaaataataatgattagttggccagatatctctggctatctcaattcagattcccataaggtttataagggcaagttaaaatttttaataaactgcagccctagacttacacagaaaattcttactggagcaggatgcatggagagatgatagttaacttggaagtaaagtaatgatcaagaagaaatctagttgtttcaccccttgtaataaatgtttctatactccctgccttcttctaggtaaatgtgagcaatgattaggatgcttctttaacagctgatgattttccttctcatcccctttctgtctctgctccagtatgtgacactatagagatacagggaagtatgagataatgcaccaagattggacagaaataataatattgaccccaaaacatcctcagaaaaggttttgaataaaattcctgttactgaatttcttgagataatgtcactttcattaaatgactactgaaaaagaataaattaatttgggattatgattagtgactgggggagatattaagcttatttaacaaacagttggacagggacactgaccaataagaatgaacatgggccatcaatggctagtcttgccccactgctaatggcagctggcactctgacctatttggaccacgtgataagtcacatttgaaactatacctatttttctttatgaggtgcctatttggtctaaaccagataaaaacagcaagatttttttttaaaccaagtaacaccaaaaacactatagggcaggtcaaaatattttcctggtatcgttttgtgtggtagctaatagttttctgaaggtacgagatgatgtgttttgaacaacaggaatagtttctaactgcatattattgacaaaatatgtttaggtattgtgtatggttttttgtctcaatgaatactaacatttttaattgaaatatttttaaaaatatatattttacaattataatataaataattgtggttcatagtttgggagcttagttaaatacttaggggtagacaagatgaccagaattatctttttgattgacaggcaagactttgttttacggttccatttcttcctcaaagttctcatgtatggttcacacatagcttacatctagtagacctctcagatgaaatgtactaacaaatttagttctactggactaaatttaaaattaataagtgaatcaatcacttaatagaacactgagtgtggagaggccacggtacaagataaataagaaatggtttctttttcttgccttcggagaggttctaacccagtatctttcaaccatgcattatacataccacagttgatggaatctaaaatgcccccttgtaaatgatgcaccattcatttacataccacgggaaaacaagaagaatattgccgcttagagttgtaaagatgccattggatgtaagatttacttctaatttcagagatgttaaattatgaaatctggtaagtattggattgcaggaggtttaaaaatatagttcatgtcaactacttttttattgtattgctgtacaggaagcatgtcagcatctgcttctggggaggcctcaggaagcttccaatcatggcagaggtgaagggggagcaggcacatcacatgatgaaagcaggagtaaggaaaagggagtggggaagatgccacacactttgaacaaccagatctcctgtgaatttatcaccaaggggatggcccaagccattcatgagagatccacctccatgatccaaacatcttccaccaggccccacctccaacattggggatcacatttcaacatgagattttggcagggacaaatatccaaactgtatcaggactaaggaccaagcccttctctgtctcttgggactaggtaagacctgaaattcttatacgctccaaggagatggaatggacagactagaggttcagagccagtctaatttgatatgaaaaggtaaaaaaatttgatacttcttacatctcagttctgtagaagaaactcaaacccattgtgtaattctttcacttgatatttggtataatagtcatggtcatcagctcattctgagcaggagtgctaatgaaggatgtgtgtctgtcaagtccaggctgcttcatacaactcttgtgcactccaccctctatccccccatcatcctcacccccagttcttcctcctattccccacactgtggtggtgttgttaattcatccacccattaggctgaaatgcaggatatcaggcccaggcccctaattgctgttgtagactggatacacattcttatcaactccctttaccatgggcttttttctctgaccctctggtaagtggcctgggaccttctctaaaatagcatcataaatcagccagagctggagtggtatcaccacaaaatgaagaaggagatgagtagagtaccttctacacatcctcaccctgggtggctcaaagaggaactatgcttgtctgagtaccattgatgattgagatagaattgtaaggtgggtgatctgtcttgcgtagcctccttcactctaatctaatcttaccacctaacatgcccttccccatctaggttactcttctaagtctgcctcagttacctgctgtaacccctttaaaagtgttccaggtgattctcctgcattcgcccaggagactatgtacatactttcaacttgatgcaggaacttccttcagaataagcctgcagatggcattcagtctctgctcagatgttcccaatgatgcagtgctcatgagctcaacgaagccagctcccttcgaacagctccattggtgaggaatctccttcttcttttgacctgaggtctgtttccccatcattaccctgcattgtttgcctctgcccttgcaaaagagactgaataagtatctctcatgtgacagctcctcaaatatttgaaaatagttgttctgtcctttgagttaaatagcagcttttgttgattgtctgtagtctttaaattagtctgtagtctagatagtgtgagttggaatagttcctgacctcaaaaatgttttgatcttccttggggaccttgtctagatctgggaaggagtaccttgaggctgaaaaaatatgaaaaaataaaaactgaggaaaaggtggtggtgggagaataatttccaaagaatggcaaactgatacccaaatagtcaaggggatttctctaacaccacttcttagtatgggatagtcccgaatgtccttggcataaaagaattgatgagaacaaaatccagcaacaaagaaaaaatgttttcatagtaaaagaaaggacttgagcatcatggggagctgggaaaggggaatatttgagagaaagtcatgggacagattgagtcgtaggaaaaaagtgaaagaacatttatactctgtatagtttgaccacctaggagaaggaggggaaggagaagccaggggaatggctgacactttagaaagtccatcggttacctgtgggactgttagcaaagatgccttctctaagtgcatttacccacctggaaaatggggatcatgagatgttccttgaaggattgtgaggattactaagtgctgggtattgtgctaagcctcataataattagctcattcaatgcaatcttcacagcaacccagtgaggtaggcaccattattttccccattttaaagggaaagaatcaaaccccagagaggttaagtaactttctcagagacgtataatggaagagctgggattcaaaccccaggagtggcttgtgctcttaacccaatgctatctctagttgacacttaggtcatagatttggtctttttttttttttaattttaacttttattttagattcagggggtagatgtgcaggttatataggtatattgcacaatgctgaggtttgggatatgaatgatcctgtcacccaggaagtgagcatagtacccaatagtttttcaacacttgctcccttcccctagtagtccctggtgtctattcttggccatttttatatccatgagtacccaatgtctagctcccacatataaaggagaacatgaggaatttggttttctgttcctgcattaatttgcttaggataatggcctccatctgtatccatgttgctgcaaaggacatgattttcttcttttttatggctatgtaatattccatggtgtatatgtaccacattttcttcatctaatccacccttgattggcatgtaggttgattccatgtctttgctactgtgcatagtgctgtgataaacatacaagtgcatgtatcttttttgtagaatgatttgtgtatatacccaataatggggttgctgagttgaatgataattctgttttaagttatttgagaaacttccaaagtatgtccacagcggccgaactaatttatattgctaccaacagtgtataagtcttcccttttctccacggccctgccagcatttgttttttgactttttaataatagctgttctgactggtgtgtgatggtatctcattgtggttttgatttgcatttctcttataaatactgatgttgagaattttctcatgtttgttggtcacttgtctgtcttcttttgagaagtgtctgttcatgtcttttgcctactttttaatgaagttatttgttttttgcttgttctgctgtttaagctccttatagattctggatattagacctttgtcagatgcatagttggcaaatattttcttccattctgtaggctgtctgtttactctgttgatagtttcttttgctgtgcagaagctctctagtttaattaggtcacacttgtcaattttggttttgttgcaattgcttttgaggacctagttgtgaattctttcccaaggccaatgtccagaatggtgttttctaggttttcttctaggattcttatagtttgaggttttacttttaaatccttaatcaatcttgagttaatttttgtttacggtgaaaggtaggggtccagttttattcttctgcatatggctagccatataaacaaaaattaaatccaccataaacaaaaattaaaaataaaaattgacaagtgggacctaattaaactaaagagcttctgcacagcaaaagcttctatctcagcactgttgattgaatagggggtccttttcccattgcatatttttgttgtctttgtcaaagatcatatggctacaagtgtgtagctttatttctgggttctctattctcttccattggtctatgtgtctgtttctgtagcagaaccatgctgttttgattactgtagccttgtagtatagtttgaagtaacataacgtgatacctctggctttgttcatgttgcttaggattgctttggctatctagcttgttcttgggttccatatgaattttagaatagcgtttttccagttctgtggaaatgacatttgtaccttgatagaaatagtattgaatctgtagattgctttgggcagtatggccattttaatgaaattgattcttccaatccatgagcatggaatgtttttccatttgtttgtgttatctatgatttctctcagcagtgtttgtagttttccttgtagagatctttcaactctttggttagatgtattccatgtattcctagatatttcatttttgggggggctattgtaaattggattgtgttcttgacttgattctcaaagcttgaacatttttggtgtatagaaatgctactgatttttgtgtgttgattttgtatcctaaaagtttattgaagttgtttatcagttccaggagccttttggctgagtctttaggactttctgtctatggaatcatatcatcagcaaagagagatcattttacttcttcttttcctatttggatgccttttatctctttctcttgcatgatttctctagctaagacttctggattcattcttcatagtttctggtagcttaatttttggtcacaaatgtgcacacttcctattaaggctcttcttttttatctgattcccttagacattcaacacccttcaatatttcttagctgtttctttattttctcaacttctaagctatgagtcagtttaaggaaaaaaaaaagaattttctttgaaagttaccttatctgcttttgtttctacaggagaaagtcagaacctgacttgagctaacactaggcaagtgtccattttccatggacccctgctttggtgcttcttcagatacatatgctggaatcaatcactgtaaattctaagcaagttgctttttgcctataataattttataaattattcagcattcatactatactatataaatatatatttatacatataaataatcaatcactgtaaattctaagcaagttgctttttgccaatcataattttataaattattcagcgttcatactatactatataaatgtaaatatatatttatacatataaatatgtataatctgaaaatgttatatataactatagtatgaatatagtatattaatattatatttttgtatgatcaccaaagtattctttagctgggtcagcaggaaggggatgcttcagatttttgagtcaggcatcagaggcctgaaagtttgaaacacttgttcacttttgattgctggcttccagtttttggtgcagatcactggcaaagaaaccttccattttaaatctctcttgagatgctagatttttgttttaaatgtgatcataggtggtttgaatggatgcatagtcagccagaaagttgatttggatcctgaagttccctttaccatatacagaattgccaagaaca

SEQ ID NO: 736 - DNA, 2103 bp, Homo sapiens
ttctcacttatatgttatatttcttttcagactgtttatgaccagtggttcatcaccctttttaacattgtttacacatcactgcctgttttagccatggggatttttgaccaggatgtgagtgaccagaacagcgtggactgtccccagctctacaaaccaggacagctgaatctgctttttaacaagcgtaaatttttcatttgcgtgttgcatggaatctacacctcattagtccttttcttcatcccctatggggccttttacaacgtggctggagaagatgggcaacatattgctgactaccagtcctttgcagttaccatggccacatctttggtcattgtggtcagtgtgcagatagccttggataccagttactggactttcattaatcacgtcttcatctgggggagcattgccatttatttctccattttatttacaatgcacagtaatggcatctttggcatcttcccaaaccagtttccatttgttggtaatgcacgacattccctgacccagaagtgcatctggcttgtaattctcttaacaacagtggcttcagttatgccagtggtggcattcagatttttgaaggtggatttatacccaaccctgagtgatcagatccgccggtggcagaaggctcaaaagaaggcaaggcctccaagtagccgaaggcctcggacccgcaggtcaagctcaagaaggtctggatatgcttttgctcaccaagaaggctatggagagcttatcacatctggaaaaaatatgcgagctaaaaatccacccccaacatcagggctggaaaagacacattataatagcactagctggattgaaaatttatgtaagaaaaccacagacaccgtgagcagctttagccaggataaaacagtgaaactgtgagtcaatatgaatttaaaccacgtagttatcttttcacttcaggtggagctgaaattctgctggctccagagtttgagatttgaggcaagaggtggggcaggcagattgcctcactttacttaaatctgcggcagacaactgccagtgcccatcaaacaggagtgtgcgctatggaaaaccaggccagagggtcactgtctggtttgtgatttggtggacaaaacactcgctgttacaagtacagattttttttttttttaaatcaacctagataccaattgacctgaactttagaatcttatttatggagaaaaacttgtaaagctgcatattcactgaatggatcctcaggcggataaaagggtgcattttaaaggtatatatccaagctgaaaagcatgcctattgacagataaacatgtatctgtaagatcagcctttcccaaggtatacttttaaaatttaaagcgtgtactgtgttgctttcagactgagttgcatgtcactctttagtcttgatatctacctgtctgttcagccaggacaacaaatggcttccaagcctgaagaatacaaaagtgtgcttgtgtttctcatttttataccagtctagggacaaaggagactgaacatctttgcagcaggataggctggtaatttgatcaaatttattcaaaaagctctcagtctgtgtcatgtaaggacatgcttatgaaatgtgagagaggctcgccactaagtattctaaatacttttcaatggcttttctaacaacctcagtagtaatttgctgagcatcatccagaccattaatagaatcagcaaagcactggaatttcacactttaatgataatattccacatagtctatgggcaaatattttcaacatttccaatttttaaagcttcagaattgaagccaaacaaattaataaataattgttttaattactatttaaaaactcaggtttagattgtttaaaattagttgcttttgatactcagctgtcatgtttataattcaaacatgtagtaaacatatgtaggtaaggttgtttttttggagatgttgcagctcaaatttcagtccacatatgaatcatcagtgtattttccataaagtgattcgggcatatttgtgtgaaaacctcagttctgtcacttcttacctctataaacttggacgataat

SEQ ID NO: 737 - protein, 195 aa, Homo sapiens
MATSLVIVVSVQIALDTSYWTFINHVFIWGSIAIYFSILFTMHSNGIFGIFPNQFPFVGNARHSLTQKCIWLVILLTTVASVMPVVAFRFLKVDLYPTLSDQIRRWQKAQKKARPPSSRRPRTRRSSSRRSGYAFAHQEGYGELITSGKNMRAKNPPPTSGLEKTHYNSTSWIENLCKKTTDTVSSFSQDKTVKL

SEQ ID NO: 738 - DNA, 71594 bp, Mus musculus
  misc_feature (1)...(71594): n = A,T,C or G
agttgatggcccaggactgaaggggtcatgcaaaggatttgaggcttggcaccacgaagagagcctatgagaggctattggtaaagcctagttggagtggaacaccccagtgtattggagatgtcagtaccataggatgatcaccaagaacagcagccatagtggagtggatcaacctgagcttagagtgctacagagggcagagctggagaagtgatgccagcccttaggaggagcccaaaagatcaagtatggatcccagacactgaaacaagaagctgtaacattgatattgtcttggagactcaaagatgttaaagatgccagagccatgggatacatgctgaggaaagctgctaacagggagtggaaccagcctgggagaaagcagtttgttgcagtcaagaaagatgaaaaaggagtggagatctgaagactgctttgacatcagtcatggagatgcagagtttggagtttgcccagctggtttcctgtctttctttgggaattaatctcagaaagaccttgaactttggacttttaacattgttgagactgttatagactatgaggactttgaaagttggagtaaatgcattttgcattatgctatgtttaagtatagcccccctccaccagactcatgtgtttgaacaagtctatgggggccagggagtggaatgtgatggtttgtatattcttggaccagggagtggcaccatttggaggtgtggccttgttggaataggtgtgtcactgtgggtatgggtttaagagcctcaccttagttgcctggaagtcagtcttccactagtagaaggatggatgaagacgtagaactttcagctctgactgtgccatgcatgtctgggccatgcctgcctggctgctgccatgctcccaccttgatgataatggactgaacctctgaacctgtaatccagtcccaattaaatgttatttttttataagactctccttggccatggtgtctgttcacagcagtaaaaccctaactaagacaggtagtaaccacagagagacagcagtggagggtccaagagcaaaggaaaagaaaaggctgtacagtgccagaggagagactgcaggcacttcttgctagaagagttccagagagtagtgaagtctttggagacaaatgtccagagccaagagctctggccagggtcaagggctaataaggagtctggatttgctagacctatagagctataacaccctatactgtcaaggactgagcaatctatgcagttaaggcttgcctggaagctgtaatgccagccataacaaatagctaaagtatcatttcttccaaggctgtcacaggcctgtaatgtttgtacaaatgaggccttgcagaaggccagaatgagaacagtaccactggagggcaccacctgcctctgctcctgtctgcccctgttatacaaatatactatgtgggcaaaataattaaatgtaacaaacagaaatcagaatgtatgagttttagataaaagaaagagaacctgtggaaggtagaaagatggcttccttcctgctagggcctgaatttgattacctatgttggtggcttatgaccacctgtaactccaaggaatcggagactttggcagacagacctacagacacatggttgtgttgttgtttgtttttgagacagggtttttctgtgtagctctgacgacattcctagaactcactctgtagacaaagttggccttaaacacattagagatcagcctacctctgcctcccaagtactcagaattaaagccatgcatcaccatgcccagccatggggatttaaaaaaataaaataaaataaaaataatttgcgggacacaggacaaaactcaacaggaaaaaaataaaagtgaaaacaggcagttctcaggagaatatcttcatgacatcaaagacataaaaagaagcctgacatggtggcagtctcctgtagccccagctctcaggagcttaaggtaggcctgtgtatcccagaccagctcaggcaacacagcaagaccatgcctctgtctattgagtactgagagtacaggcatgcccagtgtaagaatgagattttggagctgggcagtggtggtgcatgactttaatcgcaacacttgggaggcaggggaaggtggatttctgagttcaaggccagcctcatctacagagtgagttccaggacagccaggactacacagagaaaccctgtcttgaaaaacaaaaacaaaaacaaaaaaaaaaaacaaaaaaacaaaaagagagagagagagagagatttttggggctggagagatggctcaggggttaagagcactgactgctcttccagatgtcctgagttcaattcccagggaccacacagtggttctcaaccatctgtaattgtgatctgatgccctcttctggtatgtcagtgacagtgtgctcatatacataaaataaataaatatttttttaaaaaaagagatttttgtccagtgctaattgttaggtctcaaccccatgacaaaaggctgagatgcctattaacagatcaaggtggacactggccaccagcctacctgttacagggtcttcctagctgtcaaaccctacctgttaccctaaactctccagcccagtaactgagctaggctttccttcccccagctcctctgattcctgtacaactttggctgagctggcctcttggcctctttgctcttggcagccactcttggttccctctctcctctggccttttggcttctggctctctgctgccactcttctcacatggctccgttcagtctgctggtcactaatagtagtagaggggccagagggatggctcagtggttaaagcacgtatggctcttccagagtcctggagtctgcttccttgtacccatattcagaggtgcacagttgcctgtaactccagttccaggagatttgatgctatcttctgacctcctcagacacagactcacagagacacatacatgtacattaaacattaaaaatacatctatagtcaacaagttttattttatttatttatctattggttttgttgttttttttttaaagatttatttatttattattatatctaagtacactgtagctgtcttcagatgcgccagaagagggcgtcagatctcattacgaatggttgtgagccaccgtgtggttgctgggatttgaattcaggaccttcggaagagcagtctgtgctcttaaccactgagccatatctccagcccttatttatttatttattttggtttttcgagacagggtttctctgtatagccctggctgtcctggaactcattttgtagaccaggctggcctcgaactcagaaatccacctgcctctgcctcccgagtgctgggattaaaggcgttcgctaaagtagtggcagaggctggagagatagctcagtgatcagaagtacttactgttcttctagaggacctgggtttgatacctagcatccacatggaagcaaatggaattactaactgtaactccacttccaagaggtctgatgctctcatctggcttctgcaggcaccaagctctctcatggtacacagataagcatgtgggtaaaacacccatacacataataaaaataatttaaaaaaaaatcacttttagccaagttgcagtggtacacacctttaaccctagcactcagactagggcagatgaatctctgtgaattttatgccagtctggtctatagggaacagctaaggctaaacagagaagccctgtctcaacaaaacaaaaagtaagcagtggtagaatttgagggtgggcaggaaaagtgtagtcctccctgctgcacaataaagccttcaagttcattgtaataagtagacaatagatagataggcaagtagatagatacagatatagacagacagacagataaagtaatggtagagacaggtttacttattttacagggaaattggcatgtactaaaaggccagccatgaagcctaatacagtagtacatgcctttaattccaggccagggagacaggaaaattgatctctgtgagttaccagccattctggtctacatagtgagagagtctatttagtcctggctgtcctataactcaatgtatagtccaggctggcctcaaattcttagagatcctcctgcctctgcctccgcttctgcttctgacgtgctgggattagaggcatgccaccaagcccagctttatttcctatttctcgtatttttagccaagaatgaagattttttggttttttttaacaaggggtggtggtaggggtgggaaagaagaagaaggggaggaaagaagagggggagggagacccccaatctctgtcnnnnnnnnnnnnnnnnnnnnctgtccttatggtgctgacattctagtgagaaagacatctcaaacatgagaaataagtaattgcaagggatgtagtaacttaggaggtgaactctgtagcacatgctgttttggcctgaaggatatttatcaagatgaagagactggccgggttggatacaggcagtaggcaaggaaaggtgcagggtcttactaggccatggctgccccgtggacatgcagcactgaaccagcaggtacatgcagggctggggagcagtcaagctcagctgggaacaaagggtacctctgttaacaaggaaggtgcaacacagctgtgtgttcaggacctgtgtattcaatactaggcaaaaggtgactgatgaaaagaatgaaggaaggaaggaatgagtgaaactactcatttgttcataccagcaggcccaagtccttccaaattaagaagtgagcctgaagcctggcatggtggtgcactggcagaggcaggcagatttctgatttcgaggccagcctggtctacagagggagttccaggacagccagggatacacagagaaaccctgtctcgaaaacaaacaaacaaacaaacaaacaaaaacaaaaacaaaaaagtgagcctggcccaagggtctccgtgcctgtcatttcttccatatccactgagttctagaactcagctcgaatgcccttcctggatgaacaggaggcaaggaggtctgaaatcactgaagtagatgtttagtgctggcaagaaacacggggcacatctggcctcctccatccacaattttagcatcactaaaggcaggggccaagaacagagataaggaagtcagtgaacagtctgatgagctacataatagtttcaaaattggaaactacctaaatcttcctaagtaagggaatatttcatgaaactgcctagaacacaagaataagtagcactcaagtcttctctaagaagccgggtggtggtggtacaggactctggtgcccggcagatctctgtgagattgaggccagccagggctatggagtaagttctaggacaataagggctacatggagaaaccttgtctggaaaaaacaaacaagcaagcaaacaaacaaataaataaagtgaaaataaaaaataaaataaaaacaaacaacccccccacctttttcaagttaaaaagttaatagaagttataggcacttcctgctagcctggacaacctgggttccataccccggacccacatagtggaaggacagaatctgctcctacaaactgtcctctgacctccatatgtgaccctctccccagcacacaaatacacgtgttgttttttgttttttgtttttcaaggtagggtttctctgtgcaaccctggttgtcctaggactcactctgtagaccagactggcctagaatttacagagatctgcctgcctgcctcagcctcccaagaactgggattaaagacgtgtgccatcaccacccaggagcaaataaatcttttttaaaaacgagaaaaataaattgaatagaaagaccaactaagggatggagagaaggctcagcagttaagagcactgactgctcttccagaggtcctgagttcaaatcccagcaaccacatggtggctcacaaccatccctaatgagatctgatgccttcttctggtgtatctaaagacagctacagtgtacttatttataatagtaataaataaatctttggaccggagcaagcagggccagagggagcagaggtcctaaattcaattcccagcaaccacatgaaggctcacaacaatctgtacagctacagtgaactcatagacataaaataaataagtaaatctttaaaaaagaaaacaactaaaagccaagcaatataagagcatataccacaactaaaagcataataaactgttcaatctcactcacaggaacagtcaatgaaaggttgcttttctgtggtgttttcttattgttgttttgtgttgctaatattttgtgggttactaattaacacttgcagggtttctcgtagtgcaggctggactggaacttcatatgcccagaggatgaccttgaactcctgagatgataggcccagatgcctttcagttttaacctacctgactggcaaggattaaatcaaaacgaaacaacaaacaacactggacaaggctggagctggagcacagaaataaaaagctaatctgatgtgtgagatcttgggttcccatgtgtgtatgcacatcataacacactgtgatcctaccaggtgaagagctagacactttatattttgccaatgaagctaagctagtacaattgctatagagaacacttagctaatatttactaaggtcaagacagattaatctgctcgtacactgataattggacttctaggaatttttactttataaatgccaacatatgcagaacacagattagacaaattatagtattatttgtaatgggaaaagattggaaactacctaaatgttcccaaaggcgggaagtgggcaattaaatccttataatgtttttatgtttctagctttttgttttgttttgctttgttttttaaggcatggtctcactctgttgaccaggctggcctccaacacatagaagagatctacccacaccttcctcccaagtgctcagactaaaggtgtgtgccactaaagctcaccgtgctctttgggttttgtttttgtttgtttttaagaatttagaaaaccaggccagtgagatggctcagcagatactagcactcaaccctgacaccctaaatttgatcctcaggacccatgttcaagccagatgtggcccatttacatgtgtaatcccagcaagaacactcagacagcaaagtgggaagcagaagccaggacagtgtgatcttgtccccaaaacaaagaaaacaagcaaggtgagtgtattagttagggttttactgctgtgaacagacaccatgaccaaggcaagtcttttaaaaacaacatttaattggggctggcttacaggttcagaggttcagtccagtatcatcaaggtgggaacatggcagcatccaggcaggcatggtgcaggcagagctgagagttctacatcttcatccaaaggctgctagtagaagattgacttccaggcaactagggtaaggatcttatgcccacacccacagtgacacacctactccaaccaggtcacacctattccaacaaggccacacctccaaatagtgccactccctggtcaagaatatacaaaccatgacagtgaggaaaacccctactctctaaatgttgttctctgatctccagatcattaccattctctttttctttagtttcatatgtatgagcattttgtctgcatgcctgtagtataccacaagcatgcctatgcattggacctcagaagagaatgtcacatggaactggagttacagatggttgtgagccaccatgtggatgctgggaactgaacgtgggtcctctgaaagagcaaaatagtgctctaaaccactgagccatctctcctgctccacataatatccaatgatcaaataaaatcagtcactagagaatcactggttataatgtgttaaacatttgtacaagttcctttttttaaaaaaaaaatatacttacttgccaggtggtgtggcatgtgtctttaatcccagcacttgggaggcagaggcagtcagatctctatgcattcaaggccagcaccagacagaccctgtctggaaaaccaaaaaccaaaacaataaaacccatttatttgttcagaagacacgcttactcgtggtctggtctggggaagtagctgattcagaattacccttctgacaatgagcattacagagggtgagcacacaccaccaggccatggtcaggccttaccgtgggaaagcattgagagcattgaggatcacactggaggcagcatgatagtgctgatgagagggcatcagagaaataccaaggagttagcttaatgtaaacgggtaaaagagccgctatggagaagggagggggaagagaaatagagaatgagaaaaatagagagcaaaacagccggagaaacagagagaaagaggcagatatctcttaatctttacaaggcttctctaggagctaagggaccggactatagctcaaggaagaaatgcaacagcatatttatttacaaattcctgttccagccttacaatagagcagcaagaagggaagggagtggcaggtcaggtcccatgatctaacacgtgtgctcgtgcttaagtgcaaaagcgggtaccttaccaggagctggagggtggggaaacaattttgagttagttctttcctttcactatgtggattccaagatggaagtccagttgtcaggctaaggagagagctcctatataggatgaatcatctcaccagcccccgtccctcatttaaccttcagcccactgcagcaaagctgttaggaaactgtgaggcccacacatgagaaagctgtggaggacacacacaccattcggatcccattagagttgcttaagccatgactttggttttagaccagccagggtccattccgatctagcacctctctctctctctctctctctctcgtcttatagccaccccacccctcttcacacacaatctttcttacttcaggtaatttattaatttcttttagtctctgcctcctttggctggtttaataacacccacctgggagcgtatgaggctcagagaagataacgagtttgaaacaattctggtgtgtctgttcccacatgggctcagctctccagcacacaccaaatttcagtcaaggggtttcccaaaaggatagaatgaactctgtggccaacagtacattctgtgaaagacggcgagttgctgtctccagactgtcagatgctgtgcagaagagcagctttttcctgaggccatgttgtcccacagccaggaatcagcagagaaagatctcctgtatcatgtcgtggacactgctaggagttcaagaccaacctagactgtatagtgaattcaagatcaagggcagcccacagctacataaccagaccctgtataaaaagaaagaacttgccttgcaagcccaggatctgagttccactcttgaacagaattaacgcctaaatattgtcctcagacctccatataaacacggtggcacgtacatacccacactcatgtgtacgtgccccaaataaatttttgaaaaactgagttatagctcatttggtagaatgcctgactacttactatgcacaaagttctgggttcggtcgccagcaacacataaactgtataatagtgaaacaggagaagagatggctcagtcgttaaagcctgggctcacaaccaaaagaaaaaagaaagaaagaaagaaagaaagaaagaaaggaaggaagaaaggaagaaagagaaaaaaagtaggtcatcctatgctacatagattgaggacagactgggctgaaaaactgttaaataaatgtctttctactgcactggtcagtcagtcagggtttgcatttttaaagagatcactcactcactcactcactctaaggcaactctcgttttcaccgtcattatcacaatgtcaggatttttttttccaaagcactagagattacattgtttgtgtattttcctagttgggtgtctccacccgtaaggtataagtcttcataaaaacagagacattgccttgccttgtgtcttcaacaaaccaaactaagggctttctattcttcaggcttttcaagtagtacctgatacacagtcaatgaaaggtcaatattgctgtctatttttaaagtgaggggggaaatacacaagttgagaaacctgttcgatgttggacaccgacatcgaaaggaaaaagcactttttctgtagtatacaaagggacagatggatgaaggaactagattgaaggaatgtgaaccataaacgttccacgcgcctgagactcctcaaatcgctcgccaggggtcgctgctctcccatgtctcgatgccagtccctttctggcgcgcactccttttgcgtctcgggctcgcgcgcgctgccgcggcaccggaagtggctgcgcttgcaagttcccccggtctcttcaggggaaactgaggccggcttctccgggagattcagcacgagcagtcagccaggtaggcaggcttaagtccgcggcatacttcccagccgcaaaacgccctagtgtctggaagccactgggcctatgaaggggggatgtggccccccacggctctctggggctcgcaggtgagagcgccgcctcccctgtgcctgacaggcgctgggcccaatgggagcctttgccgtcccgcttccgtgccgactcgacccgcggattggctaagctggggcgggccgcgggggcgagacccctccttccagagaggtctagggggcgcccctgagggagggcggttgcctagcaacggggcggtggctcggcgggtacccggcctaggggagcgcgagcagtaagcgaggcctcagcccacccacccggggctccggcgcggagcggcctccggccctcgagccctgcagggggctccagaaggccgccttgggctcggcctcaggaaaaacgaggtctccactgtgggagccccgacccttcttcctggccggtggcggggctcagtgcctctctctcaccccgtctttgtgcgtggggtgccggcggccattgtgtccgggcgcggaatggaggacctggccgtcccccagtgctgtgtccagggcctttggggaattcaaagacaactagcggtgtttgtggggggtctccagcatacgcctctcggaaaaacccgggagtggtctttccgaaatcagatcacagatccgaggctgtcttccccctgtccgcgtccctgcgcgaaaccttgagattcacttggaagtccctttagggtttcggaagcctcatctagggctggtacttaaatagaaagaaagaaaggaggggtggggggaaattacactaaacccatacctccgggagagttctcctgactcccagtaggaggcggagagccaaggggcgtgctagagcgagggggttgggctcccgggtggctggagcctgcggagcagagagaggccgccctcgatctggtcgatggaggaaccaggttgtgagggggcaggttcctaagcttcgcaattcctctgtcgccttctgagctgcctaccaggtcgcatgatccctccggccggggctggttttttttttttttttttttttttgctgagttaccggcgacccagccaccacctcctccccgacctatgatacaaaagaccttccgggggttgtacctgcttgctgtcgccggagatagatttgaatgtaggtggtggtggtggggatatgccaatgggggtgacttttggagaaaggcatttcggagaaaagggggtgggtggttgtagtaaaaagaggcggatgaaacaattcaaagctggctggtcctttcaatttgacttcattgaagtcccttagaacccggactcagaccttcataagagccacaaagaaagcaattctggtacctggaggaggaatgggaatattgtaaggtaaatgacatgcatattaaatttttctcctgaagctctctctctctcttcagaaccttatcttggctttggatcctggaagagaatcgctaaacacagagcagacccagtaagtgagcaggtgttttggacaatggactggttgagcccatctctattataaaaatgtctcagagcaaccgggagctggtggtcgactttctctcctacaagctttcccagaaaggatacagctggagtcagtttagtgatgtcgaagagaataggactgaggccccagaagaaactgaagcagagagggagacccccagtgccatcaatggcaacccatcctggcacctggcggatagcccggccgtgaatggagccactggccacagcagcagtttggatgcgcgggaggtgattcccatggcagcagtgaagcaagcgctgagagaggcaggcgatgagtttgaactgcggtaccggagagcgttcagtgatctaacatcccagcttcacataaccccagggaccgcgtatcagagctttgagcaggtagtgaatgaactctttcgggatggagtaaactggggtcgcatcgtggcctttttctcctttggcggggcactgtgcgtggaaagcgtagacaaggagatgcaggtattggtgagtcggattgcaagttggatggccacctatctgaatgaccacctagagccttggatccaggagaacggcggctgggtaagaaccacgccccttgtgtgtccgccccttgcttgtgtctctcttctctgtgaacatccctaaaactgccctttttggtctctttctgttatatggcatggttgttaaagataccgattgttcaggagaccttcctggcttcattttaatacaagaggttaactttggaaatatagatgacccaatttttaagggacctgtatctttcatcctggctacccttgtggccccacagtttcatagttttgttccaatttctcagcaaagaaaaacagcctatgtgtttacttggcttaaaacctatgagagcagcaagttctccccgcgttctgctcactctcatgaaatgggtcaccttggctggggtgatgaacataatacccaggaaactgcagaactggaacctcaggctgctgtgtacttgcatgcatggtactcagaccatttggccagtcaggagcccccactggctagagtggctgagtattgtctgattttagaggagggtggtctgggccaatggtgtttgtgctgtgctcctaagttctttttccccaaagtgtgcaactttctgcatggttggcttgtttgtagagcccttcctgtgccatatcaagccccaggactttgcacctcgctgccctggattggttggggatctccagctgctctgcccagtgtttttctggtcagggccctggggcctctttactgaagcactgtttgctggcagagcaagaacctggtttgtgaggctccataggaaattaagatttggtgacagactgtatgtgggtgtgagtcctggccctgtcacttaactggccatgtgaccttggacaggctggtttaccttctagagccttagtttctaacagactattgtgacccaaagataaagagagcagaggctgacacaatgagtgctttttcttcagaatcctgctcgccacctcatcagtcagggtgagatagaggtgagagttccattactagtagctgtcgtggtaggcgtttgttacccttcagagtgaactgcattctggaataggggatattgcggcttctgagacgtattctgtctccttagaatatgtagaaaatggacagactggaaaataagtcatccattgaaggaagtgaggtggaaggggccatgcaccatggactccggaatgtcaagaatttagttgtccataggctgggcctagggcggggcaagcactttgctttactacagggtaagagacctccaggttttccctgggaccccatcctgcctctagtttcccatttctttgaaacttcacctttcttccctccagtagctcttgtaaaggcaaggaggtcacttgtcagtagaggccagatgaccagagtagagttgactgaggtaaaggtgggttcccttgagctaagggttgccagacttgaaagctaatctgtaaatgaactccctggggagataaatgattaaatagttcctgttggtttgtgctgtgacctcttctattcattctcttgctttgattctcttttggggcaaatatttgttcagctgattacaggagggacaggattccatcgcttcagacacaccctctgaagcatctccaagtagatgtgcgccctttccctccatcgcctactgactgtctttagttgactgagtggtcctaataacaggtagggtcttgccagctacaaacagtaggtgattgacgaggtacctgctgggccagccaccctcttgtctgcagacctaagaattgccagctgccccatactataagtcttcttatagtatcacctggaaaaatgctaaactgacctaaggcagcagcttgggggacagattcattagatcttcactgactaaaatcccactttccagtgtctcttcactcaagaatctccagcctgttgggcaacatacctggtaacttgccacttctgtgtggtaaacagagagggaatgtgtgcagaagagccggttagggcaggaccatttctggatatgcattctttccgggaccagcgggcaagaaacattcccctccgtgttatttgagccttggtggaagatacctacccatgtccttttaggtacagtctcctgagctgtacagatgctgctgcagtggcatcccctaacgtccctggaggctgcagctatgagttcagatagtcacttagggtatgctccaaattagcatcctttaggaaaggggacagaactttgcctttcttgtacctgagtacctcaggtgttttatcctttacttaatggggcaaatttactgaacagctactataaggcaagcagagtgctaggtgctagcttaagctagacattatctctctatcatggaaatatgtggccattcacatgttccatacagtaactttccaaggtacgtgaatttattcccagtttgtacacaaagctcccagtggctaaataaccgagcttaaatgtttctcagccaacttagtgtcctaaattgatattggcctaattttagagtccagactctttccatccatgccttaatcaggaagtaataatccagacagagtagcatagaaactcatggctactgttgggctgagaacagcatgcctatagaaagtactcattccatgttgcaatcgtagcagtgttctggtatctgagaacagtgcctttatcatcagtagcaggttcccaaatgtgtggaaacctccgattggggtactaagaaaactcaggcatagcaagtgttgcgtggcatcaggagtttgcccagtcatgatggcttcttgttagtgttttccctgttaaaatctcagtcttgtcaatcattgagagtggcatgtgtgcaaggagacagatggcctgccccagaatctctgttaattgtagggtgatgctgtaaggattggaactccagcctctggccatactactgcccgcctgcctgagtcacctggaaaaatgttgtacctgtttgtgtctcttgtcttttgtctctcctacctgtaaaatctaataatgatacccaactgccagaataaaagcccttcgctgaccttaattgtagggtggatgcccatcttctccaaaatgagcttcctctctctaaggctctgaactttaccccctggagttactacttaagaaactaagcctgttcactgagacctagcccccattagatgaaacccttttgggtttttttgtttttttgtttttttttttttactttgaatgtgggtgagactccaagtgggccagtcactttggtattaccagccctggagataccctttgcccagtggaaacaccattgttaggagcagagaacgagtgatactggggagagcacctagcttggccttccccaagctgcagctctactcttacctgttgtggcttcttcagtgcaacagagagatggacatgtgcttagttgaagcacctcagctccatttgcaaattcggcagttctgtggttttcttggggaagccccatcagaaaccccaacacagaaattcttagtaatctcattcaggtctccaaatgaagtaaagtgtctcaggggctcccccttggaacacctacttcttttcagtgtctttttttaggtggctcttaaaactcctttgccatcatagggttttccagactcctgaagcagcatccccagcaaccacatggaactcttcatcttctgcttaaaaattacctaggtaatttttagggggccccagtggaacctggagagtttcttgactttgtgtgggcaaccaccaattttgtttgggctgtgtgaagctgaacccctctcccagcagactcctgtcctaaggccagtggtcttgggcatccttctctcatgcctcgcctcctggtttttccccagcctcccaccacaggacttgctttttgcaattgctgccttgtctgggttagtgtgctttgctttaaaggtagtccccagtgagctgccttccaacagaaacagcctcaacaacctaagcctatcaggatttctgcccccatccctgccctccaaccagagtctgcaggatcttcccttgaaggattcactccgaatcctgttgtccctgcagctcagtctgtcttccccacccccactgggcatctagtgataaaaagagtcccacgggatctttgtttcacctagtgagacaaattgccaccagcttgatactcacctttttttacatatgatccctcgcactttgtataaagaaagaagctgttagtgtcaagttggtgcccagaggcatttccaaggctgtactctgtcaggagttgaggcagagtccacatcttgctcactggttatcttagcccagtgcacaggtcttgggcgtagtagtcactgatgaaaagatactaagtttctgaaggaaggaccttatcaaacaagaataataatggtgggcgcctcctttgacccagttattgagcctctactctgctaggctcaatactacacaaacaacaaatactaatactaaacaaaactaagtttttgcctcatgtagctcattctgatagaaagaaaaaaaatacataatagaggctgaggctcagtctgtaaaatgcttgctgtgctagcataagaatctgagtttgggcaagcccatggttttaatcccaacacttgagaagtagaggcaggctggtctacagagtgagctctaggaaagccaagactacacagaaaaaccgtctcaaccctctaatccccccaacccccacttccaaaaaaaaaaaaaagagaacctgagtttgatcactagaattcagaatctgtgtttaaaaaaaaaaatgccagacacagtgatgtacacttacaatcccaaagctggaaggcagagactagggctttctggggcttgctggccagccactctagactaatgtgtgagttctaggccagtgaagtagatagcttctgaagagcaatacctaggattgacctccagcctcagtgtgcatatgcatagaaatgcaagctaagccgagtgtgcatgcatgcacgcgtgtgcacacacacacactcacactctgtgtatacacagcagtccattgatgatacagcctgggagctagagagatggcttaatgtttaagagctcttgctactcttctagaggacccaagtttgtgtgtcccccccttctctgtgtgtgtggggggagagggagctttcagctgatactatgaactctgaaggaaataaggggggaaaagcagattggtttatagataatgcctagcacagcagggtaggacagcactttaataatggtgatcaaaggacctggcaggataattcagcttataaaggtataagctatcaagcctgatatcttgagttacatccctggtttccacttggtggaagggaagaactaattgcgagttgtcttctgacctccatatgtgcccatggcatggccatactcagtgagtagatagatgggtggatggatggatgaaatttaaggagtgatcaaaaaagtgaacaaccaagatacagggaaatgtaaaatagctcacctgtcacctgttgggtggctagaatatgaattaacttgacataagacaaattaacaaaaaccccaaacattttgataagtcatttgtgcacaagagccaaactcaaagaatggctaaattcatgattgaggctctgtagcatcctgaactacataaagaagtaggaggctgagtgtatggcacatgcctctaacccagcagacaggcagaccttggagtgagaggccagttctcaccaggtcttcatggtgagaccctgtctcaaaacaagaaataagtaaataaatagatggaaggaaggaatagggttttggaattcatacagtgacttcaagttacaggaagcttagctacaaattatagtgggtaaatattgtaaagtgtctcaggtaataaaagttgtagagcaaccagacacaactgacagaaataaatacttttgtgacagatgtttcttttatgaaaacagcttttctcagatcagctaaggctgcacagggaatgcctatcttgaaaaaccaaaaaccaaaagaaagaaagaaagaaagaaagaaagaaagaaagaaagaagggaaggggaggggaggggaggggagnnnnnnnnnnnnnnnnnnnnnnnnnnnnnnnnnnnnnnnnnnnnnnnnnnnnnnnnnnnnnnnnnnnnnnnnnnnnnnnnngggagggaaggggaagaaggggaaggggaagggaaagggaaggaaaagaaaagaaaagaaaagaaaagaaaagaaaagaaaagaaaagaaagccagcctgcctttcagggttactcctatgtgtctctgagtatatatttctcagaataaccagcttccagaatgccacatatcatattctggtcttccaagcctgttcttagaatattgtatccagaaccccagcaaacctgaaggtggtatttgagccaagaactgaaggaggtggttcactgtgtgggtccatatagagcttttcaagcagaggagtggactaaggagaaaagatactcggtttggcgttttcagggatggcaagaaatcagtttgcctaaagaagcagcaaggaacagagtggtaggagatgagggcacagaaagcttggggaaggatggagagaaggctggggacagagtgttgcaagacaggtttgaagcaggtaggtacgcttagaattctgtaaaggtggaagcaggtcctccccttttgaggaagctggtgcctggcagatgaaaaggcatcttggctgtaagtgggtatgcaggtagagagaggagaccaactttgcacatggtatattattgactgatctgtctcaccacattggaagccttttttttggtggggggagctgtttggagattctaggtggaatacggactgaataagctgttagctgggcgtggtggtgcatggctataatcctagcatttaggaggttgaggcagaaagattgctttgagtttgagggtagcccagactacattgtgaattcaaggccaacatgggctatacagtgagtccctatctcatgccaataaataacctaactctaattcttcttcagaaatatttctctccaaatatattttacagttgactctccttcattcttctgtttctgcctgaaaaactgcaccttgtctaagtaaaaatcctaccactcccacatccaaactcttgaccttcctgaatcttgggcacaatgataaaacactaaagtatgctgggatctggagagccagacagcatgttgctgtcatactttttattacctgtcccatggaactcttggctcattcacaaagcatccattcgccttttgtttatagtcacccactagcacgttctcatggcagccttctgtcacggtatgaattatagtgtatacctgccttggtggaccaagctctcccttgtcttagggtaaatatccaaaaatctactcccttagttagctctctatattcagtctgtctgcagatcagttcagccccagacctcagcttcttcctcatgatgagatcttggaattgacatcctaggagtcctggttctcacaggcctcagtccttggcagatttcaccaaggaggctagtccacagcagtttttagagtagctttctactttccaagacacagtgtcatcacagggtcatttgtcactggctacacaagagtaagtctccatgcacagtgaccagcacattccaggttacaaagcacttgcacatctatcttgtcttagtgctacctttagccatgcagattggtgatcaggacagtgccatctccctgtcacaggagcaggcaagctcagagattagtgagttcactggtcacctagtgtgtgacctcgccatgttgggaaggctcagaaagtcagttcttggtctgcagtgttgagaaccatgaccatcatccaggcagtcctgtcctgctccatgggcccctccatcactgttttgtagagagaaaccacctttgggtccttgtgctgctgcttggtttcatccccagtgagtcttaggccaggcctgcattggctccaagctatggagttctctgggtagagagcagagctcccctcggaactagagctttttctcgtgctcttcaggaaatgccattgcaatgacttccatagactgtttcctgtcccggcccagcagccggattcctgctgcagagtgtggaaactggaaagtagtgtccacatgccccctacttttttttttatgcccttccctttcctctttcagtcactttctctgctctcattcccttccccttcacctagtctctccctccagtcctagtcttccctttagaactgggaatgcctttctagtaggtctgcctctgatgctagactgtgtggtcagttggaaaaaactcccggccattgtccctggctccatcagttataaactctcccctagaggggcattagacctgtcacttgggagtgccctgtgtcatccatgaactgatttctcccttgggttccgacccatccattcgggcataggacagaggatcctaagggaagtatccaaggttctgcacttaaaaccctgcttcttggagattgatgactggttggagtgacagagctggccatcccttccctagtcacctttcaggaggaagctggaaggttgcgaaccttgttggacagtcatctgaagaatgggagctggcctgggaggagattggaatgcactcaactatgcttcagatcctttgttccaactcttgaaagggaaacattcccctccctccaccctggccacacacatgtgcctttgttccccaagtcagagtcaggcagcgcctggaacacaaccactgggaacacagtgtcccttcagaggaacctgactcccctccccagagggtcagtgggactgggacttaggagcccagcctcatgccctttttacaggctgaaggcttgcttccagacacatgtccaggcacttctttggaattattccatgggatgcccatgtcccaggactaagcaacccctcctcttaattccgcctggtgattaatattattgttaacattgctattaatagcacctaacatttattgaatgcttactctgtgccaggcattgttcagtatgcactacaagtactaattgattccattctcacagccgcgctcgctcaatgcagtaggtactattattagcccttttcacaactgaggcacaggaggaaggcagcagcctgagtagcacagttagtaccaggccaagctagggagggaggctgctagctgagccttgaaaggctgtaacaggaggcagagccagaacctgacttcaggcctgccttacactagagcttaggcagttgatttcttgaacttgaaacagcctataaaataggtagcatcttcattttatggtcaagaaaaccaaggctgagagaaaagaatgctgctgaggcctcccagccagtacctggaggggccagtgttccagtccagagcgcttagcttccagaactgcaccaccatagcagcctgcagatagtgacagttcctttcctgtacatgacagtgttttctaatggaccaaaccttttgttcacatctccagggaagatgggttactttcagcctcatttccagggaggaaattaaaacaaagagtgaagtgactgtcagacttcaagtctgtttgcctggagtttattttgttttgctttgtttgggggcaggtagcttttgagagagtctcctgtatcccaggctgctgccctcagtttcattatgttgctgaggatctccttgtactccggatcctccttcctatacttcctaccccaacatgccctgctcctgtgtctggctagttacccctaacttacttgtgctgctgcctgcctctcctcaagatggattcatttagtttaaataagtaaatgctaatgaatgccttggatggggacaccaagtggtgagtgagactacaggctttctgttggcagtctgtctcaatgcttcacaccatggaactggctagttgccttgcgctttgaatcagtctatgtgatcatctatctgtctgtccactcagctcccagacattttagctcactgtttcgaagctttcaattcattgcccttggctccattgtcctgacttatgagtggtgaggcagaactttatggcccataaatggtgaagcagagttgcttatcttatggcatcaaggaagccagtgacaagagagggaactaggaaaagaatgtgcccaccactgtgtgcccctagtgatttgcttcctattgcccaaagcccattaagttacgaatttgctctttaatgatgagaagaggtctggaatatttgccatgccggggctagcaggttgagcagacctttcaagcctctgaataaaatggtttgagcccagtcagtcagtaaacgcttgactgccctgcactcggagtgcatccaattaccttcctgaagatcctgcgtcagaacactgttgcattagggaccatgtcttcaacacaaaaggtctgggggttttggttttgttttgagacagtctcactctgtagtccaaactaacttgaaacttactgcaatcctcctgcctggaaagtcctgggatcacaaaatgtgcctggctaacacatacgtttttgaggtatatttcagagccagaccaaaacagtatttattaatcacttttaacaaactcgtggacaactcatatgtgaagcaacttccaattttcaaatccataaacctgagagaataatgctaaccttactggagtaagcaaggcataagttagagaaagcctgagtgttgttagaataatagcaggtgttgtgtgtggagtgcttgcttgctctgtgccaggtgctatgtttatgcccttgacataattatcttatttggtctccacaactgctctagtgtgaagagggcacatccaggactcagagacctccgtagtaatacatcttctaagaggcagagcacagtctgacgatatgccatgtgccaaaatctatccttatgccactatgttgtcgcttttcctgcagacctggactggcttattttatcccaaggcctggcacagagcccaggcttcagcaggggattggctagggtctgtacagtgaacaggagggttgttactactagctgtagtagtgcactgtcagtccctgaggaagcaaacacttctgaatcaggagtaagccccaaacacttggtgaatggcttgtgccaaatctgtggtgtagactcaaaacgtggaggaggccagaccactgattacatcctacaggtggcctggacctctgccagatggtcccgcttctaccaccaccacccattagattacccatgagagacctccaccctcggtctgcatcgtcaccttccacctggcccctggccagctagattgccagtctggactcttctgcactccagtggaaagggtcagagtggaaatgtcactgggggcttaagtacccatagctctttcagcaatgtggctttgtgtgctgaggtctcccatttcctcatctgtaaagtgaagataatggtaatgggtctcttccttagaggctccgtgttttttcctctgctgagagtcactctgcctgcctcatgtctgattaggactctctttatcattcaggtctcacttccccagaggctacccatgtttacatgtttactgtctaattcagggaaacttaagctcacagagtatttgcttttgtcttgaaagttttcctttattatcagcatctagcagaatgtttggaatttggtaacatttggccactattttttgagagaatgactgtgtcgagtgtagaccattcagctttctgcctgacctatagtagacagttttcagtgctattacctgttcggaagatatggaacatgaaggcgtctttgttcttttcctaccctgtatgctggaggttgaacccagggcattaagcctgctgtgcaagtcttcttcctcagtctgtagtctcagccatttcaccttgttttgaaacagggtctctgtagagcccatctgatcctgacctcagtcctcctgtgacacttttctggggttatgggcttgcaccaccacacccaactcagtgaaagattaaataggtgaaaggaatgtggctgggacaggctagatgggtaagaaccagccagccagatctgaagggtgcatgtgaaacactgagagatggtgagctatcatggcttttactgtgctgggtaaaactggtcaggcagaaggaagcagagactgatagaggcctgggggaacagggatgggagtaatgttggattcggaggggagagacccaaagtacccatgggatgcagtcatgtctccagtatcccttgggagaaaggaatccttgccaggtgggactcagcaggcagagctgcagggggagagaggcacctgggacctgcagaccaggtaggccgccctggttgttagttggggcgcatagccaggtgcagattcaaaagactgattgaagccttttggcaactctagcctttgtagggtaaacatcacctgtctcctgccacctgctatgactgtgccagcaaggtaccctggcagtcccaaagaggcctagctttcttgctgccctggtagagcaaaactactctccagagaggcggggagcttcgaaagtctcagatgacaataaggtgtctcctactaaagggccttcccactgaggaaggcagagaggggccctgggagcccagacagctgagccaactagggggagggctcagagcaaaagcaagagcaggtgcagatttcgaggagggtgtggcctgaggggaagtagggatcttggtaggctacaaaacgtccctcctcctcccccaggcacagctggcttctccaggaacctgatgacctagttaccatgcttagaaatagttagcttagcttatagttcaggactgtgccagtctatcatccttgagacttcttgggtccaaaaggtaccctggaatttccccagagtagttccatgtgaagaacatgcaccttgtcacgtgcatggggttgttgcccaaggatggacacagttaataaggtttcttctttgctgtgcctcctgccaagcccaaggagaagtccaccccgtccacttctctccagggggtggtggatggccagaagaagccacaaactccctgaggtacatagggcgaggaactcctgttgccatgaacacaagtcctctctacttttctcctctcagtagggtggtaaaagcaactacctgggaggatgtggcaagactgaggtcaggaccagctggactccagagaccatgtagaaaatggttgagactacagctggatgagtgagaaaggttctggggtctctggaggcctccaccctcttagtagcagctgctcctggtgtttgtggtacttgccttgccagtgcctcctagggagaaaattggtgatcaccgttgaagtgttaggtacagtagggttagaagtgcaactcatttggtagagtgtttgcctagggagaaagcctagggatcgagtccagcactgcacttatcctggctttgtgtaacccaggcctaaaactcagttttcaggaggatcagaagttcaaggttgtctttgactatataaggagttataaactagcctagccctacctcagactaacaaaaagtaagtaataatgagttggatatagtagctgggcacagtaactcctgcctgaagtcccagtacttgggaggctaaggcaagaagaatgccatcaaggctagcctgtactaaagagtaaaacctgtttgatgggagtggggaggaggggcaagggtgggtgagatggctcagtggatagaggcatttgttatacatcctaatgacatgagttcagaccccagaactcacatgtagagagaaagacgctacttcacctgacttccataggcaagcctcccccatttcactgcacataaagaaaggaacaaataaataaatggttaaaaaaaacagcaaggagataataacttacagtgcttttctggaaacactctgctgagcttaaaaacaactattaagatgcctggagcctggcatacagtaacttaactactcagtgtgacagctactgctattgctgttatcccattgctgtcacaggtggtcaagttgctttaattattgttggaattttctttccttctttcttccttccttccttcctttctttctttcttttcttatcttttcttttttctttctttttctttttctttcttttttttttttttttttagacaaagttgccctaggtagccatggctgtcctggaacttgttatatagaccaggcgggccttgaactcagaaacctgcctgcctctacctccagagtgctgggattaaaggagctactttctgaaagcaaatgtttgggctacagaagatgtgactatcctttggcccaagagttaggaaaacagagacctttggctcacagccttgtgcctgcctccctcaccagggagggcctccggtcagaactggtacacagctggacccatgttgttgactcagtatttggcaacagggtggattttctctaatctttgccactctaaaatggcaggtgccttcatatttgatgactggaagatttatgagttgaacatttaaagtgtacgggagcacacaagcctagcacacagtgagtgcctccatatcttacatgtaaactgtgtgggctctgtggagtttctctgggatgccctcatttcttgtttgttcaatggtcgtaagcctcttgcctaagctctgcctgttgcccgcctcatatgctgaagaaagataacacccgttttgcctccctcctgaactagcagagaggcacaaggaggagataagtgaaaaagcactttgaaaactataaatgtttggtcttgctgctcctccttgactaaggccacagccatagatatctgtatcattcattcattcattcattcaccgagacagcaaccaggaaaaagaaaaaaacaaaccttgacttaacattttcccatttccatgagttaggacaagcttatttctccaaacctagacatcattaagcggaaattgttctttctagacaggttgtttcacaggggagttatttggtgggggctaggggggagctaaggtggaagtgctgtgtttactgagcacaggatcatcttattcactcttaacagctaccactggtccatcctaccacttagtggctaagtatctagcagctggttagcaagcattcttaatcatggctggtgtatgtagagtgccccatatactgccttgtgcagaataagctcaccaaattctaggtcttttcagttcattctctgtgtggcttggttactcactgatttggctattggttgccctctgccataaaattactaggcaagctcagactgttgaatgtgattcaaatggatattggctaccccattatgtccttgcctgcccagctatggtactagtgggagcttggaccctgcccagagcaatatcattcacatataaaatccagggcacagacctcctcaccccacactcacctctggttcagaacaagaatagccatcccttgttctacccatgctccatctgccttcctttctcatagcactcacatgcagatggaaccatgagggaaccatgctagagaaatctttagggagtcactcagaaatgacccttggaggcaaggctcagagaggaagcccaggtctagtgttctaggtctcctgggactgggtcaagcagcaggtgcagctataagatgccagggtagtggctgagtggtgaaactgaaaggtgtataggcccagacaaaagtccatccgtcttgcctgcctgtctatgcaggtggtctgcacctgcagccctttcttggtctgatctggttataggagaatagaggtcaatattggtacccaaaacttcaataagagaagtatgtggaagtttggagcaaagcctgcagttgacatctaaccctttgggcccttttcagagcccttcagggtaaaaaagagttctctctcctttgggcttctcagtacctaccttggaagggtcagggataatgacctggtgaccaccagatcttcctttgcagggtctctgtttgtggcactgtgctaggtcttttcattttctttctgttttacttcattgttatgattatgagtatcatcatcattattgtgtgccataatagcaagtgtgtggagggcagaagacacttttatggaatcagttcattcctatctttttttttttttctaagatagggtttttctatgcaacagccctggttgtcctggaacttgctgtatagactaggctggtcttaaactcagagatccgcctgcctctgcctcttgagtgatgggactaaaggcatatgctactatgcctggctgttctcatctatctttttgtgtgtttggaggatcgaacacaggtctgatgagatttgattgacaagcactttttggttttggacacagggtctcacaatatctctggctggcctagaacttgcttttagaccatgttgacctcaaactcacagagatccactagcttctgcctcttgagtgctgggattaaaggcttgtggcaagcaattttacctgagaagccatctctctgatcccttgtgtctgagctttaagaggaggttatgtagttgggagcctggactgtagaattgtagttatgggtttgagtctgggcatcatcacatactgctgttgggcagtagccacgtttctttttttcccctctgtgtatgttgtatctgtatgtgttgtataggtgtgtatgtgtatacttgtctgtgtgtgttgaggaagccagagattggtttcaactatcctcctctgtcattctcctttattttgaaacatggtctcttgctgctccgtctaaacagctggcccagggaccagcctgtctccatcgctcaagtaatattgttacaggtgcatacaccacacctggcttttcacgtgaatgttaggaatcaaactcaggtcttgagacactatctcaaaaaacacaaacaaatcaaaagacaaactcaaaccaggaagaattactcttttaatttcattgtggaggagaatgaagggacagagaagaaaacatcacagaaatgtagctagtacgtggtggtaaagtagtgctttgaacccaagcagtctgcctcagaagccctttgtcccatttgggggtgggggtggggcactagaaatgttgctgctgtagctgttgtatccagcactataggtctttgattttgttctctctgctgattctaaactgggagggggggggggacgacaccaaaactagaaacccactctagtcacttcagatccccagagaccaacatagtactcacagtactcattaatatttgcttaatggcagagaatactccctttcttcattaatcaatcagaggctctttatcgaccatttcctgtaggctagctctgaacacatcctgggaggactgcaaagtacagctatgcttctgtgagagaaagtaatgtgtgtgtgtgtgtgtgtgtgtgtgtgtgtgtgtgtgtgtgtgtgtgtgtccatgtattgaggggggttacattccagagctttgtgtcattggcagaaattaccacatgggaggcaaaaatagtacaggtggccaggtggcttagggatgtttttcaagcctggattctcacccctccctgagtgggccactccctctttctacagagcagagcaccacagattgccttccctttgaccagggcagaaatcacccctatctcctcagggcttctggaggttttcttatctttcctgaccagtttatgagcatctagaaggagaggctaaaaggcaggagaacaagactgtagaaaaattacacctgcctcaacactgcagccaggtcagctttttagaacctaagttaaagtggggtacagaggacacgtagctcagtgtctggaaagaggagttcagcagcctcctcagctacacagagagtcgaaagccaacctggaaaaaccctgtctgtctcaaaacaactaaactgcatctactaagaacactgttaatagcgttctttcgacctacctttgtttatctggtttggttggtttggttttggttttttacagagtttttctgtgtagacctgggtgtcctggaactttctgtgtacaccttttgagtgatcactaagtaccaagtgctgtactcagtaatttatatgcattctttttgccaggtatctctaaatagtttcttaatgtgtgtgtacatttttgtgtgtattcacttggatgcctatgaagggcaaaagacaaaaacctcaggggtcatcctcaggatgttatttccctcctttggagacgggttttgtcatttgcctgcagctctccccatctcgggcgtggctggctggccagcaagctccaagtaagcatccacttgcctctgcttccctggcactgtgtctgaagcatagacttgagtagtaagtggccctaccttctttacaggaaatagagacccagagagatgcttaaggtcctcagcttgtataagataaaacctagatttgaacctagagaggtctgctccaaagcccggttctctctgttgctcttcccagtgtatttgagaatgtgcagaaggagggttggggaagcatcttggaatctgagggatacccactgacctgccagctgagaaagtttgtctgcaaggggatgctccagggcttagggttattgtaggatttgccacaggcatgtttgaacttagccattcagcatcctctaatttcctgcttttaccctctcagctgctagtcaggaggtttgtgaaggtgacatcatccagctgaatcagctgttgctgtagacttacgggaactgaaaatcattgccccttcctgctttgcaagtctctccagaatgaagttagagcatgggagtcttccacctgtctacagggtcatggctaaaactcacaatgttcactgttttaagagctaaaaaggtagaccaggtgcactcacctatatctcaatgcatgacacgcagaggtaggtagatctccctgagttccaggccagccttgactacataacaagtttcaaaacagccagagtggcatagtgaagccgtgcatacttattttattttatgtatttttcagacagggttctatatattaccctggttgtcctagaactctctatgtatatgtagaccaggctggcctcaaactcacagagatccacttgtctctgctttccaagtgcctggtgagaccctgtttataaaatcaaatagagcagaaagccaaaggatgcacttcttcctccctcctcccgttctccacagtctcattctgtagccctgggtgggtcaaactcatagccttcttggcgggattctaggtctgtgccaccatgtgaggcttaaaaggttaatttggggttgttttgttttgtttttgagggactggcatctcaagaacgttttcttttctgccttcatttaaccctgtaactcttgatccttttgtgtctttttgcctaagttctaagctaaggccagcactgtagatgggccaacaaaatgtatttgtggattttgattttaaatttaagcctcttagagtctgattaggagaattcaaacaaacaaacttgtatacttcagagtagagcagtgccacaatgtaatctggtggagctctgcctatgaccagaaaaaaaaaaaagttatgtatattttttcaaaaggaaagaagtgggaagctagagagatgcttcagaagttgaagagtgcttcttgttcttgcagaggaccccagttcactccccagcacctcctgtaactccagttccagaaggttctacaccctcttctgaccaccacagacacatacatataacttaaagttttaaaaattattgttgttattattattactactatcaccatcatgattattttggtggctcctacctgtaatttcagcacctagaagtctggggaaggaagattgttgtagagagaatctattgggaactgtatggaagcattacctgtcagtaaaaaatcgcctgtgaccaatgagctgaggcaggaaataggaggtgggagtaccagcagagagaaagaagaattctgggaaagagtcagggatgagtaaactgagaagaaggtaaccagtcatttggccctcagaatagaataagtggggagattctccccaaatactgatggagatagacggtcatatgaagctgaggagaggtaaccagccacatggtgggacgtagattagaatgaatggataagtaagttacaactcagccagggaacaagcctaagctattggcctaagcgtttcttcatgaaatagcaagtctcagaatcattattttgaggaacttgtacacagtggaaaagccctccattacagattgccacaagtttgagattaggctgggctacctggtgaattgaattccagggtagccttagctgcatattaagactatcaaaagcaaaacaagtgaggaacgagttagttgtgacagtaagacatcatacaaacttgcctgtgactttgcctctctcagtcagtggcatatcacatgagctatcacatttagaggtaggctcagtaaacagacagatagtcctggcactagagaggcccaggcaggaagattacatgacccatgagtttggagtaatgcacccagcacctacggagcactcagtgggtggtagcccctttgatactttcttgacagggaacaggccattggataagcctgggtgaggcttttagggataggttggcttggaactggactttgaagcccggttaggatgttgataggtgtagcctgtcagatagatatagagcaccgctggaggctggctatttgctgtataactttttttttttttttaagatttatttatttttattatatgtaattacactgtagctgtcttcagacactccagaagagggagtcagatctcattacggatggttgtgagccaccatgtggttgctgggatttgaacttcggaccttcggaagagcagtcgggtgctcttacccactgagccatctcaccagccccaactttttttttttagttagcacacaacactaggtatcgttacggcatctcaaacaatgggttatagtagattctccttcccttgtctaaccttcctccccagttgcttcttttttcacgtctcatgtgttcttttgcccaccactgttcttccttaccacctatattatctccgcttgatctccatcctagttattttggctttacccacatttacactcacttacacacacatacacacttgcacattacagcctaggatccatttatcagagtgtaattcttttatcttcctgagattgtgtcatattttgtttttattcatattttcaatattttatttaacataatttctagattcatccattttttgcaaagctcataatttcagttttttttatgactgaataaaattccattctgcacacacatacatacagatgtatgagggggagtatggcatctggaagatttcagactaaactggacaatgagaggggcatggaagcaagaagaagaaaaaagaagggaaaaagagccaaaagccaaagatcaatagagcacatggccaaaatggcatggttataaatggaatgagaagctaggggaagagatgtgaagagaaggctggagaggtttagggtgggggacagggtaagaagtgctggaaggagcctcagggcctaagtgagccttgtcctgggtttctttaggacctgatttgtgtgtgtgtgcgcgcacgcttgcacacatacacacacataatgtatttgtgtgtacacatatacacaccacacttccattatccattctttagttgatggacatataggctagccccatttccttgttagtagagcagtagtgactgtggatatacaaggacttcagtggtaggatatgaagttctttgggcagatgcctagcagtactatagctgggtcatactgtacctctattttaaagttgttgagaaccctcctatgatttccataatggctgtattagcatgcatccttagcaacagtcagtaagggctcctttctcaccacacccttgccagcatttgttgtcagatttcttgatgattttctgtataacctttaataggtgactttgtgtctcagagcctcaggtttcttctctgtaaagtgtggattctgctgacctcacctcaccaggtgctggtagaatagacacgtgaggacagatgaatagaagcccaggatgcattttctgcaatggaaatagccaggcccaggctaggaattaaacagctattgctcattctctctttcaccaagtcaagggaacttcctccatggtctccctgctttgccctggctcccttcacacagcagacatgagccttttaaaattacaggtcaaaaactgtgattccttgactcaaaatcttccactaactttctctctacacctcccccacacacacccttgatatacaccccaggctggccttgaactcagtcatcctgcctcagcctcctgaatgctgtgattacaagtgtgtatcagccccctcaactatccagtgatttttttttttttattcatgaagatgaaagctggagtgtatggggtataggggccttggcagggcagctaacaagataagtgccctagagttcactgtccctgatctctcagtgcccatgctcactccctctcctagaaccagtcttgtgttccagctctcatgtccatccccgtgtgtgtacacatgcccggaagcataagaggatgacatgtgctgatggtatgtacccaggacattttgtaacagggaaggacattgaccattgctctggggctaccaaaggtcacaagactaagaaaaagccaagggtatttgggcagccttcctctctaaagtgagtcatttcctgagggatgttggtcattcattcatttgttcattaacaaatacagagttcctgctgtatgtcaggcattgagctagagcttgagcaaacagtgtgagcactgtcttgtcattcagctgacattctagtaagagagagagaggctaagtacctaacatagcaggtagtatttaggaccacaggaaaaatacaagagaagaacactttctgttgctagctagactcgtcaggaaggcctttgataagggcttcctcgggcctgagtatagtagtgtgatccatgcaagtattaggggaaagaatattgaaatagagagaacagcaagtccaaaaaagacttcagacatgttcatatgagagaggcaaagagtgtgtagaaattgagcctgacgtaacctgaagccaggtcttcctgcaggccacatagaacactgtttttattctgacaggcatcgaggggttttgagccaaaagatgatcagatccaacttaagcttcaagagaagctctgctcactctggagcagggatctcagcctgtgagttgccacccctgtgggggtcgagcagccctctcacagtgtatgcatatcagatatttacactatggttcatggcaacaaaattacagttatgaagtagcaatgaaaataattttgtttggggctcaccacaccatgaggaactgcattaaagggtcgctcgttaggaagggtgagaaccactgctctggaggatgaagccctcaggcatgagcaggaacgagatggtgggagctgcttataccatgcagatttctggcagccgtggggagcagtggtcatagcttgatacactggttttgctgctgcttggtgggaggaaggaggagagagagggggtccggccatctggactgaacagtgaggaggtacttgctctcataaggagagtacactatagcaaataattgttttctgctggggctgtggccttttgtattcaagtgttagttacttgctctttgactctggacaagtgtttaactttaccaagcttcagtttcctcaattgtaagactcgtgtgtaagtgttaagcagttgggtgctgtaaaagctagatgggagtaacctgtatgacagactacaggccctgcctactctgaataagctctgactaagagtaacacaggctgcagttgttggaagggagggaatcccaaggctaagcaggcttctgaggagcagggagcaggctccactccatttccaccgttccctcaagaagcccaccctccaggagacagctcagacaccatctgtccagcagagaaaagccactgggagacagctttcaagggagcattagatagaagagcccttcccaagaaacctaatctcactctcagcaggtgataatcccagtagcctcccctggtatctgagcccagcccacccacttccttctcctcccccaccctgccacctagactctcttccccttctcaccatcttcaggctgccacccggaagacttagcagctggaagagctctaacaggaggcccacatctgattggatccagcctttcacatagatcaggtcaccagggactgtaggtaccacctgtccagacccctcccccaggtgcctgttcctgggcgtggagcttgatccctgccaagccagctggagccaggaactcccactgtggcccagctgccgccctcctgtccttttggcggagaaactagcttaacccttcaggtaccacacatgtagttgttcatggtctcagttcttccttgcagtgtttgctgtagtggccctgtacactctgaattgttttgtaaaattaatttattgcaaatacaacagagaattgcttggttttagtctttttagacagggtctcattggtagcctagtttggcatggaatttactatatggctcagactggccttgaactggagacagtcttcctgcttcaagcttccaagtgctgtatttgtatgatatgtgccacttgcctggtaacataaaataactaatgcatatgtatagtttcaagaatagaagataagagtaaacaaactctttacccagcttttaaaaatcagaatatggaccgttatacagtgagaccctctcggggaaaaaaaatttaaattaataaataaatgaaaattttaaaaaatcagaatatgggggagggggactggagagatggctcggtatttaagatcattgactgctcttccagaggtcctgagttcaattcccagcaaccacatggtggctcacaaccatctgtaatggggtctgatgctctcttctggtgtgtctgaagacagctacagtgtagtactagacataaaaattttaaaaaaattagaatatgggctggtgagacatctcagatggcacttaccaccaagcctgacaactggagttcccctctctggaaaccacatggtgggagaagagcactggctcctgaaattcaatgacctccgcaggggcgtgagctcctgcccttcttctctcgcccccttcacactaaataaatagaaataaaaagccaattctaccatcaggagtaccataaagtcctttgcactcttcccctgtcagtcacccactgctcacttgttctcctgaggtttattgggctttgttttgcatggatctatagagaacgaaaaaaacttcttcctttgtcctctgagggttctatacttgagtctgtgagatcagtcacagcggaagaacttaacaggtgaggtggcgtgtagcctttacaagttgattgcatgtacggggcacgcatggcatgaaagaaagctaacacccaacccatttcacaggaaaaaggtgtgtggtggaggccctgaggctcccttggcagaaaagggaggagcctgtgatagaaggtttctgggccatgttgtgacttcttagttcagtttctcctggttgtgagactgcagggagtaggttcatgacagttctttaacttttgcacaggtctgcctttaggttatgagggaaggtaaagagtccttccatgctgtgccccagcatgccctccctcagtgtgaggcaatcagcatttgccagcagccttggggatggaagtccctgaacttcagttcctatccccagacaatagactctcctcctccatgccttgaagctttaaacaaggctaaagatgtatgttcctatgtagtttgtttttttcattcagcattgagatccatctatgttacatgtatagttgtagtttatccattttttttctttagggaggttgttttatttgttttatttttagaacctttttttttttgaaagggtctataatttattactggacaaacatcctaatttaagacatgagcaagtctccaggtttaaaatgttgaaatccatctggtaggactgattgatgacaattcagtataaatcctcagtcttgccattgtgtgaatccttacagagccagcttcgttctcctccagtatcttctcttagagttgaacctgactttattaccagttttcatctggatccactgaggaatgggacgattttgcttttgtttcttggccagaaatctctggatttggaaagtcttgtgagaaaacatggcgagaagccgaatcaggcgtagcgcacacgatggcggagaaaaggagaagagaaagcaaagcttttttttttttttttttaaagattttcttacttatatatgtgaatacactgttgctctcttcagacacactaggagacgacatcagaccccattacagatggtcatgagccaccatgtggttcctggaagcgcagtcagtgttttttttttttttttttttttggttttttgagacagggtttctctgtgtagccctggctgacctggaacttactctgtagaccaggctggccttgaattcagaaatccgcctgcctctgcgtcctaagtgctgggagtaaaggcgtgcgccaccacgcccagctgcagtcagtgctttaaccactgagccacatttctagcttctttagaagaattttttaagggacaaggtcttactcttcagtccaggctcctagaacttattcttattctgtagtccatccagactggccccaaactcatagttgtccttcctcagcccctccgtgcaggaattgtacaggcatgagccactttcccagttcagcatcctcattttgcatgattaagtcttaaggtatcttcccagtgatctgtttagtggttgttcgggctattgggttccttgctgtcactgtttcaaacgtgtactgtgtgtgtcctgtacttatgtacatacaccttcaaaagcagccgttcccaaagtttagcccatcaggatcacctgtagggtttgcataagtcatagggtgctgggctcctgcctgtctgattggcaccctgagtagttgtcaggctctcagcagctgctgctgcaagtccttggacctcattttcaagatggttgtcattaagtgtattctcgggaatgctgtggaatcattgataggaaggtaattctggattgttgtcatgggttttttagagtttacactactgctagcatgtgtgtctttgctaatcttgatctggtcaggcttttaaatgtttatggatctgttgggtatgagatggtgtcctgtgttggttttggttttttttgttgttgttttgttttttggttattttcattttttagattgcaaatggggctaaaaggtttcttctgtgtgccagccatttatattttctcttaaaatacatgtgaagtccttatcccacttccactgagtcagcatcttcctaaggatttgtagggttctttgtattatcctgagtgtgaatattttgtctactcatgttataataacatctttcagtttctgatttcttttttctgtaaatgatttttttaaagatgtattttatgtatatgagtacactatcactgatttcagacacaccagaagagagcatcagatcctattacagatggttgtgagccaccatgtggttgctgggaattgaactcaggaccttaggaaaaacagtcagtgctcttaaccactgagccatctctccagccctctatatgataaatttttatgcctagagttttttttttagatttatttttagtaattatgtgtttatgtgtctgtgtgtgggtatctatatgtaagcactggtgcccccagaggccagaggtttcaggtctcttagagctggagttacagtagctctgagcaacctaatacaggggttggcaatttaggtcctctctgagagtagtaagtgttcctagccattcagtatttaatggagttgaattttttgtgatttataacatttatattttaatagactttccctttctttgcttttgatccctaaaaagacattgtcaatatattcttctaaaatatttcttagctttttaattaaattggtttgttttatggatgtgtctatgtgttgtgtgcacatgttcgggtcagaggacaaagttcagtaatctgttctttcttctcaccacctgggtcctcgtgaggtcatcaggcttggcctaaagtggcttcaccccacagcctcctcgatagctctctcctaaagtttcaaagctttgttctccacagttaagtccttaataaatctggaacattctgtctgtccgtccgactgtgttgcccctccccccatcactttagtgcttttttttttttaggtgggatacctttattctagtggcttttaactagctgcaaatctaaaccatttatggcttgagtcatgctagaccttagacatacactgcacccctcgtgctgagcaaagctctcctctctggggaagtttgaccacattgaaaacctttccaagattcaacttctaaacataacctttttcctgaatgtaccttgcttctcagaaacacatactgagtgcatctagaatttgcctcacaatatcacagggtagagaacggttgaggaacagatggcatcaggttggcactgaattaatatttgtggaacctcaatggtaggctcattttgtcactttgttttggttttgttacttagagaattcttttaatttctgtaaccaaatccctctagctaaggtcttatttaatactctgtttataccctgtataaatggaaagaatggttgacatttataggccactattgctattaatttctgtattgttttggttttggagatgggattcttgctgtattgtctaggctgaactcaaacttgaagctcccgtgatgcctctgtccccacttgctcagcattaggattaaaatgtatatagttcctgcttgacattccccatcaccctcagctattatgatacacagttaacaaccctatatgtttcttagaccatctgtgaatatagtacacatttgggagtaaatcaccacaagtagatttgttggcatatacctttaagtccagcacttgagaggcagagcaggcggacctctgcgtctacacagtgagttctgggacagccagatctaagatgattgtaagctactggatgcagctgctgggaacaaagctctggtcctcttgaggaacagcaagcatcttttcttctgcacacacatcctccttgggagattggtttggtactgtacatttatgacagggatacagaataacattttaacgtatcaagtgaaacttgctgcatgtccagcataatattttatgtgttggttctcaaccatccaacagaaaacttaaaggcagaagggttaaatatgtgtaccagggtctctggcccacctaggtaagtgatacagagccggcttaattctcatataatatccccactttttaaatttttttcttgtggggtgaagtgttgtttgacaaattttcactatgtaactttggctggcctggaatttactttgtagaccagggtggcttggactcaattgccatccttctgtctcggcttcctaaatgctgggattaaagacatatgccaccaggatagcacctacagtctttattattttttaaacttaattaattagttaatttgttcccttgtttatttgagatggtctcactataagccttgactaacctgtaactcactatgtagacaaggctagcttcaaactcacagagatatgtctgtctcagcctctgtctcttgagtgctgggattaaaagtgtgtgccactatgcctggccaatacccatagcactttttaaagtgtactttctatattatcaggaataataaaacgtggccatggagtctcatattgatgaagaatcaggctttgagaacacacatgagctcacagctaggatctatggagttcccaagagaaggccatctatgtcctctatggcctgcagtggtcatgctgagttgccagccttccccatggaaagtctccaaatctagttaggattctgtcagtttctacatccctaactttgttgctctggagagcttcaagtcatctcttggccatcagagggtctctaggaatgacatatctataattaatttaatataataaatactactgttaaattgagtccaacagtatgcaggatattgaaggtgcactgtcagtttatctccacaatagtccttcatgggaaatgtgaagttcttttgaggtatgtgttttgttgttttttgtgctgggagtggatccttgtccatggcaggtaagctgtctacactaaagttatattctttgttctctttgtctgtactagaacttggggagtgttccaagttaaataatagttacaaggtttaatactactaataaatgccaataaaactcaatccaaatccagtcttaatgttagactcaaaacaccccatcattcgctcttttttttaaattaaatttatttatttattttatgtgaatgagctttctgtctgcatatatgtctatgcaccatgtatgtctgatgtgcccagggaggccagaagagggtgtagacctcttagagctggacttacagatggttgtgagcctccacgtttaagcgctgggaattgaacctaggtcctctggaagaacaaaacccactgagcctctcttcatccactccttctccattactgtggttctgggcttccctcagctcacctcctaccccatgcacttgttattgtttgatgtcctttctggtatgggcatctggcttttgtctggctgccctgcctcatactgaacattttaaagaagacctatagcctctacctgctcttggccccagactgtagcccgagtgctttggacaggcagcaaaggattgggttgccaagtgatagctgtgactcatcagctatggatggtctgtgctgtaccaccatagcaaagacacatccctaggcctggctcttgacagactctacagtcaaacatatctgggtttcaacactacctcctcattttgtgtctgtagaatcctgaacaagtagattcaccttagtgacctctacttccttatctgtagatgttaattttaaaataagagctcagcacctgctgtaaatagtagccatcttcattggcatcagaaggaagttggtgaccagatgcagttccatccagttcctgtatcacagcctattctctaggttgagtgagctagtaggtagaggcggcacaggccaagaacactggggagccagtgatgtgctcatgggtgagcagtgtaaaacaggcaccagaggcttcttaaatggctttctcagtgttccttcatcactttggtttataaatgatgaaaatcagatggctgccatatctgcacaactttaaactagacccttactggggtaataaggaaatgagtaagagacagacagacattttaaaacaaaacaaaacagctgggatggggtgggccatgcactctaatggggctctgatagagctatactagcagcagcccagaaatccagtgttcgttttatccatcaggcatgggtttattgtatatagctggcggaagagtcaggtttagttaatcttagtaggagggctctactgtgtgctgtctcacactgaacatccaggagcacagagctatggacagtactttgtgcacatgaactaaaagaagaattgagatccttggtatggccatgctcagtggcagcagtacattccctaaggatgtcatccattcctcacagctgccaccagaggtgaagggacttcagggctcacaccttatataactaaataagtgccagttctgaggctgagatagagcgtagcactagagaacttacctaggccaagtgaggcctgccattccgtactcagcgccacaaaagagaagacactgccaatagtcaaacttactttctagtcatcaggatggctcatcaggtgcatgtacctgccatgcagatgtggcaatctgaggtccacccttggagcccacatcaaggtgaaggagaaaatcgactccacaagatagtactctgacacacacacatacaaaggaggagggtgattttttttcaatgttgaaaagtttttgcaattaaaaaaacttgttttatttatgtatgtgcactcgggtgtgtgtatgtgtaccatgtgcatagaggagcctgtggaggtcagaagaggcttgggttccctggagctggagttacaggccaccactcggatgctgggaaccacacccaggtcttccaagagagaagcaagtctttttaaccacagggccatctttccagccccaccaccaccccaaattttaaattaaaatacaattacatcatttctctcctttttcttccaacccctcctttgcaaattcatggcctctttttttttttaaattattgttatacatatatatgtaatgtatacataacaatatgatttcaaagctgaccatttaatactggataaccaagtaggagacacctccctggagaagaccagctctccttccctcaccggcggtttcccatgtccctttttctaggcttggatctctccctttcatgttaccatgcccattggtgttgatagtgttcagatcttaattaggcagccatactgttgaggtatcctgagtgtagcttccctgtcatttctaggagacacactttcaaggttgacttcttggtctactgcctcttaaagtctttctacatcctcttccacagtgtatcctaggtcttagatgtgtgtgtgtgtggggggggttgtttttcagatgtatctgttaaggctgtgtatcctagtggtcagttctccacattttcaccagctatggctttctgtaatggtttccatctgctgcaaagagaagtttctgtgatgaggggtgttatcctgtggtatgctggtgggtaaaggataactagagtgaagttagggactatactgatctagtaaagtggagacagtgggttcttctctaagattcatgagttcattggctccaggtagaatcttttcttctaacatgaaacctcagtctctttccttacatcccaccactcccttgagggaagcaaaattcccacagaagggtcctagggcttcagaacgagagtgagagctcttctgatgtaaggatgtaagtaaagccacctcaccgagatgatgatgctagaacacaggaaagccatgtctcctgaccaagaagtccttaacacaagccagagtactacccagccccggctggcctgagattggccttcagcttctggtcttctgtgattccaggtgctggggtcactcctggccagaacttttaaattgttggggtttgttcatttgtttctctgtgtgtggaggtgttgtttttgttgttgtgcccctcctccaaaaagactaaaagtcgcccttaagtgccagtggtttgttaaaaaaaaaaaaaaacaacaactgtcactgggcagtagtggcgcacacctttaatcccagcacttgggaggaagaggcagacggatttctgtgtttgaggacagccagggctatacagagaaaccctgtctcaaaaaaccaaaaaaagaaaaaaaagaaaagcagtttgggattttttttccccaaatgaatcactgagcaattgtgcatattctctctctcctctgtgtgtgttgttttcttaataaggataatatattagaaaaagaagaaagcttcagtggggaccttggtaaaaggaagattctaatctctgaaatctatagaggtccccaaagccagatcatacttgccctactcttgacaggccttcaaaaaactcgggcttccctgaaccagctgcatctagtgagcactaacggaaagcccttgtattttctttcatgcaaccaagcatggagatgtaggtcaggcactgctggcctggcagttacagcaattctggctttgccctgcacctgcagccatgttctcagagacccatcgggtagggaagggataggatcttcaagagcttgtgggtggagctggctggatcaagcagagggtcctcagaaaagaccatctggaatgtggggcctgagaagatggctctgcccaggcgtgtctgtggcttctgttcagcttagtgtcatcatcattgatggaggagactggggaggtcccattctcctgctgagctcagctgggtccccagacctgcacctgaaccttcctccgcttggctggtgtttacagagctgaagctgctgccctttgggacccagcctgttttcatttctgctctcagctgtctgatctccatggacctcacctacacgtttgtgcgtgcccgtcccccacgatgctgcttcactaggcccctcaagcctggcacactctggtctttgttctctatagaactgccaactctgtgcctggcactgggatagcttttctggctctgttactcgcctagccacaccttccccaagaccacttctttctttagctgcattctgggggcaatgcttggccttgaactcacagaaatccacttacctctgcctaggtactaggattaaattcatgtgccaccacaactggctctgctagtgattatttatttatttatttatttatatgagtatactgtagctgtcttcagatacacaccagaagatagcattggaccccattacagatggttgttagtcaaccatgtggttgctgggacttgaactcaggacctctggaagaacagtcagtgctcttaaccactgagccatctctccagccccacctctagttatcttaaagcccatgcacaatcttggttcaacatcttccctgtggagatctgttagacctaggcagaggatgctcagggctcaggcccagagaacgttgactagcccactgctttgtccccagctcatcagtgctcaccacctgatacagtacagattggataaaagaaagcccagagataaacaggaccacttgtctgaaccttcctgctcctaactccaggcagcctagcttacaaagagggcctgtacagatggcggatgggtggtgagtaggcaggttgaaacacaacactcaatatatccttcctttactgtctcttgagacgtggagggaaccagagggcatatggtatctcttcctcaaaatcatctccaacttccaagcctaagagcatcgggtgtggaaaagggcagcaaaaggaagaacttactgcgtgcttgttcactgagcacttgaggcagagggaatagaatcattggagttcaaggcctgcttacaaaatgagttcaactccaacctggtttatatcacaagactttcctgggatgggtcctagctgttataaataaagctaaaactaacagactgtgggaagtgccacgcatctttagctggaatcaaaatatttattgggcatatactgtgggccatttgattctgctgccatgcctgtggaatgggtgcagctgttcctgtaccctagaacatcaggcttagcagtctttgccccaggagtcaggaggcctaagaccaggctttgacttatagctggtggtcgttgggcaagtacctggatttcagtgtctatctattgagccacacattatgacactgagatttctgaggagtccatatacctgagcagatagttagctgttctagacttcgtggtaatgatgtgtattatcagttgcttggatagcacacctttgggtggcactcccctgagtgtctgcagcctgtagctctgcacggtgaagggctgaggagcctgggttgtggatgtggcccacaaagacctctaaggtttcagatatttggagggtggggtgcattcatgcgtagcagagggggaagagcagagggaagggcattctggagatttgtacccattgcataatcctccagattgcttgccttcagccagtggaattccaaacatttctaatcagataaaggtggctgaaaatacccaggacttgtccggactagttggaggcagtgctagggtgaagaggttgaggctatagtgcttgagaaagtctgaccacttggaagcttgccctggctcatagatgaaccactgtcctcttctccttaattccccaggatggggagccagagccattgggcttttagctagaggagggacaggcccttttgcagcaacacatcctcctggaatgttgggtctctaccttctcacatggggtacttaaccttttgagtgcccctaaaaggatccacatgagttcctttcttcctcttcccagtagcccttcctttcagaatccctgtgatggggtctctttcacttgtttgtttgaggtttgtttgtttgtttgtttgtttgttttaaatgtacgagtgtcttccatgcatataggtctgtgcattctctatgtatgtgtatggtacccttggcggtcagaggaggacactggatttggagttatggattgctgtgaaccaacatgtgggtgctgggagctgagccatctctctagcccctccttcactttataggtagggaaacaccagacaggggagtggacttatctcaagctaactaactagcaatggagctgagaagaaaaacccatcctgcccagcattgagagaggctgagtatgactgaggggaaggaggcaggagaggctgctgtggaccccatttgttccaacacagtgcagaagatgccatttattaatattattattgcatgtgtttatctggtggggcacaggtgctacagcatatttatggaagttggctctctcccattgtgtaggttctggggttcaaactcaagttatcagatatgggcaacaacacctttacctgcaaagccatctcactggcccccaaagtgtcgttgtggatctgtgtgcttgtgtgctttcttgcttgttttgagacaggggtcttactatacatattggctggcctggaactcagtatatagactgggctggcctctagctcaaggatctcctgcttctgcctcccaagttctagggctgatggtgtgtactcagagaagatgccttttctagtactttcccatatgcttcccagccttctgcgtgagcctctgaggacctggtgtctggagagtaccaggttcctgcctagttgcttgatattgcaaggccttcttgtggtattgccaagatagatgagaatgaagagggaaccaattctcctggcctctattcttttgggcaccagcctaggcccagagaccagaagttatggttaaatggaaaaagtaagcagatggcttccttgaagatggtccctatgagcctaagagtaggagaaagctgggctgaaagaccagtaatgccaaagaacctgaggaagaaaatatgacaggtgaggagagaagcagcctggccctggttgagaataaggacacacacacacacacacattcgtcatgggagactcaaactgtgccttggctaataatgaatctaacactagttgttcctaacatttcctcagagttgactgtgtgtcatgatttgcatatgtggtggtgaatccttgtagtaatctgaattgaggtcatttttttttatcccattcatagataagatgttcagaattaaacatcttagtcttcttgccaaacctgctggctacgtgggtactctgctctgacagcctagcttggtggaaagtaagtcagccttattcttatccaggaaggacctccagttcacatgtgaagaaacactcagacaggaaactagcctaggctaaggaagcctggcagagctgcttctgtccatagctaccttccttggcagctggaacagcaaagatgagaacagatccagatctttggataagtagaagtgctcgctccctaaaagaatggttttccagccaaatgtacagtgttctacacagaaagaagagactgccatggaatgactgtaacctcctgctgatgtagatcatatacatgggacaaactctgtgtgatcatggcagtctatctcttactccatcagagagatggtaatgttggaggacctcatgcaaaggtggatagaaatgttaattaattctaagggtggagtgatggatggctcagaggaccagtgttctgttcttagcacctagatcaggctgctcacagccgcctgtaactcaagatccagagagccagtgcccttttccttccttagcagacaactgcatgtgtgcacacatagtcacacacaggtcactctcgagtctgagtgtccttctggcctggaacacgaggagactagaacactgttatcatctacttgagattggttagaaagtcaccatgtttgagatgagaggactgagttgagaaaagaggcctcacaaagcatgctgcactgcccagagcaatgatttgctgagctctaaaaccaggctacgaggattcaccatcacctgagatgtgtaacatgaccttggggacatcatgcttctttagtcctgtgttgtctgtgacatgaagagtaagaacagcatttactcttcaggattttgtttggtttcgttgttgagaatgtcatatgtagtactggctggcctggagctcactatataaaccatgctgtcctcagactcatggcagccctgactcagggttgatgctgggattacagcatgccttgcactcctcgtggctgttgtgaggcctaggtgatttcttaaactcaagacactggtctagtgcatactggttgtcatgtcacctgccctctgggagtaggtggttgcaaactctattgagcaggtctgccccagagaatgcttgtgatgctctcctggtgcccagctgagtagcctgtttcaaagctggccagatggaaggcctcccttgctctgccggatgcttctccattccccagcgaggtgttatctcctccctgcacagccgcttcctgttctgagaaatgagcacatctgtcaggctcctcttcttagaactaatggtgggggaaggggaaggagaaaagaggttgacagatgaccaatagagttagaggaagatgtgaaaatgtccccaaagattccctgaagctcacatagcctcagccacatagaccctcagccaggaagccatcaaaagatcaccttgtttcactgagcatttgcaacccctaatggcaacattgcccctggctgcctctgctcccaccccactgatgtgcctgtctagagcacccgcatccaggtctctgttcctcggggtagaggagagattatttccctcacatcacacaagtcaacagctcccctgggagtgccaggggaagtggattccagccacaagcctcactccttctgagctgctgcctgcactcctgtggagagagataaggactctgtgtgccaccccttcccccactgcctcccagggatcttctaactaggtctcatttgtctactcagctgggagaaactgaggctaggagcaggtgactctgcaagtgactcacaatctatccacacgagaccgtgccaaggccagggacaggcacactgccaccgtttcttgcgaggtgtcactttgaggagccccttcctcttctccacccacatctttcctgaaataactgatcaggaaggaagcagtgggcacaggcctagtggctttccagagtcacccaggaggaaggaagcactgtctggcacaggggcttgcttgttcctcactgaaggatgaggtttcactttccctggttctcgtcatgtcctctccctggggctcctctcaactgactggatgggactctttcatttggctgatagctttagaccaccatactctctttgaaggacccggaccctgaccatggcctagaatttgggttttgttgcctgacactttgggcttaaactaccctacccactttggcaaggtctctgagccacagcttacttacctctttccttcgaagaggtacacgagcatggctcattatcagggcagcagaaggtctattgtttggaaattgagaagagcccagcctaattgttgcttcagatatgtaggcctcaagtgggcaacagtggtactcagtggcagtatgtggggacagctgatgagctgacctatagaaagggcggatcagcacctcacaagaggacatcagaatgaataaaaaccccaaacccatcaccacttatataaggatcttgagtgacctagagcttccacattcacatttgcaagggttattaaaaatgccctgaacattaaaagaagctttcattcatttatctacagtagggtcctttataagacctgccgcattccaaatgcagtgccaggctctagagataacaggtaagaagcaatgggggagacaggacaaagaatcatctttcaagtgaatgggagcatagatggttggggaatatgggctaccagaggtaaagtgctcagactggcacatacacgataaagggccagaaccggtgacacaggtctgtaattccagccatttggaaggctgaggcagaagcatctcaagcttctgggtagcctttgctgcaggtaaagttcaaggccaacctgggcaacagtcagaccccgtctcttaaacagaaaataaacagagtactgaggatgtgcgggtctgtggatagcacttgtgtagcgtgcgtcaggctctgggttcagtcctgagtactgcagccagctgtcacatagggctttattcttacttcttaacaaacgacgacactagaaaccagagagatgagtaactttgctcataatcacacttgggaagaaggaagcgtgaatacaggtgagagagaaaagggaagagagctgcattcaggttgggactatacgcagcctctggtgagcccctgccctcccagacatcatgtcaccatgacgtctttggtgtcgtagttagttgaggagggaagttgagtcattcagttagctgcctttgggcagaaatctgtctaaaagtcagtctacacctgattaggtgagctaggtttcaaggtctggcttaggcttggtcctgcttgcattctgtcccaagactgataggggagaccagcacaaagataggagcttcccttttctatcctgccaagatctttgtgcctttagaatttctggtggaacctgattttttttttccttagtgctacccataaaattgaagacatttaagtatgccaagcaagtgctctgtcactgagtaacatccaagaccctgggagcatgctcttttgcacctaaggcattttacccctcccctggctggcactggtccatcatcggggcctcctcaactttcctgatgactctacccatagcaggtactcctactcactcttgcttctaagccccatggtctatgaaatgaccttactgttttttgtgatactctcttttcctttttcttacttttttatattacttcatttgtatgggtgttttgcttgaattatgtttgtgtaccacacgtatgtagtaccagcagagaccagagagcacatcagatcctctggaactagagtcaccttatatatggctatacggcactgtatggctgctaaaaaggctaaagccaggtcctctggaagggcagtcggtgctctcaaccaccaagtccctcgccagcctccactccaccactttcccttgtctttcaaaccttccctcaagaatctcttgagtctggaaagatagctcagcagttaaaagtactgactactcttccaggggtcctgagttcaattcccagcaaccacagggtgcctcacaaccatctgtaatgggatctgatgccctctcttggtgtatctgaagacagtgacagtgtactcacatacataaaataaatacataaataaatcttggaaattaaaaaagaaaaaagaaaaaaagaagccgggcgtgatggcgcacgcctttaatcccagcgcttgggaggcagaggcaggtggatttctgagtttgaggacagcttggtctacaaagtgagttccaggagagagagagagagagagagagagagagagagagagggagagagagagagagagagagagagagagagagagagagagaggagagagagagagagagagagagagagagagagagagagagagagagagagagagagagaggggagagagagagagagagagagagagagagagagagaggagagagagagagaaagttagttagttttgaagagggagtggagactagactgtcaggcccctcagtgtatatggccatgacaactggaaaccctgtaatgttggagggaaagacctttagatgggtcctagactggacttctcctggagtgaaggttaggaaaactggagtctgactgagcctgggctctactccaaacctgctgtgggttggccttgtgaatttgttgtgcttggtgggagtctatgactattgggtaggtcattaacattgtgtccccagccacactgtactccatacacaggcagcaggcaacgccacgggatttctctctcttcactttagcccatgctgagtccatcggaccttgggcctggggttcctgggagtatttatgacttcagtcccctgtccacttggtagtaaaatcagtgggagccctgaggagcagtggaggcttatctttgcttttccagacctaagagcgcaacagtcctgtttatttacccagagcagccgcccgctgagaaaatggctgtttgtttccaagtatgtcgtgtgaacctgggctaaatatacccacaccacagcttctccagcccccgccccgggaacagcacgccccattctgctccgttctctgcaaaagccactaccaggatccacgcccttgaaagccctactgccgtcaggagaaagaactctgagcaagagcaccctggccaagaatgcagcttaggaacagagacaggaatggtcggtgccttgttctttgtgtcccctcctccctggaatgactgttcctggacagtgaacgctttgtgccttcgtggggacaaggcctgtttactccagcccagccccagagccgaaaatttcctgtggctgtcagccctctacttcaggaaagttccagggcgggagccaggctctgtgttttggcaaccaccccagtgtccctgattccttgtggccccttgagataaccaagtcttctttctttagctgtggcctcttttcttcccacagcccaggactctattcattctttttgttgctttacctgggcctacttaactggctggcctcaaactcctgcatggacctgaggatgaccctgaacttctgaacttcttgcctccatctccctcatgctggagttataggcatgcaccaccataccaattatatgtagggtatcaggaacctaaggcgtcatgcgggatagccagacactctaccaactgtgctacatcctcagtctttataagttttcttgtttgacaaggcgaatagggactgaccaggatggacgaaacagaaaggcacagccagccactgctttctgcccagggcttggctctgctgcctttgccttaaaaccctatggtactgtgaaaggtctctcatttccaacagatggaaactggaacagtgggcactctgatttactaaagatggacctcagggcctcacacatgccacgtattgtgtaggacacagcagccctgtcctgtgaaggcaggccatccctgcagactggcgccgttctactacctgttagttaatgtgttccaagccttaagcaccagacgtcttacctcggttgggaaatgagactctcacctacctctgagggccctacgggaagatggagcaatacctggggcttagcagacgtgcagtgtatttgttttcctcgtatgcagtcatgtgttgctcaacttcccagggatgaactcaaaaatatgtcaccaggccactttgttgtgaagatcagagtgtacttaacaaacctagagaatatgatgcagcaaagagagatggcaaaaccaggaggggttgaatgttagcaccagcctaacttaccatttgtgtgtagtgagctttctctgccagacccttttctaagtacaagacaggatctcagctctcaactagacatatctagtacaggaggcaaattgtagcaaaatataatgtatgctgtggtcatgagaagtgctgaggagttgggtgtggctacctgtaaccttagtgctgaggcaggaggattgagaattctgggtcctgtctctggaaaaggagtggaagaggagaggagaaagaaaagaagatagtatgctgagaaaaagacctatagcaaggttggggtgggcacaagtgtggatgctctagacagtgtggtcacaaacacaccatatagccagcgtagggggcagagagtgttaggatatttgaacctttttctagttagtgtggctcagcccttggcacacacctttaatccctctcactggagtacagacacacccttatttcacacctttaataccaaacagcgaaaggaaaattagtttgtagaaggaagcacccgtgtttgaaagtgatgtctagttgagtggcagacacagtgacaaatcaggtaaagatttgacagaataagatatgcctaactctcacaaggtgaaagggaagggaagctactaagggagagacagtacaggaaaagagagttcctgcagagcaggacagtagagttgagagggacgaggctgctagagttagtttgaggccaggtagagcaattcagaggccaagagagaagccagattgaatcagtcagctgggagaggaatctgagccagaacagctgagttgaaccagccagccagagttcaggaagaacaagaaagggtgagcttattcggcagcaaatctcagaggttgaaaacattataggcctagatttcatggtatggagactagaatcttccaggacaaggcttaggttaacagacggaggcagtaagcctcccagaaaacaattacaacaggccaataaaagttacttttacaagagagactcactggtctacagctatggggagggaggcagacagctctggtgtgaggacaccttgggaggacgaagagtttggagagtcggatgcgttgtgagcagaaaggacttaccatctgcttgctgcttctggttctctaagtggatgaggaggagcttgccataagggctcatggctcactgctgcttcctcaaaagcatcataaatactgatctttttgagtcagtctgctcagagcttgtgccatcctactgctaggtaccaggatgcaaagatgccccactcaatactgaggaagccgctagagtggggactgtgttcagtgtgcagtaacctggctagtcgacagtgacctggtcagtgtttttaagcagttttctctgcagtgcatggtggtggggtgggatatcagaagataagaaatggaccaggctgcatcctgaatgagcacactgggaggtgggtcccagagcccctggagatggaaatcttatcagggagcctccacctagccaactgagaccagatggagactgacagacctccatagaagcaatagcatgggctctaacgtcaacatttaattccacagacatatggtgaacacttatttctaggggccaagtaccaagttttcttgcttctcaaaagtcccagctgcctgagaaagaggcttgctggcctcaaggctatcgtgtccacgtgctggctgtcccactgagtcatgtactcttctgatgactaagcttcgtggcagagagcattcctccttggttcaagactgacagccctggggtggggacaggaatggcctctctatgtccacgttaaatgttctgctatgtttcccccacctactagccagctctggctgaggccctctttacaggggggaagaatctcctgtctgaacgtcccaaaaccactaactgagtgccccagtgaaactgctctgagaacctcacctccctgtagtctagtaatggacacctgacagtcgtcttggtgtccactcagcctctagtgctatgtgatgacatcctgtgtgccacctcctgcatgcccctgtctcctagtagtccctgctggtgttcgctccaagctgtctgttgctttttaaggcataacacactctgcacctgtgttctcagcagtaagccgggttggtcttccccagctgggcttcagaaggtcagcctttaaccttttctctaaccatggtgggcactagtgctgtgacatagagatgccccattctgcccattttgctcaaagattcacacagtatctatctttccttctctgtccctataggacacttttgtggatctctacgggaacaatgcagcagccgagagccggaaaggccaggagcgcttcaaccgctggttcctgacgggcatgactgtggctggtgtggttctgctgggctcactcttcagtcggaagtgaccagacactgaccgtccactcacctctcacctcccaccctgcccccaccacaactctctcttcagccaccattgctaccaggagaaccactacatgcaactcacgccccttgccctatcacagggttgggcctagacggagtcccctgcaattagctttctaggatctaccacacttctgtgaaagccaccttccccccacatctcagttctcttggcctcaaaactcacaaggttttcccctaaaccagctccttggaggctggcaggagcagagaggggtgtgtgagggaggagagcctgtcttgttggtgggaccctaattacccctgagcctctcgggaatgcttttccagcagggagctcttcccctgaaggagactagcttgccttggttttgatgtgtgtggcctcagacgtgatcatttcccatcccgctgtgtctctgggtctccctcctccccatctccaccccccaagagccattgagtgaggtgcttttagcccttttgactaattagaaattcaggctgcttgggataatgagacaaggaccagaacctcctccccacctgtggcctggccaaaacccccacttgtggtctgaatgttctcctgaggcctctggctagagtctagccccacccagggggaggggcttagctgctgaaagtccaccttgctagagctagggtggctcttgcagcttagcaccccccaagatccttgtccacccctcccctggctcccatgaccatgactgagggaccaatgggcccaagataggtgccccagagctgttaatgacttcagctgcctcacttcctgcaagattggcctgtggcatctttgccttgggtgttggccacagggtcaagggactctggcctcagcccagaagtgaggggaagctatacagagcagctgtgggaaccccaggggcttccctacctcaggcaggaagggcaggaagaagagcctggagcccaggcgagggggacggcaagggcctgtctttgtgctctgccccacctagcctgggcagcagggctgccaaggtcagaatggcctggctaggagcccttcaggcctctctctcctctgtccacccttggcctgtctcatccctgtgggtcccagctcagctctggccaccccgggctctctgctgtacatattcgagactagtttttattccttgtgaagatgatatactatttttgttaagcgtgtctgtatttatgtgtgaggagctgctggcttgctgtgcgcgtgcccgtggagagctggtgcccagagactgacagcctgatgctccctccctgcccttgcctggggaagcccaccaggggttctggcttctgaggggcacctgtccctcctctcccctcaccctacacttgttccagctctttgaaatagtttgtgtgaaggtgaaagtgcagttcagtaataaatggtgtctgtgactctgtgaaccacagccttggctctgcgccgcatgagtaagggggaaactgctgggctctggctctgctgcctgggatggggtggctcaccaagttccttcagccccagacttctttctggtctccacatttctgtacactactgggagaagtggtgttaattgaacatgctaagagctgacattctggtgagcccaacagtcacagttgttggacaagagtttcctgagtcctgttgtagcataggtctaccattttaagactagcggagaagataggtgtagtctgtggtgctggttggcttagggctttcatgagaaatccagtatcttctggcaagacgtgatgacagacttgagggtaaactgaccaaatctgaggtaacgttattaagataggtctcaagagtttcacatgaattagagatggttctagagaaaagatgacgcttagggctggagcagtggctcagaggttgaatgtttgctgcacagacctgaggaccagaatttagattaataagctgaggattccccaaatacatggaattccagtaccaagggatgtgataccctctctgaactctgcctgtatgcaagcatatgtgccctcacacatgtacatatctattcagacataagccaggcatagaggcacacttctttaatccccagcacttgggaggcagaagtagatggattgctgtgaacttgaggacaacctaatctacatagtgagttccaagacagccagagttacacagagaaaccctgtctcaaaataagtaaaagaggtagtgaccttttggagttagtgaagaatcatgaataaaaagcaagcagggggctctgtgtgggaagcacacctttgatcccagcactgtgggggggggggggtggaggcagctggatctctgagtttaaggccagtctggtctgcatagagttccaggccgttttggactacatagtgaaatctgtctagaagacaagcactgttcagagtccccacaactcaagaggcttccaggaaatctgaggtttgagcaatgaggaagagttaactaagagtcaggtctttctttggactgaacgagaaaactaccatgtctggctctgagcagccttgtgtttagaagccagattggctcttggtgggggatatgaacttggccctggtcaggaaacatatgagctcctaaatctctctagatgctatgagaaccttctagaagggagctgtggaaaaccccagagaccagtaagaggccattggctattattactctgaacttaggggtgtgtgctctgggacaccataggccttatgacactgcctaccgctcctgaatgacagcattcctcttggagaaatgggcatatggtagggtccctcacactatttggtcacaattgaatgggatgacctcagcatcaggcagccaatcctccaaggctactttcaaggaagtgctactttcaagtttgatgttgctatggctggaggtagaagctgcccctccccccccccattagatggtttgttttctgagcaggcttaactgcctccagtgacttcataatgggacctgaaagccaccccaacccatagggcttttgctcagtgccagagacttgtaactcaggcaggacagctttgcccagtgtcctcccaccccgctctgatcactaaaggacttctgcatctcccatcactggggtatgaagctacccgactctcctgggcctctcagcattctcccagggaagcctcctgccgcccactcacctctccctctcacagcagcacctgtggtggctgctccctccccgactccccagtcaccgctccctaccttagccactcaaggaccctctccagactctccatgtgcttccagagcatctttcagatagacaagtatacatgcgtaaaacatgctttgatcctacagccttttggggggcattttttgtctaccttattcctgagctaggacctcactatgtagcccaggttatccttgaacagattctcttccccaagtgccgggattacaagcaaatgctacaaatggtgagcataagtagccttctgtcttcttctgtataactagtcaaagacgcaatagccacatgtaaatgccaatgcactcactggcaactccaaagcaaatcagaacatacttcatcctctttgggtttttggtttttggttttttttttttttggttttttgagacagggtttctctgtgtagccctggctgtcctggaactcactctgtagaccaggctggcctcgaactcagaaatccacctgcccctgcctcccaagtgctgggataaaggtgtgcaccaccagtgcccgactcatctttttttttttttttttaagatttatttatttattatatgtaagttctccagaaaagggcgtcagatctcattacgggtggttgtgagccaccatgtggttgctgggatttgaactcaggacctttggaaaagcagtcagtgctcttaactgctgagccatctctccatcaccaccaccaccacccctttttaaagctatataatattccacaaaagttttgggggggtgtccacaatttgggaggttgagatattgtctggctctgtctccttagctggcctggaattccctgttgcctctgtcttgcaagtactgagatttatacatgtgagccacctcatttggctttcacaaaacttttacccagatcaaatcccaatggtagacatgccatcacactattggaggaactggctgaaggaccctgggctcccctttaaaaggaggcagagacaacttgtgttggttctgtagttggaacttcttaaaaagatttaggggctggagagatggctcaggacatgggttcgattcccactacctacatggcaggtcacatccatctataattcatccccaggggatccaacaccctcttctggtcttcatgggtatcagatatgcatgtggtatgtacaaagcccttcacattcagtcctcagcactacgcaaactgggggtagtggcacagacctataatcccagcactcaggaagcagagaccaagggggttggaaattcaaggtggacttggctatgtagcaagtgtgagaccagtgagattctgtcttaaaaacaatatcaacaagaaccaaacaaaacacaataatggtttttggttttgagcctgtctcaccatgtatccctggctcgcctggaccaggctgaccagaaaatcacagtgattggctttgcctctgcctcttgagtactaggattaattaaaggtatgtaaagccagctagagctacatagtaagatcctgtttcaaaataaaaggcttttgggagttgagggggagggggtgatgctaaagatcaagtccagagccttacgtgtgctaggctgacattctatcaactgagagctacctcctagccattaactgtaatatttaatacccgatgtcctcaatgaagtaattgcagtataaacccaaagttgctctctgttaaattgtgccctattcacatgtgaataactgcttataactacagttccaggggatctgacacctccttctggcctttgagggcaccaggcacatacatggtgcacataaatatatacaagcagaacactcacactctaagacagtgtctcttatatcccagcatgtcctgtagaagcaagaatcacctcctacctgcacctccccagtgctggcattacagttacgagctgccacacccagctccaaattgacttttcaatggcatttgagaaacagtgaagcacacatacaaagagcaaacccacatctctctcatggttccccaagccccaggtccctgatttgggggcttattctgatcagaatggctagctacctgaatgtctcttggtagctgtgcctgcagctctgtgctagagtcctccctctttccctcctccctgctttgactggatgagaacccatgaaggatggtactcctccacgagcatctgttcccacagctcccatggaatcagtagtacagtacgcccacagcattcctgcaccaccacacagagctgggaccaaaagcctatgtactgtttctctacttaactagattcttcattttctgctgtcctcataacccagcccagcacctggactgtgctaggtgatgcttagccataccttccctctaaacctaggttgctctggaattcactgtgtcattcaggctagcctctaacttgtggcaaccctcttgtctcagtgtcctgagtgctgggattaaaagtgtgagctgctgtggccaactactcaaacagattttcaaaattagcaagccatgtaaacccagcagctggtgatcagcttcagtatgcaggccagcaaaatggttctgcgaataaagatgctcgttgccaaggctggaagatgcttgttgccatggctggcaacctgaggccactccccaggaccacatatggtggaaggaggggaacccgaggtctaagccagtaggcctctgagtgttacatgttatggtacacacacccttgaaaaagaataattttttttctaattataaaacattttgctttggacttttctgtctctatcatcacagctgtgtcatgaggtgaaaaacaagaactttcccttcatatgaagaaaaaagaaatgagggctgggactggaagtataaccagtgggtaatgcttgcctagcaagtacaaacatctgatttcaaatcctggtgccacactgttagcggtgagtgtctgcctatgatcccggtactcaggagctaaaggcaggaggaccagaagttgagggtcatcctcccctacatattgaggtctaggccagcttgctacatgagagcagggaaaggcatcttcagtaacgttctattgctgtgaagagacaccatgaccaaggcaactcttatttaaacaaacaaacaacaaaaaccccaacttctttaaaatttattttgtgcgtataagtgttttgcttgcatgcacatatgtgcaccacataccacatgcatgtctgatgccagaggaagtggtaagcctccacgtgggtgctgggactcaaaacctgggtcctttgagagaacaaggtctcttaaccactaagccaactctactgtcccctcccccccccaaaagcattttattgggagcttgcttacggttttagagggttagtccattatctcatattggggagcagacaggcatggtgctggagcagtaactgagaactttccagatatcctgattcccaggtggcaggcagagggacagacactggactttgcatatgctttcgaaactcagagctcacctccagtgacacaccacctccgacaaggccacgcctcctaatctttcccaaatagttcatcaactggggagcaagccttcatacagatgagcccgtgggggccgttcttgtccaccacaaaaggaacagaaaaatggctgggatgtaaggcataactccactgcattgttttccagacaggggcccactatggtagcctggaactcactatgtagaccaggctggccttgaactcacagaggcctgcctgcctctacctcccaagtgctggaattaaaggtgtgcaccattaccaccctatgtatgctcaatgcctccacaaaaagaaagaaatgaaggtatgtgaactaaattatgtgctctttgatttttttcacttagtatccacacattgatgtttgagagctgagcacataaagtatttattctcagcatctaagccatctcattccagtaagcttacatatgagtaatttcaacataaaggtccttgtgaattcttaaggaatttaaagagtcatattataaaattttagccagatgatcttacaaattgaaaatgcctcttttgagacagggtgtagccctggatgtcctagaacttgctttatagacgaggctaccctctaactcaaagctccacctgcctctgcctcctgagtgccaggattaaagctgaaaggtgtgtgatgccaccaaccacccagttgaaaacaccattcttaaaatactcagaaaataagaacgaggccagcctggtctacaaagtgagttccaggacaaccagagctatacagagaaaccctgtctcaaaacaaaaacaaaaacaaaaaccaaaaaaaaaaacaaaaaagaaaaaacaaaacaaaacaaaaagaatgtagatataaagaaagaatagtgtttgctggaaataaatagtaatataaacttaacagcagcctgtcaattgcagggtttttgcacttgcagctcagaaagaagtgaccctcctcaggaagtcccaggtcaggctcacgttgaacaaatacaaaagcaaacagccccatccccaaaagcgcttacagctgcattgcaataatatctagcatcagatgcaaataacagtggggaggagtaacaagatggctcatggagtgaggaagcgcgctgccatgctaaggatctgagttcagtggagggagagaacacacttgtgcaacactgtcctctgacctctgcactgtgggtctatggcatttgcacactcgcacacatgcatgcatacagaaatacatagatataataaaatattattaagaaataactaggtagtggagatctggggaaaagactctggtggtgggttgggacgtttgctgtgcatgcatgaggaaccgaggttaaatctctagtactaacatgaacatggttaattgaataattacccaccataatgtcctcttctggcctcagcacaagtccacacagaaataaatacaccttacaaacacacatgagagttttacagggtttctctgtgcagcctctggctagcctggaactctctgtagaccaggctggcctcaaactcagaaatccacctgcctctgcctccccagtgctgggctgtgtgcagtggctgaagggaccagaagagggtgtgagatcccctgggactggaattagagatgattgtgaagtatatgggcattggggtttgaacctgagtcctctgtaagaacagtcagtgctcttaaccactgagtcatctctgtggcctaggcagaggtcacttttaccctagactttgtgccaggccacctcaagacaaactataaagaacgagtggtcctcactgatagtggtcttcactgatggccacgctgcacagctaaccactgaaggcatggccataagagatgggtttcccacctccggctatgctcacctcataggtggagcagagcagctaagcccaaggacagagaacagtatagtatttgggagcaagactgcaacagacggcctggggtaagtaagtcactctaagtgccaggctttctttacctgataagtagggggtggggcatctggcatggtagtatattctgtaaccccagcacttgggagaatgaagcaagaggtttacaaatttgtggaggtggagatagaactcgatagagttctttctagcatgtgcaaggccctgggttcatccccaggacagtgacaaccaaagtggttacaccagggtcacacccaccatggtggtggtatcccatgtaatgcttataaaatgctcaagaattctcctggcaagttaccactacatcagaattgtcagggtaacctatctctaccttaatgtgtatctccccaaagcaggctaagtggtaagagaaaggagcttcagttgaagaaatgcctccatgagatccaactgtaaggcattttctcaattagtgatcaagggggaaaggccccttgtgggtgggaccatctctgggctggtagtcttggttctataagagagcaagctgagcaagccaggggaggcaagccagtaaaggacatccctccatggcctctgcatcagctcctgcttcctgacctgcttgagttccagtcctgacttccttcagtgatgaacagcaatgtgggaagtgtaagctgaataaaccttttcctccccaacttgcttcttggtcatgacgtttgtgcaggaatagaaaccctgactaagacaatgaggcaggatttatcagatgtccctagatctttggggtgtggcctcaagggggattatggaattcctcagctcccctctgttgttgattttatttgttttgtcttgctgagagagtctcaagtagcctccaacttcctttgtacttctaaagatgaccttgaacttctggtttctcttgcctcagccccctaagtgctgtgattgaaagagtgtagatttaagatcactgggtgtggtgatgcacatctttaatcccagaacttgggaggcagagtcaagaggatctctatgagtttgaagccagcctggtacataaagtaagtccaggatagcctctgttacaaaggataaccctgtctcaaaagacacccccccaaaaaaaaaaagtcctttggacctaacccacagcttcatgcatgctggacaggaaggaactctaccacctgagttgcatctgggttgcatctgggctcctattccttcttttgtgcttcttggctgaggaggtgagcgggttactctgttttgttttgacgtagggtctcactgtgtagctctgtctggcatagaacttgctgtgtagtccaggctggcctcaaactctgcatcctgagtgttgcaattaaaagcgtgtgccaccgcatgtggctaaccgtgcacttgatgtagagagctgaggacacatgaggtggagacaaaggctgaaccactgtgtcggtctcctttgctgtctgcccagagagtcggactctgcccagctctgatgtggacacaattggtcatttaagaaaatgttttccccaagactgtaatgcaaggttaacttgacctgctgctgtgctcactggagcgagggcaggtcttctagcctgctcttggtaaccttgggctttcttggcatctaggcggctacagttagttcctccgccttatcacaaggctcagagcagaacctcagattcctaactgtagccatccatcggaggggctggacagttcctgagttaagtcaccacctgttagtccaacaagaaaaaggccacaattcttttatttttattactattttgtatatatgggtatacttcctgaatgtctctgtacactatgtgtgtccctggtacctgcagaggcctgaagcgggcatcagagctcctgggaccggagttacagatggttgtgagctgcaacataggtgcttagaattgaacccagcttttctagaaaagcagccaatgctcttaactgctgagccatctctccatccccaaggccagaattcttgatcacaagaacaacaacatctttagaaattacatcaggctttgttggacaattatcccatttttgtgtaatctcagaagtcaagccaaagtgtcctgctacctccatggagggtacctctgtgaatagaatcccttctgctcccagtaaaacaggtttgccagcttcgtgtgtgtgtgtgtgtgtgtgtgtgtgtgtgtgtgtgtgtgtaacatatacgacatatacaaggccctgatccatcttcagcagtacataaaaataagtaaataaataatacaaaaagaagcattgagtagctttacctgccgtactcatgagtgaaccttgccttatgtctactgttttcatgccacagatcctactgtgtgtgtatttgcctttaaacccagcacttgggaggaagaggcaggtgggtctctgtgagttcaaggccagcctagtctaaagaacaagttccaggacaaccagatctacacacagagaaaccctgtcttgaaaacccaaaagggggccggagagatgaagggctggagagatagctcagcagttaagagcactggctgctcttccagaggacccaggttcaattcc

SEQ ID NO: 739 - DNA, 1472 bp, Mus musculus
atcactcactcactcactcactctaaggcaactctcgttttcaccgtcattatcacaatgtcaggatttttttttccaaagcactagagattacattgtttgtgtattttcctagttgggtgtctccacccgtaaggtataagtcttcataaaaacagagacattgccttgccttgtgtcttcaacaaaccaaactaagggctttctattcttcaggcttttcaagtagtacctgatacacagtcaatgaaaggtcaatattgctgtctatttttaaagtgaggggggaaatacacaagttgagaaacctgttcgatgttggacaccgacatcgaaaggaaaaagcactttttctgtagtatacaaagggacagatggatgaaggaactagattgaaggaatgtgaaccataaacgttccacgcgcctgagactcctcaaatcgctcgccaggggtcgctgctctcccatgtctcgatgccagtccctttctggcgcgcactccttttgcgtctcgggctcgcgcgcgctgccgcggcaccggaagtggctgcgcttgcaagttcccccggtctcttcaggggaaactgaggccggcttctccgggagattcagcacgagcagtcagccagaaccttatcttggctttggatcctggaagagaatcgctaaacacagagcagacccaagcaaccgggagctggtggtcgactttctctcctacaagctttcccagaaaggatacagctggagtcagtttagtgatgtcgaagagaataggactgaggccccagaagaaactgaagcagagagggagacccccagtgccatcaatggcaacccatcctggcacctggcggatagcccggccgtgaatggagccactggccacagcagcagtttggatgcgcgggaggtgattcccatggcagcagtgaagcaagcgctgagagaggcaggcgatgagtttgaactgcggtaccggagagcgttcagtgatctaacatcccagcttcacataaccccagggaccgcgtatcagagctttgagcaggtagtgaatgaactctttcgggatggagtaaactggggtcgcatcgtggcctttttctcctttggcggggcactgtgcgtggaaagcgtagacaaggagatgcaggtattggtgagtcggattgcaagttggatggccacctatctgaatgaccacctagagccttggatccaggagaacggcggctgggacacttttgtggatctctacgggaacaatgcagcagccgagagccggaaaggccaggagcgcttcaaccgctggttcctgacgggcatgactgtggctggtgtggttctgctgggctcactcttcagggcacctgtccctcctctcccctcaccctacacttgttccagctctttgaaatagtttgtgtgaaggtgaaagtgcagttcagtaataaatggtgtctgtga

SEQ ID NO: 740 - protein, 340 aa, Mus musculus
RNVNHKRSTRLRLLKSLRRCSPMSRCQSLSGAHSFCVSGSRALPRHRKWLRLQVPPVSSGETEAGFSGRFSTSSQPEPYLGFGSWKRIAKHRADPSNRELVVDFLSYKLSQKGYSWSQFSDVEENRTEAPEETEAERETPSAINGNPSWHLADSPAVNGATGHSSSLDAREVIPMAAVKQALREAGDEFELRYRRAFSDLTSQLHITPGTAYQSFEQVVNELFRDGVNWGRIVAFFSFGGALCVESVDKEMQVLVSRIASWMATYLNDHLEPWIQENGGWDTFVDLYGNNAAAESRKGQERFNRWFLTGMTVAGVVLLGSLFRAPVPPLPSPYTCSSSLK

SEQ ID NO: 741 - DNA, 79544 bp, Homo sapiens
gccaggaggccaggatgtatgcaagagcttcccaattccttccaaatgaacaggaggtaagcctggtccaagagtttcctctcctatcattttacctgcttatgttaggctgagcttcaagttctcgttctctgtgaatgggagactatgtggtctgaatcactgaagcagaatttcagggctggaaagaaggatagacacatctggtccactctgttcacaatttcagttatcatcgagggaagggaacaagagtggaaataaggaaatcaattagtagttcattgcaatgtagttgtaagaaattggaaaccacctaaattttcacaaatcgaggaatatttcaatcaactgcctacagaatggaacactaagcagcagtttaaaaaagttccatggatctggactgacaggagaggatctttgagatatatttttgagttaaaaaaaatgaattgcatggctgggcgcggtggctcatgcatgtaatcccagcaccttgggaggctgaggcaggtggatcacctgaggtcaagagtttgggaccagcctggccaacatggtgaaacccggtgtctactaaaaatacaaaattagccaggcgtggtggtgggcgcctgtaatcccaccactcaggaggctgaggcaggagaatcacttcaacccgggaggcggaggttgcagtgagctgagatcgcgccactgcactccagcctgggcaacaagagtgaaactccgtctcaaaaaaatgaattgctgattgacataaattcattatgacatcattatgtttttaaaatactcaaaataatgttccacttttcccatgggtgtgtataagtaaccattagtacttaccacatgctaaccactattagaagtattttacacatattaactcatatatcctaacaataaccctatgagatagttaatgttaccacacccattttatagattgtagaaattgaggcttaaaaagattagacaatttatctgagatcatacagcttttgtggtgacaaaatcaagatttgagcccaggaaggcctactccagagaccaatcccctaaccattgccttggactgcctctcctatgtggatatatatatagagagaaagttatggaaaaattcataacaaactaacaagaatgggaaattcagaggggagaagttaaactggatttatacagagaaaggatagataatttgagtctttaattaaaaaaaaaaagaatgttagctgggtgcggtggctcacgcttgtaatcccagcactttaggaggctgaggtgggtggatcacctgaggtcaggagttcgagaccagcctggccaacatgacgaaaccccatctctactaaaaataaaaaacttagccaggtggtggtgggcgcctgtagttccagctactcgggaggctgaggcaggagaattgctcgaatccgggaggcagaggttgaggtgagctgagattgcgccattgtactccagcctgggcaacaagagtgaaactccatctcaaaaaataatgataaaaataaataaattcaaatcacccaaataatacacagcaacactcttttttatttatgtaattattttattttatttatttttgagatggagtctcactctgtcgcccaggctggtgtgcagtggtgccatctcggctactgcaacctccgcctcccgagttaaagcgattctcctgcctcagcctcccgagtagctgggattacaggcatgcaccaccacgcccggctaattttctatttttagtagagacggggtttctccatgttggtcaggctggtctcgaactcccaacctcaggtgatccgcctgcctcggcctcccaaaatgctgggattacaggcatgagccaccacacccagactttttttttttttttgtaatagtaaaactgcaaaggagagagaaggaggagccagtgaggtagaaagttatttaagctctcaaactctgttttgaaaaagtgagagattaactgggtgtggtggcacatgcctatagtcctacctactctggatgctgagatgagagggttgcttgagcccaggaggttgaggctgcagtgtgctgtgatgatgccacctcactccagcttgggtgagagaatgagaccctgtctcgaaaaataataaataatgagcgagaaagaaagaaccagcctctactgctgcccctaacaaatctgatcctccactctgtgtctcttagtccctccaccatctaactagtggtcactaggccagaaatctggacctgccttccagcttcatggaggcttcctactccattggctccgggtgatgacttaacttccagacacctccaaacgaggtgacttcgatcacccaaagacactcctctggagaaggttgcaggtataaataattgatgacagctgtcaaaaggatccccaggatcgcttggacccgggaggtcaaggctgcagtgagctatgattacactgctgcactctagcctgggcaacagagtcataccctgtctcggaaaacaaacaaaaaaaaggttccccagaaaagtcagcactgtggcactgttttttttttgttttttttttttattcttccagtcttccatccaaccaagtgttggggctcagaaaatgatgctccaaaatatggtgctttggcatgctgggtgctttgaacaaaggagattgaaaggcctcagaaataagcctcagaaacaaggtctccctctgaccttctgctccctgtccccatcattcccttccaaagagcaggagggagcagttgcggaagttctttcccttatatgactgagggaagttcttccaattgtattaaatgcaattgtcttaaactctcttcctagaaatctcatcaaacaaccagggaagattagtcaccagagaggagattaaaagtaaccaccacatccagacaggctattgcctattcttccagagactgttccaaaacaactttttttttttttttgagacggagtctcgctctgtcgcccaggctggagtgcagtggtgcaatcttggctcactgcaagctccgcctgccgggttcatgccattctcctgcctcagcctcctgagtagctgggactacagtcacccgccaccacgcccagctaattttttgtatttttagtagggacggggtttcactgtgttagccaggatggtctcgatctcctgacctcgtgatccacctgcctcagcctctcaaagtgctgagattacaggcataagtcaccgcgcccgcccctttttttttttcttaaaggcagagtctcgctctgtccaccaagctggagtacagtggcgcaatcttggctcactgcaatctccgcctcccaggttcaagcgattctcctgcctcagcctcctgagtagctgggattataagcatgcaccaccacactggctaatttttgtatttttagtagagacagggtttcaccatgttggccaggctggtcttgaactcctgacctcaggtgatctgcccgcctcggcctcccaaagtgctgagattacaggcgtgagccaccgcgcccagccgcagggggttattttcagtaagcacatgtaagattggtggtagcagtttgagaccagcctacgcaacatagtgagtccccgtctctataaaaattaaaaaaaaaaaaattgctgggtgtggtggtgcacacctgcagtcccagcaactcaggaggctgaagtgggaggatcatttgagcctgggagtttgaggctgcagtgaactatgattgtgccaccatactccagcctgggcaacagagggagaccctatctcaatttaaaaaaaaaaaaaaagaatgattcgaagactttttaatgcaaatacagatacctcatatatctatatctatccacacacgcatttttatatattcatataatgtctgtgtgtgttcatatgtttttcaaatttctcatttaaaaagtaaagtttttttttttttttttgagacaaagtctcttctgtcacccaggctagagtgtaatcttggctcactgcaacctctgcctcccaggttcaagtgattctcctgcctcagcctcctgagtagctgtgattacaagcgcccgctagcacacccagctaattttttgtatttttagtaaagacagggtttcaccatattggccaggctggttttgaacccctgacctcaagtgatctgcccacctcgaccttccaaagtgctaggattacaggcatgagccaccatgccaggccaaaagtaatgctttcttattttaatatttggaaaatacacggaaggtaagggattaaaaatcacctattgattacagtgtacactctttatgtgatgggcacattaaaagtccagacttcaccaactatataattcatctactatgtaacccaaaaccacttgtacccctaaagctatatgttatatatatgaaaaaatactgaaaataataaagaataaagaaaaataactataacgtagcctttagtggcactatctctactattagcattttagtatatttcctcttgtcttttaaacattgattttattaacagagtagatacaaatacatatatgcaatgtatgaaaggtataaagaataatgaggcaaaaaaagtctctgtacatatgtacaattcaacaagaaaaccattttcattgtcttttctttctactttgtttcttttttttttgagacggagtcttgcactgtcgctcaggctggagtgcaatggcgcgatcttggctcactgcaacctccacctcccaggttcaagcgactctcctgcctcagcttccggagtagctgagattacaggcacccgccaccatgcccagctaattttttgtatttttaatagagacgggggtttcactatgttggccaggctggtctcgaactcctgactttatgatcaatctgccttggcctcccaaagtgctgggattacaggtgtaagccaccacacccggccttgttcctttttatttaaattgtttactactattctgtttcagacagagatcattatttttgaagcttccaatttcatcttgttccctaggttaatccaataccctctcgtgttaatgtccaatagctatcatgacttttttttttttttttgaaagagagtccctctctgttgcccaagctggagggcagtggcaggatctcagctccctgcaacctctgcctcctggatgcaagcaattctcacgcttcagcctccagagtatctgggactacatgtgcacaccaccacacccagcaaatttttagtagaaatggcgttttgccatgttggccagagtggtctcaaactcctggcctcaagtgatctgcccgccttggcctccagaagtgctgggattacaggcatgagccactgcacccagcctatcatgacttttgtgtttgttattctcttaccacgtaggtatataaggtatatatatatatatgttatctactattggagagcaaattacccccaaacttagcagcttaaaatcacaataatgtattatttcatacaatttctgagcatcaggaatccagcttaatggagtggttctggttcagggtctctaataaggttgtcatcacctgaaggcttgactggggcaggaggaccctcacatgactgtcggcctctccatagggctgctcccaacatggcagctggcttcccccagagtgagagagagaccacaaacacaaagacggaagccacaatcttttgggggtttttgttttgttttttgtttttttttgagatggagtctccctctgtcacccaggctggagtgcagtggtgggatctcggcctactgcaagctccacctcccgagttcatgccattctcctgcctcagcctcctgagtagctgggactacaggcgcccaccaccacgcccagctaattttgttttttttatttttagtagagatggggttataccatgttagccaggatggtctcaatctcctgacctcatgatccacccgcctcggcctcccaaagtgctgagattacaggtatgagccaccgcgcccagctgaagccacaatctttcgtaacaaagtcttgaaagtgacataaccccagcttgggcaatatggcgaaacaccgtctctacaaaaaaatacaaaaattagctgggtgtggtggcacatgcctgtggtcccagctactagggagactgaggtgggaggattgcttgggcctgggaggtcaaggctgcagtgagccgtgattgtgtcactgcactacagcctgggcaacagcgagaccctgtcaagaaaagaaagaaagaaagagagagagagagagaagaagggagggaaagaaacattccatcgctgtaatttgtcattagtcacacagaacaactgtggttcagtgtgggagggaaacacacaaaggcatgaatacgaagaggcagggatatttaggtgccatcttggaggaagctagatgctacaaactctaaattgtatattgcctatttctaaactgtatataagtagaatcttcctacattattcttttgccattttttccattcaatatgtttctgagattccctttttttttttttttgagagggtgtcttactctgtcacccaggctggagtacagtggtatgatcacagctcactgtagccttgacctcccaggcttaagcgattcttttgcctcaatctactcagttgctagggacaacaggtgtatgccaccaggcctggctaattgttctttttctgtttttgtttttgttttattttgtagagagggggtctcactatattgcctaggctggtattgaactcctgggctcaagcatctttccgccttggactcccaaagtggtgggattacaggtgtgagccaccatggctggtctgtttctgggattcttcttttttttttgaggcagagtctcactctgttgcccaggctggagtgtggtggcatgctctcagctcattgcaaactctgtctcctgggttcaagtgattctcctgcctcagcctcctgagtagctgggattacaggcacctgccaccatgcctagctaatttttgtatttgtagtagagacggactttcaccatgttggccaggctggtcttgaacccctgacctcgtgatccacccgccttggcctcccaaagtgttggtactacagacgtgagccactgtgcccggccaaagttagcatgtttttagatagtgttatataattaaaaataatagctggacgcaatggctcacgcctgtaatcccagcactttgagaggccgaggccggcggatcacaaagtcaggagttcgagaccagcctgaccaacatggtgagacaggagaatcacttgaagccgggaggcacaggttgcagtaagccgaggttgtgccactgcactccggccttggcgatagaacaagactctgtatcaaaaaaaaaaaaaaaaaaaagagggaggctgaggccagagaatcgcttgaacccaggaggcagaggttgcagtgagccaagatcatgccactgcactccagcctgggcaacagagcaagactccatctcaaaaaaaaaaaaaaaagaaaaagaaaaaagaaaaaaaatacaaagttatgtgtagacaacatagagaagtataaaaaagaaaacttattttctttagatttaaatgtaacttattttctttaaattagattccagtcaaagatcatttgagagccattttcaagacttgcaaaattctttttccaaaatatgtatccatctttccaaaatataaatttcttcatgttctttctggtttaaaaaaatctttgctggctcctctggtgctatttgatgtgctgctcgcatggatacacatttatattccatcccctctccaccactcccctcagccatcccaatttatttccaggacaccatgggctctcacgctgggctgccaggccttcgctcaagcaatatcttctgcttaaaatgctcctacatcctttctcacccaagcaaaattctattcttttgagggccagttcagtaaagcccctatctgtggacagagtttatctgccctctgctgggctcccaaagcacactgaggcttccataatgatagttttcacattgagataattgtggcaccataggttcaaaaatgtaaatcagaccgggcgcgctggctcacacctgtaatcccagcactttgggaggccaaggtgggcggatcacgaggtcaggagttcgagactagcctgaccaactggtgaaaccccgtctctactaaaaatacaaaaattagccgggcgtggtggcaggtgcctgtaatcccagctactcaggaggctgaggcaggagaatcacttgaacccaggaggcgaaggctgcagtgagccgagatcgcaccaccgcactccagcttgggtgacagagcaagactccatctcgaaaaacagcaaaaaaaatgtaaatcagagccaggtgtggtggctaatgcctgtaattccaggactttgggaggccgacatagacagatcacttgagcccaggagtttgagaccagcctgggcaacatggggaaactccattctctacaaaaaatacaaaaattagctgggtgtggaggtgcgagcctgtattcacaactactggggaggctgaggtgggaggatcacctgggatggggaggtcgaggctgctgtgagctgagatcacaccattgcactgcaggctgggtgacataccctgtctcaaaaaaaaaaaaaaaaaaaaggccgggcacggtggctcatgtctgtaatcccagcactttgggaggctgaggcagtcggatcacctgaggtcagcagtttgagaccagcctggccaaaatggtgaaaccctgtctctactaaaaatacaaaaattagccgggcgtggtggtgtgtacctgtagtcccagatactagggaggctgaggcaggacaatcacttgaacctggcgggcagagtttacagtgagccaagatagcaccactgcactccagcctgtgcaacagagcaagactccatctcgaacaaacaacaataacaaaaaaaaaaaaaaaaatgaggaaagagttcaacagaaagaccacctgaaaaaggggtaaacaatatgaagaaaattcaccaatacaagatccaccaccctccaaagaaagactaaaaaatatgacaaattgctcaacttcattcataataaaaaaagaaatatgaaagtgccttcggtttttacccatctaattggcaaggataaaacatttgataacacactgtgtggttcagggtgtaaggaaattggcggggcgcggtggctcacgcctgtaaacgattctcctgtaagcgagtctgctgcctcagcctcccgagtagctgggattacaggcatgcgccaccacgcccagctaattttttgtatttttagtagagacggggtttcaccacattggccacgctggtcttgaactcctaacctcaggtgatccgcccgcctcggcctcccaaagtgctgggattacgggcgtgagccaccgcgcccggcctgtcctatggagtttacaattaataactctcttaatcatcacaatagctcaacgagagaggttggtactattacccattttacaattgaggacattgaagcacagagcagttgagaaacttgcctaactagcagagttagaatccagacaaagtgcttaaccacaaggcgatgcttcttctatatataaactgacggacggatgaaataggctgattgactgatgagtgactgactgactgactgaatgaataaatggaaatgtgattataaatgttgattttttgcgcctcccgattccccagatctaccgcgagggggcgatctctccccggtcctgatgccagtcactcaaggcgcgcactccctttgcgtctcgggctcgcgcgcgttgccgcggcaccggaagtgactgagcttgcaagttcccctgtctcttcaggggaaactgaggccggcttgttcgggagagacggcgcgagcagtcagccaggtaggccggcagccaggtaggccggcccgggtccgcggcgcggaactcggccgcgaagagctcttgcgtctggaagctaccgggccgatgaagggggatgtggccccccacggctcgcggggctcgcaggtgagagcgccgcctcccctgtgcgtgacagccgttgcgcccaataggagccttcgccgtcccgcttccgtgccggctgggctcgctgattggctgcgctggggcggaccgccgggggcgaggcccctcctctcaggaaggtctagggggcgcccccgggggagggcggttgcctagcaacggggcggtggctcggcgggtacccggcctagtgagctcgagaagccgctaggccgcagccggcccaccctgggctccggagaggtgcagcccccggccccggagccctcccgggggcgccagaaagccactttgggcctgtccccaggaaaacgtggtctcagctgtggggccgtcgagcaggcctcgacccctcttcctgacctgaggagaggcccagcgcctcaccctcacccagtctttgtgcagggcgccggcggccattgtgtccgggcggggaatggaggacccggcaatccccaactgccacgttctgggcctttggggaattcagagcaaaccagcggcatttgttgggggtctccggccttcaacatcacagacaggcctgggggtggccttcccaaagtcagattgcagatctgaggcagtttccccctccctgcgtccctcactgaaaccttgaaccccattgagaagtccctttagggtttcggacgcctccacctcaccctgggctggtgcttaaatagaaaaaagaaaaacaaaaaccaactaaatccataccagccacctccgggagagtactcctggctcccagtaggaggcggagagccaaggggcgtgcaagagagagggggctgggctcccgggtggcaggaggccgcggctgcggagcggccgccctcgatccgggcgatggaggaggaagcaagcgagggggctggttcctgagcttcgcaattcctgtgtcgccttctgggctcccagcctgccgggtcgcatgatccctccggccggagctggtttttttgccagccaccgcgaggccggctgagttaccggcatccccgcagccacctcctctcccgacctgtgatacaaaagatcttccgggggctgcacctgcctgcctttgcctaaggcggatttgaatgtaggtggtgcgggggagcgggagtggggcgggggggactgcccagggagtgactttccgaggaaggcatttcggagaagacgggggtagaaaaggctggtgggagattcagagtccactggtgctttcgatttgacttaagtgaagtatcttggaacctagacccagaccttcgtaagacccacaaagaaaccagttctggtacctggagggggaatggaatttttagggtaaatggcatgcatattaattatttttttttcctgaagctctttctctcccttcagaatcttatcttggctttggatcttagaagagaatcactaaccagagacgagactcagtgagtgagcaggtgttttggacaatggactggttgagcccatccctattataaaaatgtctcagagcaaccgggagctggtggttgactttctctcctacaagctttcccagaaaggatacagctggagtcagtttagtgatgtggaagagaacaggactgaggccccagaagggactgaatcggagatggagacccccagtgccatcaatggcaacccatcctggcacctggcagacagccccgcggtgaatggagccactggccacagcagcagtttggatgcccgggaggtgatccccatggcagcagtaaagcaagcgctgagggaggcaggcgacgagtttgaactgcggtaccggcgggcattcagtgacctgacatcccagctccacatcaccccagggacagcatatcagagctttgaacaggtagtgaatgaactcttccgggatggggtaaactggggtcgcattgtggcctttttctccttcggcggggcactgtgcgtggaaagcgtagacaaggagatgcaggtattggtgagtcggatcgcagcttggatggccacttacctgaatgaccacctagagccttggatccaggagaacggcggctgggtaagaaccaagccccttgtgtgtcccttttctttggcctctggtcagagatccccaacagcccttcttctgtatctctttctgttgtgttgggtgattgttggagacgttgatagttgaggaaacctgactggcctcatttcaccacaagaggttaactccttggaaatacaaatgaccctgtgcttcagagatcaggcatctttcaccctggtcacccccatgactccactattccatacttgtgttccagtttctcagcaaagaaaactgtagcctatgtgttcattaagtcccaaacctgtgagggtaggaagttagttcggtgtttcccttaccttatacaatggttcacacacaaaggggtgatgagtataatgcctggagaagatgatgagcatcaatgacccacagacctctccatctgttccccccaaggggtctcagtcctatcctgggcttctctcccccaaatcaagttccctttatttcaaagtttgcgtgtatggcactctcctctcagactagggcatggccataggcaggagttcccactgggttgaatggctgagaattgtcagattttggggcagtgtaggctgtgcagattgtgtttgcactgcgccccctaagttcatttcccccaaagtgtgcgactttctgcatggttgccttgtttgtggagcacttgctgtgtcacacattaagccaggggactttgcacctcattgcctggggtcggttggggagctccagctgctctgcctgttactttccggccagagcccaggggcctcttcaagcactgtttgctggcaaagcaagaacctagtctttggggctctgtgggacattgagatttagtaacagacttcacatgcaggtataagttccagttctgtcatgtaactagctgtgtgaccttggacaggctgggttactttcttgaggcttagtttctttcactaaaaaatgtggcaagctctccttgccttacagtgtattgtaaatcttggcgataatgtgagcacagtgactgacaccagcaaattccctttccagggagggagagttctcctgcccatcactgagccaggatgagatggtggtgaaagcttctttaccagtggtcactgtaggcaagttttgctcttcagtgaattcagtcctgttttcttgcttatctccctacctagcggaggtgcaggttttatgagagatgttctatcccctcagagtatgcagaaaagcatcaagctgtggaaaataagtcatccattgaaggagctgaggtggaaggggacatgcaccatggactcaggaatgtcaagaatgcaactgtctataggctgggcctagggtgtggcaggcacttcactttaccactgagcaagagacctcctgagtttgccctggaaccccaccccctctctcattttgcatttctttgcaatttcaactcgtctgtgccagctcttgtaaaaggcaagggggtcaagtcaatagaggtcagataactggggtggggtcaggggaggtaaaggtggtgggttctcttgagctagctgactagacttgaaagccattctgtaaatgaactctctagggggataaatgattaaatagttcctgttggtttgtgcagtgacctctcctgttccctcctgctttgattctcttttggggcaaatatttgttcagctgattacaggagggacaggattccagtactgcagacacaccctctgaggcatctccaagtagggattgaggctgcttgcccactttgcctgactattgtctttggccagtggtcctaataccaggtgggttgttgccagctataaacaaaaggcagtctgggagaggtgcctggtctgctagccagcctctgcagaaggctacccctaccagagaattgccagctgcccagtggtgcatatgaaagaggtcttagacacagcaactctgggtaagtttattagatctccatggggttgaaattccatcttccatctctttgcttaagaatcatcagagcctgttggacaacataccacatgtcacttcctcttggtgaacagaggggatgtgtgtggaagagccagttatatcagaaccatttctgagcacacattctctccctaaggccagggagtaaagaacatttgactcaggatcctttgagcctgggtagaaggtacccgcccccttcctctcaggtattatcctgttccaagctgcaccgactggctactgtggtggcatcgggtaattatcctggagactgcggctgggagatccttaagggtaggagttatgggctattctactcagggctatgttctaaatttagcatccctacaggaaaggggaaggaaattagtctttattgagtacctgttaagtactaggcactgtgttaggtcctctacttatgcaaccagtgtttcttgagcatctactgtgaagctagcagtgtactaggtgctggccataagccacgcatggtaccttccttcatggaaacggcatgctgtttcatatattctacagtaaccttccaaggaaggtgagtttattcccagtttacacatgaaggtctttgtgcctaagtgactgaccccaggtgtccctcagccagttaagtgtctgaatgagaatttacaccaaggttggcataattctaaagccaacacttttcatcctatcaagttgtccagggagtaataaagtgacctagacatgctggcccagaaagccagagatgctgttgggccaagcaaaccatgcctgtgaaggtgctcactctggactgataactggctttgttcaggtagctatgggaaggatagttggcagtagcaggttcccagaggcgtgttggtagcctcagattctggcactggtaaaactcagacatggcaggtttcaagtgggcatcagggttttgcccagagtgagctgcttattaattttttctttttttttttttttttgagacggagtctcgctcttgttgcctaggctggagtgcagtggcgcgatctcagctcactgcagcctctgcctcccgggttcaagtgattctcctgcctcagcctcccaagtagctgggattacaggcatgcgccaccacacctggctaattttgtatttttagtagagatggggtttctccatgttggtcaagctggtttcaaactcccaacctcaggtgatccgcctgcctcagcctcccaaaatgctgggattacaggcatgaaccaccgtgcctggccccggccaattttttcattgttaaaaccctctcaggccctgccaatagatgacagtggtgtgcgtgtggggagaaggtggcctgccccaggtatctctacttagtggtggagtgatgcttcaaggactgaaagtgtagacccttagccagattactgcctgcctggagtcacctgatgaaatgctgaacctgttcggctgtcttgtccatctgtctctcccgcctgtaaaatggaataatgatagccagctgccatagcttgactcgagtaaaggatctagcacaaaagcccttctcctgccataattgtagggtggaaaccctttaatgaatgggcagcttccctcagagaactgactcttccccctagagtttctccttgagaaacaaagtccctgtgatactttcctggaatgttgtatacatgaccttccccgaagggacacaagtgtttctggtgctttccaatgggaatgtgggaagggacccaggtgggccttgccactttgggattgctgtccctgaagaaatcccttagcctgatagaaacgtaattgttgggagcaatgaactgtgttgggggagaaaacataacttggcctttcttaagctgtatggctcagtggtctgagtttctgtagatctcttattgcctaatgtggcttcttcagatggatgtatgcttagttgaagcacctcagctccctttgcagatagtggcagttctgtggttttcttagggaaaccccattagaaaccccaaatgtggaaatttttagtaatctcattcgggtcccaaaattaagtagaagtgtctcaggggctcccccttgaaacacctacttcttctgagtgtacatttgaggttgctcttaaaattctgttaccatcacagggttttccagacttcctaggaataatttccccagtagccccacagagccctttagcttctgtcgaaaattacccgggtattttttcagggggctccaatggaacctggagggttttcttgacttttgtatgggtgtccccagatttgtttgggctgcatgaaacagcagttgttatctctgtcccttcccccagcagatatctgtcctgaggccagtgggcttgagcgtcctcctctgtgtccagtctccctggttttgccagtgccctcagccttccatcatggggctttcttgaagcaactgtggttttgcctgagtttaatgtggatagacataggggtaattcccagtgtactgcttttctacggaagtataatctcctactgccttaattaagcagaggccctgtccccacccaacctccaacctaattccacagagtcctccctaaggactccctcttttttctttgaaggagtcactctactcctggatcctcttctcttctgcccctctatccgacagtctgtcttccttgttcccagttggcagacctgagtcaggcaatcccactgggtctttttgtttagcctggggaagagaagacccaggagaatatcaccagcttcagatatctgaaggaagagggactgagtctttttttattggtgtggtacctggcaaaacttggataaatgaaaagaagttaacagttggtagagcttaaattatgtgcagagaagacatttctaacagatttactctgtcctagatttaggagctcctcagggtggaggccacatcttgtccatgcttgtttcctcagcactgagcagaggccttgggcatagcagatacctaattgaagagaaacccactaaatttctgaagaaacagacccttgtcaagccagaataacaataatgggagtggctatttacctaataattcattcgttgagtcaaacaatgtttattgagctcctactgtgtaccatactgggagtatggcagtaaacaaaagtaagcaaaactaagtttctgtcctcatggagctcacattccaatgaggagtgacaggcaataaatatataattacatgtttatatcagatgattgtacatgctatgaagaaaataaagcaggttggggcatagggcatgtctagcaagggagggtggggctgcagttttaaaagagtgatcaaagaaggtgtaagggagaaaaaaatggctttcctctacccttctaggtcctttggctgggctgagaattaaattgacatagacagattaactggaggaaaaataattaattacatagttgtacacaggaatcctacaaaatatgaggctcaaagaagggtcagataattgaagcttatatagcatcctgagctacagaaaagaatatggggcttgggacttctgttaggggcttgagtggcagcaacccaagttatggcagggtgagggaaagaattggtggtggcgtgtgtctgtggtcccagatactgttgagggggtgtactgaggtgggaggatcacttgagcctgggaggtggaggttgcagtgagccgagatcaagccactgcactccaacctgggtgacagagcaagaccctgtctcaaaaaataaaaataaaaagtctctctggtaataaaatttgtctggagcagccctcttcctaatacagatacctttactagtgtagatttcctttttagatgtgaatttcttttacaaaaggacagcttttcagagctactcttatgtctgcagtttctcagaataaccagttcaaaatatgccaaagaagtatatttttggggtggcatattgttttcctacagtcatattttgggatggtatgtcctgagtcccaacaaaagtattacctaaatttatttgagccaagcgctaaatgaggtaaggaggtggatgatgtaggtaccctacagcaaagggtgtttaaagcagagggaatggactcaggagggagcatgcttgacattttcaaggatgagcaagaaggtcaatgtggctggagaagaaacagcaaaggggaaaagggtagaaggtggggagggaatggttgaggaggaggatggagaagtaggtgggggccagatcgcatacagcattacagaccatgatgaggatttggctttggtggaatggtctgtattccttttttttttttttttgagacagagtctttctctgtctcccagactggagtgcagtggcacgatctctgctcactgcaagctgcacctcctgggttcacgccattctcctgcctcagcctcccaagtagctgggactgcaggtgcccgccaccacacccggctaatttttggtatttttagtagacggggtttcaccatgttagtcaggatggtctcgatctcctgacctcgtgatccgcccgcctcagcctcctaaagtgctggaattacaggcgtgagccaccgtgccaggcctggtctgtattcttaagggtggcaacagggagcccagtgaagaggctggtgcaattgccaggtgaaaaagaatagtggcttggacctagaggtggaggtgtagtgagacggggactggagaataagaccaggcttgcacatggtatattgatgggtccagccatcctggaaaccatatttttcaactacttggaggtcctagaatcaaagttaagtaagatagatgttctttgggaatagttctctccaaatgtgatattctgatgaatggtcctcttccactccaacagtatttctgtctgagtaaatgaaatttgtctgagttcagttcccaactcatccgtgtctacctatgcaagctccttttacctctctgaatcttgggacaaataataatacctgcctcacagggggcgatggtaaagacacagtgaggtatacctgagatgcataaagactggagccatgttggtatcattattcttattatctttccacagaacgcatgtcagagacccattcacggaatcttgagcatccactctcctttttctaaataccatagtgacccatcagcacatctcagagcaggcccttgcagcatttctgttgtagtaggagctccacagtgtttgtgtgcaatggtggtgtaagcactggtcttggagttggaatcccagttctactctcagtctcaccttggccaagtcacttcacccccagtccccagtttccctttatgcaagatggagggtttgaagtaggcaataaaggaatgctggttctctctatccttaggccttgtggcggattccaccattacagcatatttcacattagttatattttaaaatggctctctcctgttgacagatatgtcagcaccttaactaaacccagtgtcaaggcaggctagtttatcactgagcccacaatagtgctaccctatatttatgtaacaccttacagcttccaaagcactttcagatccaccttgcctttttgatccttataaccacccagagaggtgagcaggaaggatgacatctccgtttcaaaggagagaaatcaggtgagaaagatgaattgacttgcccaaggttacatcaggaggaagaggcagtttttggactttcaaattggaacttgactactagcttgctgtgtgaccttgggcaagtcttttaacttgtaaatggctatagtaatgccacctttttctgaagattgggtgaattaattcattcttttaaggctttcatatcatcctagggctcttcactcacatcatctggcttctctttttttacatattgatttttgaaattgtggttttgtataaagaaactgcctttgggaccgtctgctatttggtttcatccctgatgagactctcgggccaagcttgagccttacagtgaactctgagccacacagctttttgggcagcctccagtgctcccctcggaactggaggtttttctccagctcttcaggaaatgccattgcgatgacttccatggactgcttcctgtcccagccctgccggcaagagtgtggaaactggaaagcaatgtccctagaggtccgccccccaaaaactactttttttggacgtgtccctgcctttcctcttgtccattactttctttgctccctaccctttcctccttcacctggcttctgcctccagctgtgatcatcccttcaagatttagaaaatgcctttctacttggttctgccaggccattaccccctaccctaggctaggctgtgagggaggtcagttagaattcctgggttctctccttggctccatcacgcattagcagtttcagtcctggacttcccctggagatgcattaaacctgttgcttgcggtgccctgtgtcatccattaaccctgagttcccctaggagattccaccccacccctgcataggatgggattcttaagagataacttgaggtttggcacatataaatcctgcctcttggaaattgatgataaagggtggagtgaaacagagcctgccttcccctcccccagtcacctttgaggaggaagctagaaggttgaaaaccttgttggacaatcatctgaggaatgggagctggcctgggaggggattggaacgcactcaactatgcctcagatcctttgttcctctcttgaaagggaaacattcccctccctcctccctggccacacacacatacacacgtgcctttgttcccccgagtcaggcagggataggaacatagtgtcccttccaaggagcctgactcgcttccctagagactggcctcctggtcagtgggactgggatatttgctcaggagcccccagcctcgtgtcctttccatagagtcttcgaggctaaaaacttgcctacaaacagctgctgagacttctctgtaattatttcatgggacacccatgtcccaggataaacagtccctccctcttactccagttggtgattaatattattgttaacattactattaatagtatctaacacttattgagtgcttactctatgccagccattgttcaaagtgctttacatgtattaatagatttcattctcacagcagcactctgaagtaggttcttttatccctgtttcacacatgaggaaactgaggtacagagaggttaagcaatttatgcaaagtagcacagttagtaagaggcaaagcctgggagggtagcttccaacctcccccttttaaacgctccactgtgttccctcgtccagtgcgctattgtctaggtgactgctggcattaatccagtgctcactatgtgacagcctttagtgacgctgtttttgttactatcccaacaaccttatcgttataggcactgagatttgggagggcttatagttagccagaggcagagtcagcatttgaaaccaggtctctcttactctgaagcctgtcctttttatctccagtccttaaaaatcttgcaaagtaggtgttgttaccttcattttatggttgagaaaattgaggctcagagaaaagtgatatacccagagcttcacaggctagtaccaagaagagctgggattcacactctactgtcttagtagtctgtattgtcatgattattctttttatgtgcatgataatactttcaatttaccaaactccttttataagttatttcccagtgaagtaggagaggtgggtatgttcagccctgtttccagaggggaaactaagataaggggtcttgtcccacagtaaatggcagcatcagacttagaattcatgttctggcttttaacacagtattatcaatactgtctgcctctcctaaagctggatgtgtggcttggagctgtccttggagtttcatttcttttgttaaatcagcaaatattgacaaatgctttgtaatgtgctaaatgctagtgatactgtggatattgtggtaactgagactgagtcccatccctcaatggtctgtttccatactccacaccttgggtcttgctggtgtccctctgccatctgaatcagtctacatgtgccatccatccttctcctcagctgccagacacaccaggcaagattcattatagttgatatgtattaatcaccttcaacacatacacagacaaaactctggcctcacatttgagacagcttgactccttgctggtggcataacacaaagcaaatcagcttcaaattctcatccataagcctgagagaataatgccaagccaccagagtaagtgaggcatgaatgagaaagtgaaatgtaagtgtgttttttggtaataataacagatactatgggttgagtagttacttgctctgtgccaggtgctgtgtttatcccctcaatataatcatcttacttggttctcacaaatgctctcctgtgaagatggagaatctagggttcagagaggctccctaatgtgtccacagtaacagatcttctaagaggcagagctgggtcttatactcagatgtgtctgatgcaaaagcctataagcgtcattgcttcttacaagcccagactggcttattttaccctgactacctggctcagggcccgcggttgggtgaggactcagccagggcctgctcaatgaacatgaagggttattattagatacaggttaggctacaaaaaaagtttctgcccctaaggaagcaaactcatttgaagcagtaggaatagacctcaaacacttggtgaatggcttgaggcaaactgtgccaaacctgtagagtaaacaccaaaagtggaagaagttgagcccacctgactgcattgctgggccctgggcctctgccaaatgggccagcttccaccatcagctacccagttgattactgggcccagaggcctccaccctcagcctgtatcatcaacctgcaccctttccctagccaactgcattgccaatccagactgtcttctgcatcaacagtggaaagggttaggaaggagagaggtcactgacagcttaaataatcatagctttctcagcaccgtagctttgtacaatttccactgaggcctcagtttcccggtctgtaaatggagataatactaatctcttaatgaagatgatagtaatctcttccttataggcttgctgtttttcctctgcctgtatcactcatcctatggatctgatcagggctctctctcttcttatcattcaggtatcaactcagatatcacctccctagaggtcgccatgtttacatgtttaccatctgtctcctgtagtaaaacataagctctcggagtacacgggctttatcctgtctttcatccccagcatctagcagagtgcttggtacataggaggcacttagcaaatatttgttgaataagtgactgtgtagaccacctcacacggtgtctgatatactcagtcaatgttaggcattgttatgtcttaggaagatgtggaccatgatgggtttaaataggtgaaaagaatgtaacaagagcaggctgtggctgggcgtggtggctcacacctgtaacctcagcactttgggagactgaggcaggtggatcacttgagatcaggagttcgaggctggcctggccaatatgacaaaaccttgtctcttcttttttttttttttttttttttttttgagatggagtcttgctcttgctcagttgcccaggctggagtgcagtggcacgatctcggctcactgcaagctccgcctcccaggttgacgccattctcctgcctcagcctcccgggtagctgggactacaggtgcccgccaccaggcccggctaattttttttgtatttttagtagagacggggtttcaccgtgttagccaggatggtctcgatctcctgacctcgtgatccacccgcctcagcctcccaaagcactgggattacaggcatgagccaccgcacccggctcgtctcttctaaaaatacaaaaattagcagggtgtggtggcgggcgcctgtaatcccagctacttgggaggctgagtcaggagaatcacttgaggccgggaaatggaggttgcagtgagctgaaatcatgccattgcactccagcttgggcgacagagggagactctgccacacacacacacaccaaaaagatcaggctagttacacacgcgtgcacgcgcgcacacacacacacgagcaggccagacgggtaagaaccacccagacagaactggagggtggagtatgtatgaagcatttgagagatcatgaggaggcagactggctagagccaaagatggtctgtgtcagcaataaagttggtcagggaagaaaccaggtggctgatgacagaggcctctggacagagggatggttgatggtagaggtgggcctaatggggagaggcccagagcacctgtgggatgcagttaggtctcagtaacccctaagaaaaagaatctcttgccagccagggctcagcaggcagagctgcagggagagaaaagccagaggcacctgcaacctgcagatcaggtaagctgccctggttgttattttgggactcagggccaggtgcagattcaaaggattgattgaagccttttggcaactctggcctcagcagggtaaacatcacctgtctcctgccacctgcagtgacaatgccaggaagggtaccctaggtaggcccaaaggggcctaactttcttgctgccctggtggagcaagaaatatcttctaggagaggccaatccttccctgccccacagctccttctctgcaaagctcaggtggcaatcaggtacctcctgcccaagaggcccccatggttctggcctaaggaaggcagggcggggcattgggagccgttgacagctgggctcagctggggggaggggtcagtttgggagcaggtgcagatttcagggagggtggggcctaaagggaagtagggatcttggtaggctgcaaaattttcctccccatcccccagccacagctggcttctccaggaacctgatgacctagttacaatgcttagaaattgtcagcttagcttgcagttcagggctttgccagtctctcctctctgaggcttcttgggtccaaaaggtaccttggcatttccccaagggggttccatgtgaatgacatacactgtatcacatgtacaggcttcttgcccaggggaggaaagagccagtaaggctgctgcttcttcccttgtgtgtgccccccaaccccagggagaaaatactcccatgcccttgcccccttctgtttctctctagagggttggtgagtgacaaatgggaagtcacaaacttcttcccttgagggtcaacaaagagggccagacccttgttgccctaaggatagattgagcacacctaaccattctttccttacctccccatctcagtgtgatgttaaaacctgatggaaagaggttaggaagactcttctgggggctctggaggccccccactctctcaggcagcagctgctcctggtattcctggtgtctgccttgcctccttgggagaaattccatcgttgttaagagtcaggtacgaaatttgacaaaccgttgttgagttggtgagtctcacttgcttaatagttatccttggcaaatacttaatctttcccagccttagtttcctcatgtatggaaaagaggtaacaatatacagtgcttttcttttttccttttttttttttttttttgagacagagtttcgctcttgttgcccaggctggagtgcaatggtgccacctcggctcaccacaaccttcgcctcccaggttcaagtgattctcctgcctcagcctcccgagtagctgggattacaggcatgcgccaccacgcccagctaattttgtttttttagtagagacggggtttctccatgttgatcaggctggtctcgaactcctgacctcaggtgatctgtccgcctcagcctcccaaactgctaggattacaggtgtgagccaccatgcccggcctacagcgcttttcttgaaacactcttgagagcatgaaaatagttgaaaagatacatggagcacttaccaaggagcccagcatatagtaattacttagtataacaagctactattattactgttattgtcacattgcaatcactggtaaacaaattgttgtcattgctattggatctactctccaggagtgaactttcaggctgacagaatatgtggatatctttggaccaagagtttagagattttaaggtacctgaagcttggggccttggctcacaaccttgtcccctacctcctctacaaggcccaagtcataccttgtacacagtagaggtttggccagtgttgttgactaggcgtttggcaatggggcatattttgttttatcttcccagggtcctccttgtttgttgactgagtggaagacttaatgagttaagtatttaaagtgggtaggagcatgcctggcacacagtaggtgcttgacatgggtttgaatgattaaacatggcattgtgggaactctggagtttttccaggatggccccactcactccttgtttgctctgtggcctcaagcctcttgcccaagctctgcctgttgcctcatatgttgaagaaagataacacccgccttgcctccctcatgggctagcagggaggcccaaagagatgatagatgaaaaagcactttgagaactataaatatttggtcttgttgctactccttgactaaagtcacagccatagctgtgtcattcattcattcattcagtcaacaagcattttttgagtagaagcaatatcttatcacttaactggcttcatgaatttggacaagttacttccctctgtaaacctgaagatctataaagtggaagtaatactcatttcagagggttgttgggagaaagactaaacgaggtgctctgagcttactgaggataaaaactatgtcttattcactcttaacagctactgctgggcctagtacttggtggctgagtgtttagtgactggattaacaaacattcctaataattaatggtacatgtaaagtgcacttacacattgcctagtgcagagtaaaagctcagcaaatgctgagtctttcccttttctctatgaggcttgaggtgccttgatttagccatgggttgccttctgcagtcaaagtaccaggcaaggccagactctgaatatgactcagatgggaagtagaagtgagtattaatgcctggctccaggttgtccttacctgcctacgctggacttcagtgcgggagttctgaactatcgaggatcagtgctgcttaaacataaaatccagtgtactatggttctcaccccatgcttatctctgatccagaacaactgcctcttgttctacccactctccatctgctactcagaagaatttccccttgctcacagcacccatgttcagttggagccctaggggttaccatgtcagggaagtcccagggagtcactcagaaatagcctttggggcaaggtccagagaaggagcccaattctaaggctcagtgtctcctgggactgggtcaagcagcaggtgcatacatgagacccagggctggtggctgagtgatgaaactgagagatgtgtagggccagacaagaagtcaacctagaggaaactgcctgcttgttcatgcaggtgtttggacacctgggggaactttctgggtctgatttagtggtgctagtgtaggttccatattagtatcccaagccccagtgagggaaacctttgggactcccaagcaaagcctgtagttggcacccagcacctttaaacccttctcagatccctttagggtgaaagagaggccccctcctctgggttctacagcatctacagctggaaactccagggacaatgacataataaccatagctccctttataaagtctctgctgtgtgttaggcactgtgctggggctctttatgaaaaggggatcattttgttaattggaagtatgggctctggaatcagacagagttgagtttgaatctggtctctattacatatcagctgttagattttgggtgcattcctttccatttctgagcctcagtccccctatctgaaaaatggggataataataatacttcatagggtttttgtaaggatttaagagccttttgtaagaatgtatgtaagatcatatggtgcaggtattaaggtaattttagtaatatttaacaatgagcacttgcacttaagtgttttatatgagatagttcattgaattctcaaaatagtaccactcaggtaggttctcttattattcctatagagaagttaagaaagttgttcaaagatgcacagcgagtaagtggtaaaaccatgatttgaacccaggtagtctggctccaaagccaacttgtcctacctggataaggaaggccctagtaaatgttgctgttataactattgtatccagcattgtagttgtctgtagtttttggtctatccactgaattctgagctcagtgaagactagaaacccatttaatcaccttgcacccccagagaccaacataatactcataaaactcattaatatttgcttaatggctgagaatattctctttctttagtaatcaatcagtaactctttatcgaccagttcctgtaggctagctttgaactaaatcctaggaggaatgcaaagtacagctatgcctgtgtaaacggaagattgggtgtgtgcgttgggggggtgcattccagagagcactgtgtcattggcagaaacttccacacaggaggcagaaacaatacaggtggtttgaggatgttttccaagatgggattcccacccctccctgagggagtcacttcctccatctcctgcagaacaaggtgacacagattccctactccggccaagggcaaggaaccactctaagctcttcagtcactctaatccagaaactgtgtctttatggctcaggcaaccagttcatggcagcctagaatgacagggaaaaagctgggaagggaccttagaaaatcactcttgcccaatactccagccaaagtggtcttttaaaaaccaagttcaggctgggcgcggtggctcatgcctgtaatctcagcactttgggaggccgaggtgggtggatcatcaggtcgggagttcaagaccagcctggctaaggtggtggaaaccccgtctctgctaaaaatacaaaaattagccgggtgtggtgcacgcctgtaatcccagctactcaggaggctgaggcagaagaatcgcttgaacctgggaggcataggttgcagtgagctgagatcgcgccactgcactccagcctaggtgacagggagagactccgtctcaaaaaaaaaaaaaaaaaggtttagggccgggtgcagtggctcatgcctgtaatcccagcactttgggaggccaagccgagtggatcaactaaggtcaggagttcgataccagcctgaccaatatggcgaaaccccgtctctactaaaattacaaaaattagccaggtgtggtggcgtgggcctatagtcccggctacttgggaggctgaggcaggagaatcgcttgaacctgggaggcagaggttgcaatgagccaagatcgcaccactgcactccagcctgggtgacagagcaatactcgtctcaaaaaaaaaaaaaaaacaagttcagggctgggctcagtggctcatgcctataatcccagcactttgggaggccaagacaggcgaatcacctgagatcaggagttccagaccagcctggccaacacagtgaaaccccatctctactgaaaataaaaaaattagccgggtgtggtggtgcatgactgtattctcagctactcgggaggctgaggcaggagaatcacttgaacccaggaggcggaggttgcagtgagccgagattgcaccactgcacgccagcctgggcaacagagtgagactcttgtctcaaaaaaaaaaaaaaacaaccaccaagtttaggccaggcatggtggctcacacctgtaatcccagcattttgggaggccaaagcaggtggatcacctgaggtcaggagttcgagaccagcctggccaacatgatgcaaccccgtctctactaaaaatacaaaaaattagccaggagcagtggctcacatctgtaatcccagcacattgggacaccaaggcgggtgatcacctgaggtaatgagttcgagaccagcctgaccaacgtggtaaaaccccatctctactaaaaatacaaaattagccgggcatggtggctcatgcctgtgatgccagctacctgggaggctgaggcaggagaatcacttgaacccaggaggtggaggttgcagtgagccaagattgcaccattgcactccagcctgggcaacaagagcaaaactctgtctcaaaaaatttaataaaataaaaaccaagttcagatcttattgcatttttgtttacaaccctccaagtggtcttccactgtagttagaataaaacccagacttttttttttttttttgagatggagtcttgccctgtcgcccaggctggagtgcagtaagtgtcatttcggctcactgcaacctccgcctcccgggttcaagcggttctcctgcctcaaactcctgagtagctgggattaaaggtgcccactggccgggcacgatggctcacccctgtaatcccagcactttgggaggctgaggcgggtggatcacctgaggttgggggttcgagaccagcctgaccaacatggagaaacccgtctctactaaaaatacaaaattagccaggcttggtggcacatgcctgtaatctcagctactcaggaggctgaggcaggagaatcacttgaacctgggaggcggaggttgtgttgagccaagatcgcaccattgcactccaccctgggcaacaagagcaaaactccatctcaaaaaataaaaataaaaaaataaaggcacctgccatcacgcccagctaatttttgtatttttagtagagatggggtttcaccatgatgtccaggctggtctcgaactcctgacctcgtgatctgcccacctcagcctcccaaagtgctgggattacaggtgtgatccactgcacccagcaaaacccagacttcttaccaacctctgaggcctgtgtgatctggtcctggctgcccctccatcattctgtctctcccttactccactcaagccgcatgggttccttgctgcttctggatcctggcataacttcttcctgcccaagggcctttgtagttgctcttttctctgcctgaaatgttctgcccctagtatttcctttctgaggcctacatttggttcagcttgctggtcacctcctctgagagactttccttgaccttcagtttaaagtagccatgctatttctaaatccctctccagtcttcttgtagttttgtcatagcaacagcctctacctggaattttctttttgtttgtgtacttgtttttgtctgtctcttctattagaatataagccccatgattatagggcgtttggtttgttcatcattgtatctccagtgtctgcagctgttctttgcaggtagtaaacattcagtgaatactttttgaataaattattaaacaaatgaacaaaacctaagacatgaaaaaactgaggcccagagaagagaagctaatgagaattaatagtgttctttcatcctacttttgaatgctcattaagtgccaagcactgtattcagtgatttacatgcattatttttgccacttattcttaattgttataatgagttgtttggaacatcattttttatatataccactgtaccacttaaaagaaaactggaccaatcttattttttattggaaccttgctctgttttacaaagagttggaagcaacttaggaaaattcatacaaccaaaaggataatgtagctaagggagtcgggtgaaaggaaaatatgggtaagaagacgagccaaaagtaaaattagttcacacaaatgtatgttacaaaagtcctttgaactgagcagtttttatgccattctttataactaaatattgcccagattcatttaaaatgatggttttttaaaaatctaactacaggccgggcgtggtggctcacgcctgtaatcccagcactttgggagggcaaggtgggcagatcatgaggtcaggagatcaagaccgtcttggccaacatggtgaaaccctgtctctgctaaaatacaaaaaattagccaggtgtggtggcgcgtgcctgtaatcccagctactcaggaggctgaggcaggagaatcgcttgaacccaggaggcggaggttgcagtgagctgagatcacaccactgcactccggcctggcgacagagcaagactccgtctccaaaaaaaaaaaatctaattacatagatgaccttgggattgtcccagactgcacctaatagtctaggatttgctggctcccttcctgcctcatcagctgggctcctggattgaggcaacacgatctcctctttttgccaaaggggctggtccagcagggaggagcctagacccctctccagtcctctctggacctagctaactttgtttcaaggagtcttttctgtagaaggtttattaattgagatattgccattggaaacccagttctgctctcaagatacttccagttgaattagagagaaaagacataatatacatgaaaggagatcttgtaaaagccaacaataaatgctaaatgccaaatgagggaaggacttcacagaagaggtgaggtttacaccgagccttaccacaaagcggagaaaagaggggctgtagctcccagtaggagagtcaatgtgggttaagatttgcaggctgagaccaactctcaagaagagacccgtgggcagtggcagtcaaattttaggcatatgtggaggggtctctttcattaggtaataaagccaaaaaggtcagctagaaccaggtttgtaggatcttcaagtgccagggggaggattccaaggccctccttggcagccctggtatcccaatagataggtcgtgcccagggactaatgcccatgctggccactggttgggctgctgattcccaggtggcaatggcagcttctgaaatgggagccagagccttcaactaatagtgaggggaggagttaagtgtggggccattgtcagtttagcttttggccatcccaggtgctattcatttggcgattcggcaaatgtttattgagcaccaactatgtgccaggccctgtgctacatgctgaagatgctaagataaacaagataaggtcaaggacattgctcttgtagaactcttactttaatgggagagacagctagcccgagaaacaaacaagattatttcagggattgggttaaatgctgtacagaaaatgaaactgagtaatggaatatctaggaagcaactatatgcatgggccaactcagttactcagctttgacactgttgggtctagttggtacctttgtttccttttgtgttatagatggaggtgatctttcaaatctcctctgcagagatccaatgggataatggttgactaccatttattgagcacctagcccatgtcaggtactctacatgcattttctcatttaattccctcacctagactgtgtgctaaatggtccattagccctactttcttttccagtaaagaaactaaggtttggataagtgaagttgcatgccagggtcctgcagctttacgtggtgaatcctggatttggacctagattgggctggctctaaagccaggcttctttcccctgctccactcttggaataaatgaaggattgttggttcaggatatgcagaaagctgcttagcaaaaggagagttggagaagcatcttggtttgagggtcttgaaggacacctactgtactcccagctgagaggactctttctcctcatcttcaggaggatgcctccagagcctggggttactgtaggcctttgccagaggcatgttcggacttagccagctgagtatcccctgtttcctgcttttaccatctcagctgctggtcaggaggtttgggaaggtgacatcatctagctgaatcagctgctgcttctagatacattactggaactgaaagtcattaccccttccttcctgctctgcaagtctcttcagaatgaggctggagtatgggtgttccacctgtctgcagggtcatgactggaatggtacttgctgcttttaaagagctaaaaggtttttaaaagcttgttcatggaaaaagctttcctcaaggcttctcaagctaagggaacagagcgtccttgagaggcaggaggattcacaggaaggccctccccgactccctcttgtccacctacatttagccatatgacccttctgatctcctttgcctaagtccgaggcttaggcctagcactgtaggatgggtaaacaaaacgttatttgtggactttttgaccttaagacttttagagtctggtcaaggggacaaaaaaaaactgcttacatttcagagcagaccagccaccacactattggagatatattggagatctccccttgactcactaattgaaaagcaaaaaagggcaggtgtggtggctcatgcctgtaatctgagcactttaggaggctgaggcaggcagattgcttgagcttaggagtttgagaccagcctgggcaacatggcgaaactctgtctctacaaaaaaatacaaaaattagccgggtgtggtgtttcgcacctgtattcccagctactcgggaggctgagatgggagaaacacttgagtccaggaggtcaaggttgcagtgagccatgttcacaccactataccccagcctaggtgacaaagcgagaccgtctccaaaaaaaaaaagaaggaaaatcgactgggtccagtagctcatgcctgtaatcccaaaactttgggagtctgaggtgggaggatcacttgagcccaggaattcaacatcagcctgagcagtacagtgagacctccatctctacaaaaaatttgtcaggcatggtggcacatgccaataatcttggctactcaggaggctaaggtgggaggatcacttgagcctgggagttcatggctgcagtgagctatgaacacatctcacagaactccaacctgggcgacagagcaaaatcctgtctcagaaaaaagagtcattggagggttttgaaccaagaaatgacagtccgacatacatttttaaaggatcaccaggctgggcacgatggttcacgcctgtcatcccagcactttgggaggccgaggcaggcagatcacttgaggtcagaagtttaagactagcctggccaacatggtgaaaccccatctctactaaaaatacaaaaattagccaggcatgatggcgtgtgcctatcatcccagttactcaggaggctgaggcaggaaaactgcttgagcccgggaggtggagattgcagtgagctgagattgtgccactgcactccagcctgggcaacaaagcgagactccgtctcaaaaaaaaaaaaacagcaacagcacatgctgaggattctgttcagtggtttccacttatcagtatagcacctcattaatcctcccaacagttttatgaggtatgctctagtggtatccacattctacagagaagaaaactgagactttgagaggtaaagtcacctgttaggccgggcacagtggctcacgcctgtaatcccagcactttgggaggatgaggtgggcagatcatgaggtcaggagtttgagaccatcctggctaacacggtgaaaccccgtctctactaaaaatacaaaaaattagccgggcgtggtggcgggcacctgcagtcccagctacttgggaggctaaggcaggagaatggcatgaacccgggaggtggaggttgcagtgagtcaagatcgtgccactgcactccagcctgggtgacagagcgagactccgtctaaaaaaaaaaaaaagaaagtcacctgttaaagattacacagcaaactgccagcatccaaagcctgtcctcttccctcttccatttgaataggctccttccagccaacattcatgtatattctatccaggctccaaagtccagtaccaagccagtcttttccaggaagccttccccaagcttatctaatggcctgtccctctattgagagctgatctacagagctaccatccattgagcactccatgggtgctaagtatactgctgaatgatttaaatatgttatctcatgtaatattccaaggagccatatgccctgtgacatccattttacatgtgaaaatagtgaagctaaaatataggcacatgccatcatgcctagctaattttttttttttttttttttttgagatagagtcttgctctgttgcccaggctggagtggcttgatctcggctcactgcagcctccgcctcctggattcaagtgattctcctgcctcagcctcccgagtagctgggattacagtcacccaccaccatgcccagctaatttttgtatttttggtagagacagagtttgaccacgttggccaggctcgtctcgaactcctgacctcagatgatccacccgcctcggcttcccaaagtgctaggattacaggtgtgagccaccacacccggccgactagcttatttttaaatttttagtagagacaaggtctcactgtgttgtccagactggtctctaactcctgggctcaagcagtcctcccaccttgacgtcccaaagtgctgcgattacaggcgttagccagcagtgtctggcctctaatgacactttattcatgagaataaatgccaaaatgtatacagtgcatgggcatatgactgggagaccttggtacgccagcagtggcaaggacagtcacctagaagtaagtgccctagagtacaccgaacctgggtttcaactgcccaggcttactccttctcaaaaccagcccttttccagctttgtgtccctgtgtgtttgcatgggtgcaggcacaagtagatgacacagtggtgatgctatgcacccaggacatttcataatagggaaggacgttgaccgctgccatggggtaccaaaggtcatcagggctgtgaaagccaaggacactcaggcagccttactcccctttgagtctgagtcatttcctgagggatattggtcattcattcatttgttcattaacaagtatttattgcattcctgtcatatatcagggactgagctaaaggttggacatacagtctgaacgaaccaaagtccctattctcacccagtggacattccaaggtgggtgacagattttaagtaaattaacatgtcagggctaggcatggtggctctcgcctttaattctagcactttgggaagctgaagtgggagtattgcttgagcccaggagttcgagaccaacctgggcaacatagtgacaacccacctctaaaaaataaataacatgtgaggtagtatttagtgatatagggaaaaataaagcagagaaaagggattagggatgggaaaaggaagggtagggtagttaggaaggcctctctgataaagtgacattggatctgaatgcagtgagggcatgagctgtgcggatatatgggggaatagtgttgtaggcatagagaacagcaagccgtaaaacaaaaaaaagccagatgcagtggctcacgcctataatcccaacactttgggaggccaaggcaggaggatcacttgatgctgagagtttgagatcagccagagcgacaaagccagagtttagttgggcatagtggtgcatgtctgtagtcctagctagctactcgggacactgaggcaggaagatggcttaaatccaggagtttgaggctgcagtgagctatgatcctgtccctccactctagtctggctgacagagcaagaccttgtttcaaaaaaattaaaaaataaagcaagtacaaaaaaagactctccaacatatttaaagtacagcaagttggccagtatggccagagtagagtaagccagtggtaggaatcaggtctgagacgtcaccaggggccaggtcttgtagggccacatgggaccttgctttaagggcagtggaaaggcatggaggatttttaagcaaagaagtgacaggttttagaaggatctctctgatgtggagaacaaactctatgggtaagagcgggagcaggagaccagtgagaagccaggtgggtgataacagcagtttataccagggtggatgggtggtggaagtggcgagcagtggtcagagcttcaatacaatttgaaggttggaccaactggatttgctgatgtttgctggataagaggtgagagagaaaggagtccaggtttttggcttaagaaactggaaagtccttactgccatttaataaggggaagatgccttggctgatagtgatttcctgctagggctgtggagttgaactgcctgcattcaagtcctagtttgcttactgttttgtttttgttgttgttttgagatgaggtctcactatgttgcctgtgcttgtctcgaactcctgggctcaagtgatcctcccgcctctatcttcctgggattataggtacgccaccaggccctgcttactgtttgactttgagcaagtgtttgactttgccaagccttagtttccttcaatgtaagcctactgtctagatgataggcagttgggtgctgtgaaaactaaatgagggtaatttgtatgaagggcttaggacaatgcctggcatatggtaaaccttcagtaagagttagctctaatccttattactattgttggaagacaagaagtcccagggcctcaaggtcctctggaaagcaggcagcaggtcacactccacctccaccaccccctcaaggagcccgccctccaagaggcagctcagacaccatctgtccagcagagaaaagccacagggagacagctttcggggagcattagatagatgagcccttcccaagaaacctaatctcattctcagcaggtgctaatcccaccaccctcccttggtatctgagcccagcccacccacttccttccccacccccatcctgtgtcctagaccctcttccccttctcaccagctccaagctgccaccagcaaacttccttaccagatggaggggctctgacagaagcccaccacccatctgactgggcccagcctctcacatgtatcaggtcaccaagggctacaggtgccacctgtccagaagccccccctacaggtgccagttcctgggcgtggtgcttgatccaggctggagccagctggagccaggaactcccactgtgccccagctgctgcctgccctcccacccacaggcagagaaacaggcttaacccttcggacactgcatatgttgagttagttgttacagttctggctcagagtattgcactgtttcagtacactttttttttttaaagaaatttatcataaatacaacagagaatatctaatgcatatgtacaattttaaaaataggaaaatcatcacttgtaaactcatcacccagattaattaataatcaaacatatgtttgccttgcatgatggcttatgcctgtaatcccagcacttgggaggctgaggtaggaggaatgcttgaggccagaagtttgagactagcctgggcaacatagtgagaccaccatctctacaaaaactaaaattaaaaaatagctgggcgtggtggtgcacgcctataactccagctactcagaaggttgagtcggggatcacctgagcccaggagtttaaggctgcagtaagctatgatcgcgccactgttctccagtgtgggcaacagagggagaccttgtctctaaaaacaaacaaaaataaacgtgagtaccttagagccccctgtgtaccccctccccaatcacagctaccccaccatccatactcctgagttctgtgttttcttttgtgatatcttaccatgtcaaccaggctagagtgcagtggcatgatcatacctcacttcagcctcaaacctctgggctcaagtgatcctcctgcctcagcctgccaagtagctaattttttaattattattattattttttttagagatgggatctcactatgttgcctgggctggtctagaactcctggcttcaagcgatcctcctacctcagcttctcaaagcactgggattacaggtgtgagccaccacacctggctacctttttttttttttttttttaagttttactatatatatataggtatatattcctaaacaatataggatattcttctacatgcttttttttgtttttgtttttgttttttttttttgagacggtcccactttctcgcccaggctggagtgctatggtgcgacctcagctcactgcaacctccgcctcctgggttcaagcggttcttctgcctcagtctcccgagtagctggactacaggcgcacgccaccacacctgactaattttttttttttaagaccgagtctcactctgtcgcccaggctgtagtgcagtgtggtgcgatcttggcttactgcaacctctgccacccgggttaaagtgattctcttgcctcagactccctagtagatgggattacaggcacctgccactgcgcctggctaatttttgtagttttagtagagatggggtttcaccatcttggccaggctggtcttgaactcctgacctcgtgatccaccagcctcggcctcccaaagtgctgagattacagctgtgagccacggcgcccagccctaagttttgtattattagtagagatggggtttcaccacattggccaggctggtctcaaactcctgacctcgtgatctgcctgcctcagcctcccaaagtgctgggattacaggcgtgagccactgcgcccagcctgtgcattcttttaaacttcatttaggtattatgctgtgtttatcatctgcagtttccttttttcattcaaggttgagatccatccatgttacttgcatagcataatttgttcattttcgtatccatttatatgatcatgtctcaagctgtgtatccattctgctgtcagtggttatttgggttgtccccttgtttttgctgtttcagacaatgctgttatgaaaactgtttgtgtctcctgcacatgcacatgttcaagagtttctcccaggcagtggttcccaaactttagctgcccatcagaatcacctggaaggtttgttaaacctcagattgctgggctccacccccaaagtgtttgattgtgtatgtcagggttggggccctcagaatttgcacttctaacaacttctcagctgatgctgccactcttggtcctgggacctcactgagaatcattgttgtagggtttacacagaagtggaattgcttgatcagaaggtaatggcagattgttttcctgtgtttgtgtgaatttacacagccaccaacagcatatgggttttccattactttacctctttgttaatacttgatatggtcagacttaaatttttatggagctggtgggtgtgagatggtatcttgcggttttaatttgcatttctcagattacaagtggggctgtgaatcttttcttacatctgttggccattcatgtttcctctttgtaaaatgttcaagtccttgctccatttccttttgatttgactttttcttatgggtttgtaggcttttaaaatgtattttgaatactaatactttgtctatgcatgttacaaatatagtctttcagttcttctgcctcagcctcttgagtagctgggattaatttgttcgccgggcgccaccacacccagcctgtttattttattttattttattttattttattttattttattttattttttattttgagatagagtctcgctctgtcgcccaggctggagtacagtggcacggtcttggctcattgcaacctccgcctcccaggttcaaatgattctcctgcctcagcctttcaagaagctggaattacaggcatgcactaccacacccagctaatttttgtatttttagtagagacggagtttcaacatgttggccaggctggtctccaactcctgacctcaagtgagcctccatgcctggcctccatagggtgttaaaggctgtaaatttgaattatttatgacttaagttatacctagagcttattgtatatactgtattaatatttcttttttttttttttttttttttttttttttttttttgagacagagtctcgccctgttgcccaggctggagtgcaatggcatgatctcggctcactgcaacctctgcctcccgggttcaagcgattctcctgcctcagcctcccaagttagctgggattacaggcatatgtcaccatgcctggctaattttttttatatttttagtagagacggggtttcaccatgttggccaggctggtctcaaatgcctgacctcaggtgagccacccacctcggcctcccaaagtgctgggattacaggcctgagccaccgtgcctggcctactgtattaatatctcataatgaacaaaggtaccctctttgggaaaaagttggggctttttttccttttttcttttttaacttttcaattgattctcaaagccagcatgtgggagagagtttatcaaaacagccaggcatcatggcgcacgcctgtaatcccagctccttgggaagctgagacatgagaattgcttgaacccaggagacggaggttgcagtgagctgagatcatgccattgcattccagcctgggcaacagagtgagactctgtctgcaaaaaaaaaaaaaatacatactgacctgtgtgtgggatttgcttcaaaatactactggagtgagagatagtggttggggaacagatgaaatcagattggcaccaagttggtacttgttgaagttgaatgatgggttcgttttattctgtctacttttgtacatgattaaatattatcataagaataagtttaaaattggccaggtgcagtgactcacacctgtaatcccagcagtttgggaggctgaggtggaaggatggcttgagcccaggagttggagaccagcctggacaacatagtgagaccctgtgtctctcaaaaaaaaaaaattagtcatttgcagtggtacacacctgtagtcctagcttcctagctacttgggaagctaaaataggagaatctcttcagtccgggaggttgaagctgcactgagtcatgattatgccactgcactccagcctggatgagagtgagaccctgtcacagggggaaaaaaaaagttaaaaatatccaaggactatttccagggctacttgtgaggtagcacatcttttctttttttcttttttgagacagagtttcgctcttgttgcccaggctggagtgcaatagcgcgatctccagctcaccgcaacctccgcctcctgggttcaagcaattctcctgcctcagcctcccgagcagctgggattacaggcatgtgccaccacacccagctaattttttgtatttttagcagagacaggatttctccatgttggtcagggtggtcttgaactcccaacctcaagtgatccgcccgcctcagcctcccaaagtgctgggattacaggcgtgcgccaccgcgcctggcagaacatcttttcttaacgttttgttagccatttgtattcttcagagccaatttagtctccatctactttcaggagttcctgataaagtggtcttagcaggcatggaagagactgattttaaagaaaacaggagagggagtggtaaggaaagactggggaggggattttcaggcggttgccagcccttctcctagagcctgactactactgcctctaggattaagtttcctaccttcccttgtttcttccaggaccaccatgggataatttttattttctttctttctttttttttttcttttttttgtagagacgggatctcactatgtctcccaggctggtttcgaactcctggtctcaagcaatccacccgcctcagcctcctgaagtgttagtaggattacaggcataagccactgcacccagctgtctttcttccttccctcccctcccctgccctccccctccccttccctccctttcccttcccctttcttcctttccttttcttctttaattatagagacagggtcttgccacgttgcccaggctagtcctgaactcctggcctcaagcagtcctcctgcctcggcttcccaaagtgctgagattacaggcatgagccactgtgtccagccaatttttattttaatggtattcttctttccctattattttacctggacagacttaacccagaggatagaggaacctcatcatggatcctggtccgcttttagcttaacagcatccaaagacaaagggtcagagatggtagcaaccctagtgtggttgattacacagtagtggtgttattttgttgtcataggatgcaaatatcaaagttgtatctcttaagatctttctgtgtcagtacataaaagctttctcagtctttttaatgctgcatagtattctacacagggcactattctatactttaaccagttcccattggtagacacatttttttccagtcttttgcagttataatagtgacactcaatgaatagccctgtatatttgtcatttggcccatatatgaatacagtatatctgggggggatgaatccctaaaagtggaattactggggccaagggtatgtgtacttgggattttaatagggttagttagcctgggcccacagcagtgggtaccagtttacaggagaatcttttttcttaacacccttccacccaagtggagagtttggttcagcacatttctttttctttttctttcttttcttttcttttctttttcttttctttcttttttttttttttttggagacagagtcttgctctgtcacccaggctggaatgcagtggcacgatcttggctcactgcaacctccacctcctgggtttaagcagttcttctgcctcagcctcccaagtagctgggactacaggtgcccaccaccttgctgggctaatttttgtatttttagtagagacagggttttgctatgttcgccaggctggtctcaaactccagacttcaggtgatccacccacctcagcctatcaaattgctgggatttacaggtgtgagccaccgcgccggccatcagcacatttcttgagtgccttcctgtacctggccctggatataagataaacactttcatgtatcaagtgaaattgttactatttgccaggcaccagcacattatctgataatcctcataactactcaaagaggaaggcttttagatgagataagtgaagctcagaagggttaaatagggtgccatggtcatggtccagctattaagtggcagagctaggattaagcccaggtttcaatcctctgatgcctgtgctcttacagtacacctttacctgcctctcaggaggaagaacatatggtcttattgtctaatacagataaggaatcaggctcagagagggtaactggccacaaaacagccagcctggaagctatgaggaacccacatatgtctgatcagaggtctctggtctacactgagctgcctgcctccctcccggggaaagagtttgagaattttcttttttttttttttttttttgagacagagtctctttctgtcgccaagctggaggagtggagtggcaatcttggctcactgcaacctccgactcccgggttcaagcgattctcctgcctcagcctcctgagtagctgggattacaggcgcgtgccaccacacccggctatttttttttgtatttttagtagagaaggggtttcaccgtgtttgccagaatggtctcgatctcctgacctcgttatcctcctgcgttatcctccttcctttgggaggccgacgcctcccaaagtgctgggattacaggcgtgagccaccgcgcccgaccgagaattttctccgttcagagcttcacttgctatagagagcctcaagtcactggttctcagtgtgcatctattggccatcagagggtcctttagggatgacccatctgtgcttaatttactaatgacagtatagttgctgctatttattgagtgcctgccatgtgcaagatgctgtaaggtacagtgtagtttgttttgttttgttttgtttttgtagagatggaggtcttgttgtcttgaccaggttggtctcaaactcctgacttcatatgatcctccctcctggacctcccaaagttctgggattacaggtgtgagccaccagactcggccagtgtagtatttttaatcttcacaataatccttcttgggaaacatgttattgtcctcattgtccagattagaaaactgagtgtaaagtaagttaaattatagtcctaaggttgaatgctaataaagacagaatacaagtccaatatattggactcaaaagccctcacttaactatggtctccatgggcttcccttggctctctctgcctttttttattttttcttattgcttgaggccctttctggaaggtaagtctggattatctacttcacactgttttagagaagacttgtggtttccatttaccccttactccctccgctccatggcctttcagggagaacactgtgggtatcatgctgggtggcctggagggtccaagtaacaggaatctagaaggatggaccagatgtgaacaaaagaaagcctgagtaggacacaaaacagagaagtggggctgtaacatctctaagatattacagcttgctacttccactctctttgcaaatgtggtgaaacccaggctggagtcataaaataatagcataggatcattaactaaagtttgtctagtgcttccttgtgttcacacattatctcattgaacctctgacgatgctaggaggaggtaaatagggttttcctcttaccttgggtgaactgaggtcttctgactaagtctcaggtcctttctaccatttgtgctgcatccacatctctactgggaagaacacaggctctgcagtcagacacacctgggtttgaaccacctccattttgtgtgtgttggatcttgagcaagtgaattcacctttgtgaccatccatgtcttcataaaataagaattttaaacacacatgagggcctggcatatacaaaacattgaataaatagcagtgatctttttattgacatcagaagggggttggggacccagaggctatttgggctcctatggcatagctcttggaacgtgttaattttcaaggacaggggtttgcaagtcagagcaatgtcaagtaaagaacaggttctttgggaggccaggatatgctaatgggtgaacaatgtaagggaggcataataataatgccaaaggcctcctagagtacctgttcactgcacttttgggtctttggtttatatatgaagaaaatgaggtgcccccagaggggaagtgggttgccattgttacacagtaagttaataaatggcattgctgagattagaactcagtcttttgtctgccaagaaagcttacttttcccttacactccactgctcccttgaggggaaaaaaaaagggcccggagataggatcttagtgctttggaactggagagaaagccttagagatcatctgatccatcctccacacttttcagatgagaaaagtgaggcccgtggtgcttaattgacaggaccatagccaaatagagccaccacaaagcaggagtaagctcacgtttcttgaacctgaccatgtggaactttcaaattgccttttttctgtgcggaactagagcctcactgaaaataccagtggtttacaataagaacagctgtttagtttggggaacatttttccaaatagaatcttctttttctctctttctcaattctttttttttttttgagatggagtcttgctctgtcactcaggctggagtgcagtggcacgatctcagctcactgcaagctccgcctcctgggttcacgccattctcctgcctaagcctcccgagtaggtgggactacagacacccgccaccacgcctggctaattttttgtatttttagtagacggggtttcaccgtgttagccaggatggtcttgatctcctgacttcgtgatccacccacctcggcttcccaaagtgctgggattacaggcgtgagccaccacgcctggctgtctttctcaattcttaataaaaatatactagaagaagaaaaagctttaatggaggaccttggtagaaagcaggtaaaaattatatagagtctctaaaatctagggaggtccccagagccagtaaatttagaggccagccttctcgcctatcccagcaagcttatcacttgtcttgccctattcacaacaggccttcagaaggcccagccttcccttggcagctgcatgtggtgaacaccaacggaaatccctggtatttttctttgtatgcaaccaaccgtggagatgtaggtcaggcattgctggcttggcagttacaacatctctagcttcacccctgcacctgtagccgtgttcactaagcccctcaaagatgggaaatggatggtcccttcttaatagggtttggatccccgagggctcatatgggtggagtgggtttgggaggagacagaccatccggaatgtggagatgagaagggtagatctggctcttccctccttaatgtctgatgtctggtgttactatagctggattggtggtgcttctgctcagctcaccttagagtaatcatcactgacggaggagactggggaggtcccatccttcccctgggctcagctgggtccccagacctacacctgaaccccacgcctgtctggtgtttacggattgaagctgccaccctttgggacctatcctgttttcatttctgctctcagctctctggtctctgtggacctcacttacaggtttgtacgtgcctgtcacccacggtgcagccccatgaggctctcccagcctggcacactcatgcctctttggcctttgttctcttcaggaaaactgctagctctatgccttgctagggagggcttttctggcccctcagataggttcttttggtccaacctagctatacctttcctgagattcagtctctttgtccacaccctgggggacagggctgtggttccaaggcatgttggggggtacctgtgggccattctggactggcttccggtcagctggctgactctgccctgggtctcaaatatctcctctgtaaaggtgttagaccaggatcttcaaggtaacttagaggtgatatgcagatggacattttctgttttaatagtcagtgtattttatgttgatttccatctggggcaaatgatactctttataggaagaataataagttgccttttcattgcatttatttatttagcaaatatttgctaagtgtctactatctgtcaaccactattctagctactggggatacctgccttcatgaagttcacattcttttttttttttttttttttttttttttttttttgaaaaggagtttcactcttgttgcccaggctggagtgcagtggcgcagcctcggctcactgcaacctctgactcccgggttcaagcgattcttttgcctcagcctcttgagtagctgggattacaggtgcccgccaccacacccagctaatttttgtatttttagtagagacggggtttcactgtgttggccaggctggtcttgaactcctgatctcaggtgatccacctgcctcgttctcccagagtgctgggattacaggcgtgagccactgcgccgggccatcatgaagtttacattctaagaggacagagagtgattaggtggccggtggtaggcagcttttggtatgtgtttgcctttttaataaaggataattaaggaaggcctctgaggagcaggcatatgagcagagatctgcatgatctgtctgagggaggaaaccatgtaacagtctatggaaaaaacattccagacataaggaacaagtgcagaggccaaagggtgggaatggtgtgcctggcatgtttgaggaagagcacgggagatcagtgtggctagaacagagtaagcagaggagaagtgattggaaaggaaagtttgtgtgagcagtggtgagacattttggttcttcctctgggtgagatgggaaggcagtggagggttttgagcagacaggaaactgactttgctgacccctctggctgccatgtggtgaaggaaccatggagtcgataagaagctgggagaccagtaaggaggctgttaggacaatacaggcaagaaatgatactggcttggaccaaataatagcagtggaggtggtgggaaatggtgggactctagataaatttggaatacagattcatcaggatatattgacagatgagtgttagaggggatttaaggatgagaaagatgcagaaagaacaggtttagggaataaattgagaattttcagtacatgtatttaaatttataaaaagtaagtaaattgatagaataatgttaagtaggccaggcacagtggctcacagctataatcccagcactttggggggccaaggcgagagaatagcttgagctcagtagttcaggaccagactgggcaacatagtgagaccttatctctacaaaaaaagaaaaagaaaaaaaaattagccaggcatggtgatgcacacctgtagtcccacctagtcgggaggctgaggcaggaggattgcttgagcctgggaggttgaggcctcagtgagccttgatcacacgattgcactctagcctgggcaacagagtgagaccctgtcttgaaaagaaaaatgttaagtaaataataacagaatcacatataaggtcaaagcagtgatggctgaaattgtggatagagtggaccaaatgtgtctgtgctgccttccagctctaaaatcctgcttcagtgattcagaccacatagtctcccattcacagagaacaagaacttgaagctcagcctagaataagcagataaagtgacaggagagcaatcctttggaccaggcctacctcctgttaatttggaaggacttgggaagttcttgcacatatactggccttctggcattaccttatttatttattcattcattcactcagtcagtcagtcagtcactgagcaccttctgcctagtaggccctggacaacggcagctctgatgcttcttctctcctaatataaagcaagctaccctgacccccgctcccactggagcctgtctactctgtggcctggcatatgcctggcggtaatgtgtgtgctgaaagtggaatagccacagcctaggcagagccctgccctccctttgctgcactgtctctgtccatctctgccttcctcatcttattgccatccacactttgaggcctggtgagcaaatgattttgcttccatgagagcagcagaaatagttgctttatctctttcttcatataggtcctcatagttatcaaactggaaagaaatccccaagggcctcttctctcgccttttatagatgggaaacagagggccaagagggcaggcaactcccacagtccacatctaattcatcagcaaatcctttcagctctacttttattgattgattgattgattaagaacagtatcttgctgtgtcttccaggctgaagtgcagtggcgcagtcatggctcactgcagcctcagcctcctgggctccagcagtcctcccacctcagcctccggaatagctggaacatgccatcacgcctggctactttgtgtcatttttttgtaaaaataggattttcccatgttgcccagactggtctgaaacttttggactcaagcagtcctctcacctcggcctcccaagtgctgggattgtagacatgagccgctacacctggcccagccttactttaaaaaataaattctgaaactgactgcttctcaccaacttccctggcaccattgtggctaagccactgtcatattttcctgattatctcaccagacccctggagatctccacccagcagccagacggacgctatttaacaccaaggtcaggtcatgtccttcccctgctcaaaaccctacagtgctttcccaggacaagcccaagtctttaaatggcctaccaggccccacacaatcgggcccttggctacctccagatctcatcaccaccagtctcctcacattcactggacttcagccacactggcatttttcctgttcctggagcacctcaagcgtgttcctgcctctgggcctttgcacttgttcccacagccttttctcagatctttgcagtgcctgtttcctcatttcattcaggtctctgatcaaattcacctccttaagaagttgtccctgaccatggattctaatcttaccttcttccatgtttctctgtaccccctttctcacatttattctttcttaatgcatcaccgtctgacatgtttattgcctgtctcttcccatttgattataaactcatacaggtacgaattttcattctatttagtcactgctttatccccagcgcttagtacagtgcctgactcttagtgggcacttaatgaagatttgttgaatgactgagtgtccaaagctagggaaggcagcctgtctgggccttcctacaactccataggtcagcctggcttacaaataggtcatgtcccatcttagaaaactcatctaatagcttcaccaaagctacgtggcatcacttttgtttccaagataaagatcagacagagggaggaactctctctgcaagtactgtccttgcagatctggcttaggggaaagtgggttcatcactgagtagcctcagcacactcttccctttctcacccctcaaggcacccagggaaccaggggggaatgctacttccatgtacttaaagtcatctctgacttcgaaggcctaagaatagcagattctcagtaaatattgggtaggtgaaagggtgaaggaaagaaggtcttagtaaaatctcttcatgtatcctgttgcactggtaaatttaacatgctgtgaagttgaatgccctcactagtaaccaggggcctcaggcaaagtctcatcacttcgctgaattttagtttcctcattggtaaaatgggaacagcacctacttgcaagattttgagaattcaaacagtaaatattagttcagcaaatactagctgttactttttgtttgtttatagctacaaataagagagacactatgagaagcacaaatggagccactgattttttagctataaaaaaacaggctgggtgcagtggctcatgcctataatcccagcactttgggaggctgaggcaggcagatcacttgaggccaggagtacgagaccagcctggccaacatagcgaaaccccatttccactaaaaatacaaaaattagcctgcaaaaatacaaaaattagtgtggtggcacatgcctataatcccagctactcaggaggctgaggcacaagaatcgcttgaacccaggaggcagaggttgcagtgagcagagatcacaccactgcactccagcctgggcgacagagacagagtgagacttcgtctcaattaataacgataataataacaacagcagcagcagcagctaacatttacagaacgcttaccatggaccattgaactctgctgctaggcctgtgaagtaagtacagctgttttcattttgcagccggaacaccaggcttggagggggaaagtgtcttgctccaggtcctgcaaccaggtagtcacagaactagggttggaagccacactgtctcactccagggtagggaggcctgagaccaggctgtgctctgtccctgtatgaagccttggaggtatcccttcacttcctctgggcctcagtttcttacctgctcaggatcgaaccacacatctctgtgacgctctgaaatttctggtggtccacaggccacatcaagtgggacagtgagttgcttccaggcctcctggtggtggtgctctgggtattgactgtgaacagcacacctctgggtgccccctccctcgacatcaggcaaagtaccctagccctcttctcaccatctcaggcatcttactgttctgcaccttaaaggggtaatggactggggcagaaatgaatagggtagaaaacaagaaggaacccactcccttgtctggtgcagatcaatgttggatgctgcagagaagagtatgaggctgacagtcagtggatgtgggttttgtttcccagttccatcacatcacagaatagaaggaaatgcaacaccgtgggtgccttcagccctgagtttttggttacatggggtgtgagcattcatctgtacagtggggagagaagggtgttgcagggatttgctcccttccccaaatcctccagagctgttgccttctgctgtggaattccaaacatttctgatcagataaaggtggctgaaaatacttgggacttgtctggactagttggaggcggtgctggggtgaagaggtcgaggccacaggagctagagcgtggaaagatctagccttgcccaggagtctgcctggtcatagatgtgcctattgctctcttcccctggaatcctgcaggttcagagcaatgcccagcgggctttgaggtggagaaggatcagactcctttgtggcaacaagttctcctacttcagaatgttgcttctcaatttacacactaattactggatcttttggatacccctgagagagagaaccctggtagtcactcatctgtctgcatgagttactttcattctccttatgctgtagccctagacggagccctttgagatgattcccacttcatttgacagttggggaaaggcccatactttcccagagtctcaggcaggggaaaggactcacctgcaaatcagcgatggaactgggaaacaaaatccacatccactgactgtcagcccagtactctcttccccacagcatccagcactgatctgcatcagacaagggagtcgccatagctttgggtggagaggaggaaggagaagctgctttggactatggagcacttggggtcaaagacctcagaaagaagtcctagtttttggagattgctaccccattcctgcctgttgcctcagcacagtgcaaaagatgccttttctagaactttcccataagcttcctgtcccctttccttatcctgagagaaagtgtctggagaatactggacaccttgcataatcacctgctatattggggcctctttctagttttgccaggcagtgaggaaagggatgaagagagtgggaactggcctttcttctcttccctcctctctgtccaacactcagccagactcttcagcaccttctctggacccagcactgggcaaggcctaggggacagagcccatggtcagatgggggaagaagtgagcagctaggctccttgagaaagtgacctgtggattaagacctcagagataagtgggacagagcttggtagaagcaccagtgtgggcaaaggtcctgagtctgaacagaacatggcatgtgaggaatgaagcagcctggccctaggtgaagctgagaaaaccctgcaggcccttgtaagccatagagaaggctccgagacacaagctgagccatggtctactagtaagaacaataaaccagacatttactcaaagttaactatgtgccatgcacaattctaagacctttacatgtattaatttgaatcctcatggtattcttttgaaataaggacattttgggccagatgcagtggctgacgcctgtaatctcagcactttggggggccgaggtgggtggatcatttgaggtcaggagtttgagaccagcctgaccaacatggtgaaatccagtctctactaaaaatacaaaaaaattagccaggcatggtggtgcatgcctgtagtcccaattacttgggaggctgaggcagaagaatcacttgaacgtgggaggcagaggttgcagtgagccaagattgtgccactgcactccagcctgggcgacagagtgagactctgtctcaaaaaaaaaaaaaaaaattaaataaggatttttttaatccgcattttacagatgaggtcaaaagcaaaatatcttaatctagtttgcaagacttattggttctctgcctgctctgtgctctggcagcccagcttggtagagaagtagaaattaattgcctttatccagatagcacttccatttcacaaatgagacaactgatacttggaggagagcaggagagcagcagcggagagagagcagaactaagaccagccagtcaagggagacagagggagacgagcatcagctccctgacagggaagagttttccaacggggctgtccgaagatgaaatgtcccacccaggaaggagggagctctccataagtgcataaggagagaatgccctcgagatgactaccaactcccatgggtgtggaccatcagaatgaaacagacccactgtgggacttcagcactccacccttctgaaccctgtctgtgaaatgggggtgttcgtggtgagcttgagtattacatggaaggttggatgggcatgctgtaaggtccctggagtctccgactctgttccaagggtgagtattggtttttctcaccctggacactgggagaagaatggagggctgtggccatctacttacgaaagaatagggagtcaccagggttgaaatgagagagttgagatgacgggaggcatcggaatcccaggggatgagcctatatgagcacatagcagccacccaggaacagttaaatgtttggactctggagacagactgcctgtattcaaatcccaactctaccacttgtggcctctgtgaccttgggagggtgatttatcctctctgcctctgtttcctcatctgtaagctggagagtaataacagcatgtactcggtgggattattgtgaggattaagcaaattctttacacacgaagcacttagcaccatgcctggtacttagtaaacatcagctgttttatctccatcggttccagggaaggaggttatgagcccccaaatgagcatctctgcccccagtaaatgcttttctgaattctctctctttgcccccaagcccatcaccctggttctgagccagagagatggagagcccacactcgcactgctaggcctgatagctttctcgattccccagcggaggtgttatctcctcccggcacaaccgcttccttttctgagaaatgcaagtgcatctgtcaggcacagcttcttagaactaatggtgggggaggaggtggaggaggagaggctggcagctgaattgaacaggtcagagttggaggaagataaacatgaagtttgttgtgaggataccaccaaatattccctatagcccagatggcttgagccctctatgacaccccctgatctcaccactactgctagggaggtcaaggcaggagaaactgaggctcagaagccaaaaggcttgctgtggcacccacccatacctgggccggctggactgaggtgttgaccccaacacagtcttgccacccctctctttgccctgcctccactgagctgcttctccaagttgcccacctccaggcctatgtttccgtgggggagaggagaaaggccatgttcttctcacatctcgggagccaacagctcccctgggaaaaccagaggaagtggattccaaccacaaacctcacttcttccgagtctccgcctgcaactccctgccaaaagagtgataaggcctctccgtttgccctacccccttcctaccatctcccagcgatcttctagcaaggccatgtttgtctattcagcacacatttatcagcctctccctcagggaaactgaggccaggagcataaggtgactctgcaggtgactcacagcctgccaatgcagggatgtgagaaggacagaacaaggtacagttctggtgtccctggcacttttcctggctgctagtagcctcttcctcttctccacctacctctttcctgaaataaccaagcaggaaggaagcaatgggcctgggccctccagagtcacccaagaggaaggaagggttcgtctggcacaggcatgcttgttcctcactgaagccaggacggaagggtttcactttccctcctggtcttcgtcacatccttttcctgtggcaccagttcccctcagctggcaggagccagtgcttattcattcagctgatggcctcaggctactttaccctccttgacagacccagggccatggccctggctcagaatatggggtttgctgccaaacatactggggcttaaaaatggcttccctttttttttttttttttttgagacggggtctcattctgtcgccctggctggagtgcagtggtgctgtcacagctcactgcagtttcaacctcccagcctcaagcaattctcccacttcagtctcctgagtagctgggactataggtgcatgccaacacactcagctaaatttctaagatttttcttatagagatgggggtcccaccatattgccctggctggtctcgaactcctgagctcaaacagtctgcccaccttgaactctcaaagatgctgggattacaggtgtgagccatcacagctagctgccacttatccactttagctaggtctcagtatctctgagcctcaggttacctggacttagaatgaaggccttcctcagccacagaagtacatggacctggcccatgattgtcctttagaaactgagcagagtactgcatcaacgttaggagtaaaggcactgaaccagattgctggtgtaggcatcccagttaggtcaccagctcactacatggccttgagcaattcacagatcatctgtgggccacatatccatcagctatatgggttaatggtagtacccactgacagagtgtagagacaactaatgaactaatctacaaaaaaaccaagaagagtaccttacagagtatgtgctcaggaagtgtgcgctgctgctgaagtcactaaggaagtcaggttttctgtgggtagagatagcagggtctaagatggcaagattggacatcagaatgagtgtgaatgaagtactatcttggatagattaaaagaaaaagaatggtgtgaggccagaactcagacagatcctactcttgccacttcctagatagggatcttgggtaaattctggagcctccattttcacatatgtaaaatggggctattgataaatgttatgaggatcaaatgaaagcattcatttgttcttctaaaatagatttatttagaatggcatctgctgtgttccaagtatagcacaccaggttctagagatacaggtgacagagccacacacagtcaagtgggggagacaggacaaaaaataatctctcaagtgaatatgatgattgtacatgtaattgggaaatatggcctagtgtgcatagactgctttatagctcagtgcccagcacaggtgaaacactgaaatgtttggtaatggtcagctgtcataataatagttttttgtttctttgcttttatcttttgtttttttgagacagggtctcactctgttgcccaggctggagtacagtggccccaaacatgattcaatgcagccctgacctcccaggctcaaagatcctcctcagcatcctgagttgctgagaccatagatgcataccaccacacccagctaattttttttttttttttaatttttttgtagagacagggtcctcctgtgttgcccaggctggtctcagactcctgggctcaagcaatcctcctgcctcagctcctaaagtattttattactgttaacaagtaagggctgggtgcggtggctcatgtctttaatcctagcactttgggaggccaaggaaggtggatcacctgaggtcaggagttccagaccagcctggccaacatagtggaaccccacctctactaaaattacaaaaaattagccaggtgtggtggcgggtgcctgtaatcccaggcaacttgggagactaaggcagaagaattgcttgaacctgggaggctgaggttgcagtgagccaagatcatgccactgcactccagcctgggcaacagagtgagaggctatctcaaaaaaaaaaaaaaaaaaaaagcaaggacaccatggaccagagaggtgaagtaacctgctcaaagtcacactacttggaagaagtgggaagggtgggcacagttgctcatgcctataatcccagtactttggaagaccaaggtaggaggatgaggccaggagtttgaaaccaccctgggcaatgtagtgagactccatctctccaaaaatttacaagaaaaaaaaaaagaaggaaatgtgggcagtgaagccaggatgggaactaaaagatcagattcaagtagggactatacttcagcctctggctggtcctctggcacttgggcccctttcctcagggcatcatgccaaccttttcacctgacttctacagggtcacaggcacctacaaggtgacctgcatcgttcagttggctgcctctgggcagagatctagctgaagtcagtctgtgcctgtctgagtaggtcctgggccagacttggtccctgcctgcactgagcccccagactgttgggggaaaccaggcacacagaggccatcaacccaggaacacccctcctctccctcccacctcagggcctttgcacttattacctctgctaaaacaggcttttttttttttttgagacagggttttgctcttgttgcccagactggagtacaataatgtgatcttggctcactgcaacctccatctcctgggttcaagcagtcctcctgcctcagcctcccaggtagctgggattacagatgcctgccaccacacccagctaattttgtatttttggtagagacagggtttcaccatgttggtcaggctggtcttgaactcctgacctcaggtgatctgcctgcctcggcctcccaaagtgctgggattacaggtatgagtcattgtgcccggctcccccagatattctctgtcacctccccaggacttaaaaccctatcatctctaaaattatcttttttttttcttgttatcctctctgcttcccagtaagacagggtttctcaaccttttttttttatcatccacccctgcaaggagtctttttcagatttttttgtcctaattgccctcccatgaaatttgaatacctcagctatactatactatatatagtatatatagatatagatatgtataatatataatatatagtatatgtaaagtatatatatagtatatacagtactatatatactacatattgtgtgtatatatatggtatatatagtatagtatagctgaggtattcaaatttcatgggagggcaatacctatatactatatatactatatactctatatctccttatgtgctgtggccctgtggagagccacaaatcactgtaatgtctaagaatgcttcacttcacgccattggaggtgatcttaccaccattgagaatggactagaacataagctccatggaagccttgctcacggctgagtctccaatgccagcctcagtgcatacccctggtataaacagaagtccaaggagtctgggaacagaaaggagacattcatcccagaggttggggagggatgagcagggaagaggggactccaaaatggagtcctataggcttagtaggggttggttaactgaggaagatatggagtgaccagttaaaggacagtgttggcaaaggcaccagggcctgaagcactcaggagtatgtagtgtggggccattccaagtgggtggccaggactgttgaagcctcttgaagtattggaagaaggaccttgaaagtgatactagcctgggcatctcctaggggccaagtcaggagacccagttttctagtgtaggctctactacaaaccagcagtggaaacgtagaatgggcaggtgggttggccttgctgacttcatgggcctacctggctaggaatccatgactctcctgtggaggtcattagccattgcctgtcgccagtggccctacaaacccccacatggaagtcagctaccccactttcctcttaactcaagcagaggatgcagacaggcccttgggcctgggtctcctagaaacctttgtgacatcagagacctccctacaacccactcttaaacctcatcccctgcctaccatgccagcctggttaaaaccagtgggagccacccaaggtgcagtaggggcttatctctgcttttccagaccagggctgctctgcaatcctgtttatttatccagagcagccgcctgctgagaaaatggctctgtttatttccaagtgtgtcgtgtgaaccatgggctaaatatacccacgccaccgcctctccagcacccgccctggaacagcacgccccattttgctcatgctgtctccgcaaaagcaatccttagaatccacaccccttggaaatactactccccttccccaggaaaagaagctgaaatggaaatgaaggttgtcatgaccaggaacacatgagtggaagctggggcaggtgaaatgagaatgtttctatggcactgaaatgagaatgttccctccacccaggaatgactgtttctggacagtgaatgctttgtgcccttgtggggacagcgcctgtttactccaacccagccccagagctgaaaatttcctgtggctgccagccgtctacttcaggaaagttcccatcaagggagccaggcctctcccattttggctgcaaccccagtgtccctggtttcttgagagacatttggcctcttgggataaccagggccttctcctatgctcttcatagtgtggaactctcccccatcacagataagcctattttgtgactccacctgggtgtacttgggagcaacaaaatcaaacctcctgtaagaatatttttgtctgccaagacccgcagaggctagctaggatggagagggagacagggaagcatagccacggccctagtgccctcctttccccagatcctccacctcaaccctgctcccacattccttctcctggaaatccatcctttcagcactactgacaggacaggtccctccagcctccaacttcagggaagtgtcctgacatagcagccctccctttgaagctaggcagtcttgcagtttgatcccgactctgctatctgtttgctgagtgttccctgctttaaatatcaggcatcttatttgtgaaatgtggctcaaatctacatctcaggattctgatgaagatgaaatgggataccaatgcctgacatgtagtagacatgcaatacatttgttaactcatgtattctcatgtatttacagagcaagacactgttctgagcactgggtgtataggaacgagacaggacctctgccctcatcaagacacatctagtataggccgagggcagtggctcacgcctataatcccagcactttggggctgaagagggcagatcacttgaggtcaggagtttgagaccagcctggttaacatggtgaaaccccatctctactaaaaatacaaaaattagctaggcgtggtggcaggcgctactcggggggctgaggcaggagaatggcttgaacccgggaggcggaggttgcagtgagccaagattgcaccactgcactccagcctaggtgacagagcaagtcttcgtctaaaaaaaaaaaaagacacatctagtatggaagacacatcacaacaaaaacaaagtacagaatctagttatgagaagtacagcttaatgggggaaaaatgtggtgaggtggtgaggccgggcatggtggctcacgcctgtaatctcagcacttgggaggctgaggcagaaggatcccttgagcccaggagtttgagaccagcctaggcaacaaagtgagaccctgtctctacaaaaaatttagaaatattagccaggcatggtggtgtgtgcctgtagtgtggcagctactcaggaggctggggcaggaggatcatctgagcccaggaggtcaaggctgcagtgagccatgattgcgccactacagtctaacctgagtaacagagtgagacactgtcacaaaaatttaaaaattaaaaaataaagcactgagaagaaaagctggcatggtggtcattctgtgtagtgtagttcctgtaatcaggaggctgaggcaggaagattgcttgagtccaggagttcaaagtcagtctgggcacatcttttaaaaacaagaaaaaaaaaatggtggctgggcatggtggctcatgcctgtaatcccagcactttgggaggccgaggtgagcagatcacctgaggtcaggagtttgaaaccagcctgacccaacgtggagaaaccccgtctctactaaaaatacaaaattagccaggtgtggtggcacgcgcctgtaatcccagctacttgggaggctgaggcaggagaatcgcttgaacctgggaggcggaggttgcagtgagctgagatcgcgccattgtactccagcctgggcaacaagggtaaaactctgtctccaaaaaaaaaaaaaaaaaggccagatatggtggctcgtgcctgtaatcccagcactttgggaggccgtgggcggatcacttgaggtcaggagtttgagaccagcctggccaatatggcaaaaccttatctctactaaaaatataaaaattagctgggcatggtggcacatgtctgtaatcccagctactcaggagaatcgcttgtacccaggaagcaaaggttgctgtgagcccagtttgtgccactgcactccagcctgggggacagaataaaactgtgtctcaaaaaaaaaaaaaactgagaagaaaaatcaaggaaggtaaggggacaggcagagagagacgggggtggtgtactgttttagacaaggcagtcagggaaggcctcccctaggaggtgacatttgaggggagtcatggttgtgaaatgagggagtgaggcaggcgacgacctggggtcaggtgctccaggcaagcaggaacagcagactcctgcggcaggagacgttggaggaacagcaaggaggccagtgggactggagtgaagttcaggggacaggggtggggaggaggccagaaagtgttggagccagatcccactagaccttgctggccagagtaaggagtggggactttatttcaggtgtgatggaagccctgggaaggttgagaacttggagtgactgaatggagtgtgcttctgcaagggctgagattcatgggtcactgctctctactgccttaatgttgaggattccttcagtcaaattagcagctcagtgcacatggcattttgctaggtaccagggatacaaaaataaatgatgctgcccttctaagtgcaggagaatgctgctggagggcttccagtgttcttagaaagctctgtgtggagcatggactgagggggttgtcaagactggaagtgggccacggcaggggtcacaagtgagcaaattgataggtgagacctgaggccaactggagatggcatgcctgtcttgagggagcagccactcggccatttgggactggttggaaatgtaggcccagtgtggcagaggtcttggtagagaggcaagaaccagccagtaactcattcattttacacacacacacacacacacacacacacacggtactatggtacttccttttttttttttgaacggagtctctgtcacccagactggagtgctgtggtgcgatttctgctcactgcaacctccgtctcccgggttcaaacaattctcgtgcctcagcctcctgagtaactgggattacaggtgcgtgccaccacacccggctaatttttgtatttttagtagagacagggtttcaccatgttggccaggctggtctcgaactcctgacctcaggcaatccacccacctcagcctcccaaagtgctgggattataggcatgagccaccgcacccagcctggaacttacttctttcttacatatttctaggtgccagatgccagttttagattctggctccaccactgacacagctgggtgaccttgatccagtccctggaccctcagaggcacagcttcttggcctgtaaatggggagagacagcctgcattgcagaattgttgggaggattaaaggacaaattgggtactacgcttactcataaaagttatgttctaagcgtccttctccctgccccacaggctgctgcaccctgggctgggtaatttagcccacagctcctccttccccctgtcatgtgcttcccttctgacttagattcagggcagagggctgttgatcacaacctcctgggcccagagtcacaccccctgcagtggaggatgtccgggacaaggcctcacagaccccgtgatggaggcctgtcagtcctgcatcattgttaccctctctcctctgccctgctcttcttgtcaccaacctgcccaccagaggctccctccagagggaggagcctctggctgaagtcccaggacccattctacccctgaattggcctcaaatgaccctggggatttagccctgggcttccttatccctccctctggtgcagcagtagaaaatctgaggcctagtggctccacactccacactaccctcagactcaactctaggctccttgcggcttccaggccacgtatggtctggctcttgctcacccctgcaccatcatctcccccatgccctcctctcctgcactctgctccagccacctggcttccatcagttccctgaccctgcccatctcgttcccaccttggattctggagtaagtgctacttcttgacttacctcagacagggcactttcctcctctctacctgtttctcagcagtaacatggtttgattatcaccaatggagggtcaagaaagaggaccacccttagccctttacctggcccagagtgggcacagatggctacagtttttcacatcaccaaggccatagcatgcagatggcccctttccccacccacctacatcactctctgaggactaaaactgcaccttccttctctctccctgcaggatacttttgtggaactctatgggaacaatgcagcagccgagagccgaaagggccaggaacgcttcaaccgctggttcctgacgggcatgactgtggccggcgtggttctgctgggctcactcttcagtcggaaatgaccagacactgaccatccactctaccctcccacccccttctctgctccaccacatcctccgtccagccgccattgccaccaggagaaccactacatgcagcccatgcccacctgcccatcacagggttgggcccagatctggtcccttgcagctagttttctagaatttatcacacttctgtgagacccccacacctcagttcccttggcctcagaattcacaaaatttccacaaaatctgtccaaaggaggctggcaggtatggaagggtttgtggctgggggcaggagggccctacctgattggtgcaacccttaccccttagcctccctgaaaatgtttttctgccagggagcttgaaagttttcagaacctcttccccagaaaggagactagattgcctttgttttgatgtttgtggcctcagaattgatcattttccccccactctccccacactaacctgggttccctttccttccatccctaccccctaagagccatttaggggccacttttgactagggattcaggctgcttgggataaagatgcaaggaccaggactccctcctcacctctggactggctagagtcctcactcccagtccaaatgtcctccagaagcctctggctagaggccagccccacccaggagggagggggctatagctacaggaagcaccccatgccaaagctagggtggcccttgcagttcagcaccaccctagtcccttcccctccctggctcccatgaccatactgagggaccaactgggcccaagacagatgccccagagctgtttatggcctcagctgcctcacttcctacaagagcagcctgtggcatctttgccttgggctgctcctcatggtgggttcaggggactcagccctgaggtgaaagggagctatcaggaacagctatgggagccccagggtcttccctacctcaggcaggaagggcaggaaggagagcctgctgcatggggtggggtagggctgactagaagggccagtcctgcctggccaggcagatctgtgccccatgcctgtccagcctgggcagccaggctgccaaggccagagtggcctggccaggagctcttcaggcctccctctctcttctgctccacccttggcctgtctcatccccaggggtcccagccaccccgggctctctgctgtacatatttgagactagtttttattccttgtgaagatgatatactatttttgttaagcgtgtctgtatttatgtgtgaggagctgctggcttgcagtgcgcgtgcacgtggagagctggtgcccggagattggacggcctgatgctccctcccctgccctggtccagggaagctggccgagggtcctggctcctgaggggcatctgcccctcccccaacccccaccccacacttgttccagctctttgaaatagtctgtgtgaaggtgaaagtgcagttcagtaataaactgtgtttactcagtgaacaaagagcctgggctcttgtgtgctccgggatggggaaaggaggggccgctggagagctgggtactggtcctggctctgctgccctcaggggagggccttggacaagtccttccttccttctgggcctgaatttatccacctgtacggtgacagggttttactgggtacatgctgtgtgctgggcactggggctgcatgtgaacaggacagacacagtctctgccctcaggagctgacattctagtgggagacacagccacttggcaagtgtttactgagctctgctctacacagacatagtcctgggcactggggacttcttcaaacaaaacctttgcctttacaagcattcattctagtggaagagacagacataagcacggctctagctgctgtagggtgtgggggaaaggtgtgatgcctttcctcacccatcagaaggttctgtgactgacattcctataacaaaagaaaaacaaagtggcagttcacaccctgtaatctcaatactttgcgggtgggggatgggttgcttaaggtcaggagttcaagatcagcctgggcaacaaagtgagaccctgtctctacaaaaaaatttttaaattagccaacccagcaaggccagtccagattcttcttggcctctgtgtagcattccttcctctcctgtacaggagacaagacataggtcagagtatttatttgttttttaagagggtcttgccccgtcacccaggctggaatgcagtagtgtgatagataactgcagcttcaaattcctgggctcaagtgatcctcctgcctcagtctcttgagcagctgaaattacatgtgagtgccaccaagcctggctaattttcaaatttttttttgtagagatggggatcttgttatgttgcccaggctggtctcgaacacctagcctccagtgatccccatgcccagccgagaatttgtggccagcttctacacagtagagcagaggaaggttacagtaatatttctgtgttttagcggatcacgaggtcaggagatcaagaccatcctggcaaacacagtgaaaccccgtctctactaaaaatacaaaaaaaaattagccgggcgtggtggtgggcgcctgtagtcccagctactcgggaggctgaggcaggagaatggcgtgaacccgggaggcggagcttgcagtgagccgaaatcgcgccactgcactccagcctgggcgacagagcaagactccgtctcaaaaaaaaaatatatatatatatatatgtgtgtgtgtgtatatatatatatatgtgtgtgtgtgtgtgtgtgtgtgtatgtgtgtgtatatatatgtgtatatatatgtgtatatatatgtatatatgtgtatatatatgtatatatatgtgtgtgtgtatatatatatatatatttctgtgttttatgagttgctttggggagaggagttctagtttctatgacccaccttggggaagaggaatgaatgctagtttctgttacttgcttcaggggagaaagagaaatgggagacagcaaggcaggagaaagtcagagatcttgtttctgaggcctttcagcctcctttagttcaaagtattcggtatgccaaagtgccatactttggggtattgttttctaagccccagtaagggcaaaggaggaaaaagcaacgaccatgaggaagcggtttggtcttctaccaagacatgaaggacttagtagagaaggaggtaagaaggggtcagacttcagatttttaaggcacatcccacaggatttcagatggagtagagatagcttcagagagactcaaggatgacagatttttagaatagtgatgccattatagatacaaaaatgaagtgcatgtttgaagccagtgcaacccaagagactcatagtaagtgcgatctgagctcgtctgggaatcaggagtcagggagggctccctggaggaattgacatgagagccagggcctgaagagtgcatcacggttaacttaaaattaagtggggaggcaggagagtgggcctggggaagaagcagtaaatgcaccagatgagcaggcattgtcttcaggctgaaaagctggtgtgtccagagctaagagagagggcgctgctgggtttaagatgatgacagagggtggggtgagaggactgaacttgatcctgagggcagtgacagccagagaaaggtggtaagttagggagtgatacagcccgagagcccccaaaactctggctgatgggtggagaaggttccggagggggaagcagagtggaaacaaggagatcagtgaggaagccatggtttcatgaatgctccggttttgaggatggacagccagatttgtgtcccgggtcgtcatttctcgagccgtggcttccagtgagtgagttacctactctctctgtgccccagctttcccctctacaaaatgggtgtgatgggcaattgaatgagataacctagaagcagtggaggaggactggatgttgagggtgaccgcggggatggactcggcattcccccgggctctccaggagaagagaggaggtgctgcactctcggagtcccgcgtggccgcgtccagcggtccaggaggggtctgggaaaagcggtcaggagctccagctggagggcaggcctggaggtgggacatgccccaggcgccccgccccgccccgccccgcccgcttttcggagtgggcttcactgccccctggtggccacaggatgcgacctgagagccagccccagctcaagctgctcccgctcagtgcacacgacctctctcgccggggggccactttccccaatgtcctccatcctctaccctactcaccagaaaaacagctacacttccaacccttaggtactggattcagagcttgtatgggctctctggagcttagaatcgccatcttgtttggttcaagaccaaagcctccagcctcccactcacgccttcccccacgatgtgtcctcagctcctgcccctagccatagccgttcaagtcccttcctcacattctccatgtgcttccagaaatgtcttcactcgctcttttatttatttatttatttattttttattttttgagagagggtctcactctgttgcccaggctggagtgcagtggcctgatcatagctcactgcagcctcgacttcctgggctcaggtgatcctcccacctcagcctcccactgtgactacaggagcacgccaccatacccggctaatttttttgtatttttgcagagacagggttttgccatgttgcccaggctggtctcgaactcctggtctcaagccatcacttggccccggcctcccaaagtgctgggattacaggcgtgagccactgtgcccagcccagaaacattttttcacatattggcacagatatatattttgatcctccactaattttttacacaaatagtaacatactaaacacactttcccttgctttttccacctgcatactgtatcttgtagaggttttttttttttctttgagacagagtctccttctgtcgcccaagccgaaagtgcagtggcatgatctcggctcactgcaacctccaccttcccggttcgagaattgcaatctccaccttctgggtacaagcaattctcctatctcagcctcccaagtagctgtgactacaggcgcacaacaccacgcccagctaatttttgtgtttacccgacctcaggtgatccatccaccttggcctcccaaagtgctgggattacaggcttgagccacctagcccagccttgtagaagtttccatattcacacatgaatccccatgtactcaccaggcagtttcaacaattaccaactgatgtcaactttattctttttttctagctgtgtggtattccacaagtttttaaccagaccgctcagtgattcccaactttatatattgccatggaacatgcttggaattgcacaaagggaaagctggagggggtttgggactctctatgtggttcttggtgaaaaactcattcaatttccatatattacatatttatgatgaaagaaatgaaatatatttcatagagaaaatatgaagttttatctttgattaaaacatctaaatacataaaatattttaaaattttttctttaaaaacttgactttggtcctgtaaatgcaactttttatatgaggttttattattgaaatggctcggccgggcacggtagctcacgcctgtaatcccagcactttgggaggctgaggttggcggatcatgaggtcaggagttcgagaccagagcctggccagcatggtgaaaccccatctctactgaaaaaaaaaaaaacagaaaaaattagccaggaatggtggcgtggtggcgtgtgcctgtaatcccagctactctggaggctgaggcaggagaattgcttgaacccaggaggcggaggttgcagtgagccgaggttgtgtcactgcactccagcctgggtgacagagcgcaactccgtctcaaaaaaaaaaaaaaaaaaaaaaagagaaagaaagaaagaaatggctcacgcagggctcagcatggtggcttatgcctgtaatcccagcactttgggatgccgaggtgggaggatcgcttgggcccaggagttggagaccaacctggcaacatggtgagatcacttgaacccgggtgaaaccccatctctactaaaaatacaaaaattagctgggcgtggtggcccacatctgtagtcccagctactcgagaggctgaggcaggagaaatgcttgaaacagggaagcagaggttgcagtgagctgagattgtgccactgcactccagcctgggccacagagcaagactttatttcaaaaaaaaaaaaaaaaaaaaaaaaaaacagaaaaaaggagacattataatctcaagtaggaaataagagaaaaatgtaagccattccaaagcttactattgaaattatatttaaacattctaatagctcttcctttctataactgacaaattaatgtcaatatttcttgtattcagttggatttgaaatcaatccaaatgtacgttttcattttgaatattttaaaataatgagttcagaaaacaggaaaagatataaatcttttaaactcttctttctttctttaccattataactgttattaaaactgggcaaggctgccgggtgcagtggctcacgcctgtaatcccagcactttgggaggccaaaacaggtggatcacgaggtcaggggatcaagaccatcctggctaacacggtgaaaccccgtctctactaaaaatacaaaaaaattagctgggcgtggtggcgggcgcctgtagtcccagctactcgggaggctgaggcaggagaatggcatgaacctgggaggcagagcttgcagtgagccgagatcgtgccactgcactccagcctgggttacagagggagactccatctcaaaaaacaaaacaaaacaaaacaaaaaaaactgggcaaggctgtacagcaccaaggaagagagaggaaggaaggaaagaagggagagagtgagggaaacacagaaggaaagaaggaagaaaggaaggaaaagaaagggaattattggtcactattacttatgaacatgtatgccaaagttataatattaataaaccaaacctaatattaacaaacaacataatattaaaagaataatatatcacaacctgtagggtttattccaggtaaacaagattgactacatataggaattttttctttttgctttcttttttttttttgagacggagtctcactctgtagcccaggctggagtgcagtagcgccatcttggctcactgcaacctctgcctccaaagttcaagtgattctcctgcctcagcctcccaagtagctggaattacaggcatgcaccaccatgccaggctaatttttgtatttttaatagagacagggtttcaccatgtttgccaggctggtcttggactcttgacctcaagtgatccgcctgccttggcctcccaaagtgctggaattacagacgtgagccaccgcacccagccaagaaatttatctatgtaatttattgtattgaaaaattaacaaagaaaatgcttatgattatttcaggagatatgaaaatagtattttgtaaaattcaacacctgttcatttttttctttttttttgagatggagtctcgctctgttgcccaggctggagtgcagtggtgccatcttgactcgccacagtctccacgtcccaagttcaagtgattctcctgactcagcctcctgagtagctgggattacagatgcccgccaccacgtccagctaatttttgtatttttagtagcaacggggtttcgctatgttagcgaggctggtctcgaactcctgacctccggtgatctgcctgcctcggcctcccaaagtgctggggttacaggcatgagccacggtgcccagctaacacctgttcatgatttattaaatttaaaaaaaaaaagctttttagccagctttcacttctttatagtcttctgggtctatagaagtttaagataataattttgtgtattgcttgtgcaatgttttttttttttaaatagagacagggtttccttatgttgcccaggctggtctggaactcctgggctcaaatgatcctcctgcctcaaccccccaaagtttagggattacagatgtgaaccactgtgcctggttcacttgtgcaatttttaaaaattgacaaatcacgcagaaaaaccagcaacttatgtcatgatcaaatttattacataggccaggtgtggtggctcacacctgtaattccagcagtttgggaggctgaggtgggcagattgtttgaacccaggagttccagaccagcctgggcaacatggcaaaaccccgtctttacaaaaaaatacaaaaattagctgggcatggtggcacgtgcctgtattcccagctaatagggagcctgaggtgagataatcgcttgagaccagaaggttgaggctgcagtgagctgtgatcacatcactgaactccagcctggatgacagagcaagaccctgactcagaaaataaaataaaatcgactggccgcggtggctctcgcctgtaattccagactttgacaggctgaggcgggcagatcacttgaggtcaggagtttgagaccagcctggccaacatggtgaaatcccatttctactaaaaatacaaaaaaaaattagctaggtgtggtggcgcgcacctgtaatcccagctactctggaggctgaggcaggagaatcgcttgaacccaggaggtggaagttgcagtgacctaagatcacgccattgcaccccagcctgggtgacagagctagaggctgtctcaaaaaaaaacaaaaaacaaaaaaaaaaaacacacacacacacacaaagtacaataaaataatgtattacataatgcccagctttctatttttctatctctaccatcatagcctttgtcatgaggcaaaaataacaagaactatttcttactatatagaaaataatagaaatgggccatgcgtggtggctcgtgcctgtaatcccagcactttgggaagccaaggcgggcagatcacccgaggtcaggagttcaagaccagcctggccaacatggcaacatggtgaaaccccatctctactaaaaatacaaaaaaattagctgggcatggtggtgggtatctgtaatcccagctactcgggaggctgaggcaggagaatcacttgaacccaggaggcagaggttgcagtgagccgagattgcgccattgcactccagcctgagcaacaatagcaaaactccgtctcaaaaaaaaaaaaggaaagaaagaaaaagaaaataatagaaatggctgggcatagccaagtgcggtggctcacgcctgtaatcccagtactttgggaggcagaggtgggcaaatcacctgaggtcaggagttcgagaccagcctgaccaacatggagaaaccccgtctctactaaaaacacaaaattagccaggcgtggtggtgcatgcctgtaatcccagctactcgggaggctgaggcaggaggatcgcttgaacccaggaggcaaaagttgcagtgagcaaagatcacaccattgcactccagcctgggcaacaagagcaaaactccatctcgaaaaaaataaaataaataaataaaaatcaaagaagacctacatttatatagatcatatatgttcatttctttctttctttttttttgagacagagtctcgctctgccgcccaggctagagtgcagtggtgcatcctggctcactgcaacctctgtcccctgggttcaagtgattctcctgcctcagcctcccgagtagctgggactacaggtgcctgccaccatgcccagctaaatttgtatttttactagagacagggtttcaccatgttggccaggctggtctcgaactcctgacctcaggcgattcgccagccttggcctaccaagtgctagtattacaggcgtgagccactgcgcctggcctgatttttaattaatatgcacaaactcacatgagaattctgaccatgttgagtattctctcctgaattatttaagccatctcatttcaataaattcacatataaataattagttttaataatttcattatagagagtcttgtgaattcttgaagttcttaaatgaaatttaaatggccatattacgaactgttaacaagtcaatgttaaaatttgaggaactcatttttaaaatactaagataccaagaatgtggacataaagcaagaaaaagtttttctgaatatgaaatagaaaataatataaacataacatagtggcctggccaacgagatggtttgtaaatttgttgctgaataggaaatgaccagtacccacgtcaacaagtgcccacgtcaggctctaattgcactgatgtaaaaaacaagccaggcatggtggctcatgcctgtaatcccagcactttgggaggccaaggtgggcggatcacctgaggtgaggagttccagaccagcctggccaacatggtgaaaccccgtctctggtaaaaatacaaaaattagctgggcgtggtggcaggtgcctgtagtcccagctactcaggaggctgaggcaggagaatcacttgaacccaggaggtggaggttgcagtgagccaagatcacaccattgcactccagcctgggcaacaagagcaaaaactccatctcgaaacaaacaaacaaacaaaaagctggacgtggtggcttatgcctataatcccactttgggagactgacgcaggaggattgcttcagcccaggagtttgagaccagcctgggcaacataccaagactccatccctacaaaaaaaaaaacttaaaaaacaaacaaacctcccccagaaataactgctatgattgcactgtaaaaataataataataaattaaaataatgatagggctgtagtttacaaaccatttatgaagtggaacatccctccgcagctgtttggctgtccccaaaagggtatatcaatcttacctgaactttgtgccaagctctctgggcacctggaaaacaaactgtagagggtaggtggatggccattctccacagctgaccactacagtagaggtccagaaacgaagaggccaaccgtggccaagctcagctcatgctggtggagcagcaggggaccagagaaaggatagtgtaatggtttggagcaggaccctgaaacgagactgcccaggggaggcaggtgcccttggacaagtgacgtaacctctctgttcctgagttttttgcctaaaaaataggggtgctaatcatacctacttcatgaggtagttacacaggtttaatgctcgtaaagtgcttaaggatggtatctggcactgtaagtactatttttttttttttttttttttgagacggagtctctctg

SEQ ID NO: 742 - DNA, 2598 bp, Homo sapiens
cgcgcactccctttgcgtctcgggctcgcgcgcgttgccgcggcaccggaagtgactgagcttgcaagttcccctgtctcttcaggggaaactgaggccggcttgttcgggagagacggcgcgagcagtcagccaggtaggccggcagccaggtaggccggcccgggtccgcggcgcggaactcggccgcgaagagctcttgcgtctggaagctaccgggccgatgaagggggatgtggccccccacggctcgcggggctcgcaggaagctctttctctcccttcagaatcttatcttggctttggatcttagaagagaatcactaaccagagacgagactcagtgagtgagcaggtgttttggacaatggactggttgagcccatccctattataaaaatgtctcagagcaaccgggagctggtggttgactttctctcctacaagctttcccagaaaggatacagctggagtcagtttagtgatgtggaagagaacaggactgaggccccagaagggactgaatcggagatggagacccccagtgccatcaatggcaacccatcctggcacctggcagacagccccgcggtgaatggagccactggccacagcagcagtttggatgcccgggaggtgatccccatggcagcagtaaagcaagcgctgagggaggcaggcgacgagtttgaactgcggtaccggcgggcattcagtgacctgacatcccagctccacatcaccccagggacagcatatcagagctttgaacaggtagtgaatgaactcttccgggatggggtaaactggggtcgcattgtggcctttttctccttcggcggggcactgtgcgtggaaagcgtagacaaggagatgcaggtattggtgagtcggatcgcagcttggatggccacttacctgaatgaccacctagagccttggatccaggagaacggcggctgggatacttttgtggaactctatgggaacaatgcagcagccgagagccgaaagggccaggaacgcttcaaccgctggttcctgacgggcatgactgtggccggcgtggttctgctgggctcactcttcagtcggaaatgaccagacactgaccatccactctaccctcccacccccttctctgctccaccacatcctccgtccagccgccattgccaccaggagaaccactacatgcagcccatgcccacctgcccatcacagggttgggcccagatctggtcccttgcagctagttttctagaatttatcacacttctgtgagacccccacacctcagttcccttggcctcagaattcacaaaatttccacaaaatctgtccaaaggaggctggcaggtatggaagggtttgtggctgggggcaggagggccctacctgattggtgcaacccttaccccttagcctccctgaaaatgtttttctgccagggagcttgaaagttttcagaacctcttccccagaaaggagactagattgcctttgttttgatgtttgtggcctcagaattgatcattttccccccactctccccacactaacctgggttccctttccttccatccctaccccctaagagccatttaggggccacttttgactagggattcaggctgcttgggataaagatgcaaggaccaggactccctcctcacctctggactggctagagtcctcactcccagtccaaatgtcctccagaagcctctggctagaggccagccccacccaggagggagggggctatagctacaggaagcaccccatgccaaagctagggtggcccttgcagttcagcaccaccctagtcccttcccctccctggctcccatgaccatactgagggaccaactgggcccaagacagatgccccagagctgtttatggcctcagctgcctcacttcctacaagagcagcctgtggcatctttgccttgggctgctcctcatggtgggttcaggggactcagccctgaggtgaaagggagctatcaggaacagctatgggagccccagggtcttccctacctcaggcaggaagggcaggaaggagagcctgctgcatggggtggggtagggctgactagaagggccagtcctgcctggccaggcagatctgtgccccatgcctgtccagcctgggcagccaggctgccaaggccagagtggcctggccaggagctcttcaggcctccctctctcttctgctccacccttggcctgtctcatccccaggggtcccagccaccccgggctctctgctgtacatatttgagactagtttttattccttgtgaagatgatatactatttttgttaagcgtgtctgtatttatgtgtgaggagctgctggcttgcagtgcgcgtgcacgtggagagctggtgcccggagattggacggcctgatgctccctcccctgccctggtccagggaagctggccgagggtcctggctcctgaggggcatctgcccctcccccaacccccaccccacacttgttccagctctttgaaatagtctgtgtgaaggtgaaagtgcagttcagtaataaactgtgtttactcagtgaacaaaga

SEQ ID NO: 743 - protein, 247 aa, Homo sapiens
AGVLDNGLVEPIPIIKMSQSNRELVVDFLSYKLSQKGYSWSQFSDVEENRTEAPEGTESEMPSAINGNPSWHLADSPAVNGATGHSSSLDAREVIPMAAVKQALREAGDEFELRYRRAFSDLTSQLHITPGTAYQSFEQVVNELFRDGVNWGRIVAFFSFGGALCVESVDKEMQVLVSRIAAWMATYLNDHLEPWIQENGGWDTFVELYGNNAAAESRKGQERFNRWFLTGMTVAGVVLLGSLFSRK

SEQ ID NO: 744 - DNA, 32847 bp, Mus musculus
  misc_feature (1)...(32847): n = A,T,C or G
gggctttcctatctgtctgtcaccgtcagcatcacacgagcttcggcttttctagatgctgtgtcaggtgagggagttccccacttgccccctccagctccctcacgctttcctcccccctcccacttccttttcctgtccccccattctttgatagagtctctgttaagattgcctgaaaactcgtggttttctgcctctgtcttctgagtgctggaatctcaggtatggcccattcttttttgtgtgtgttttgcggtgaactgatgtgggattacgtcacacgtcttttctgtgtgtgcttagattactgcccgttgaggtcatcgtgtggttttgttttgtagggggggtgggagggtgtgttagtcactggttttaaagggaagcttggcctggtgttggttcatatgtgtctaaggcagtttgcctgttgtctgtggacagtttttaacctctggattctgagacgtcagttggtcattttcttaggatgtctttttgcagttccagggacactggcttcatggagtgaatcggagctgtgtcctgatagagaactgggcttcaccctccctaagtgtctggcccaatccaccactgaagcctcccaggtgtttggctcatgtcaagagaattcactagtgaagctatctgggcctgggcccttttaagggaagttttaagatgactaattcagggcctgcagagatgaatcagtggttagtaatacttgcagctcctcctgaggaactgaatttgatttacagtacccatgttgggagtcacatgacctgtaactctggctccaggtgatcggagactgtttttttgttttccaggcacagacatacacacacagaaaaatttactgatttaggaccaacaagctggctcagaggataagggtgcttgctgccaagcttgatgacctgagttcagtccccgggacccacatggtagaaggagagatttgaaccccacaggtggtcttctggggggtgaaccttaaacccaagactccgtactcttgtaatagattctcactatgtagctcaggctgccttccgggtcctccagcctcagccaccagagtccagggatttcaggcatccttaccacagccggctcctctaattcctacccgagtaacctgagctgctttttttgttgttgctgttgattggttctgctccgtcatggctggaatcacactttgtgtgatttgatttctaaaggcattgagccctgttttctggcatagcatatggtctgacttagacagtgttcgtgcgcactgtgcacacttgaggagcatgtgggtctggtgttcctgggtggctgctctgcttccatttgccttttgtctgaggagttttgtagtgagtaaggctccctcagtttgcttttccggtgaactgtctgtggttttgtttttttttttatttttatcttacgtgagctctttatatattaaaaacccttgtttatcatatgagttgcaatttttttttctggtttaaatttgtttatcaagctaggcagactttttttctttaggcagggtctttttgtagttcaggatggccttgaattcactatcttcttccccctgcctctttttttttttttaaagattatttatagtatgtatatgaatacaccgtcatggtcttcagacacactagaagagggcatcggatcccattgcagatggttgtgagccaccatgtggttgctgggaattgaactcaggacctctggaagagcagccagtgctcttaaccgctgagccatctcttgaatgctgggttgacaagtgtatgcttccatgcctgcctatattgtaatgttttgttttgtttgggggggggcgtgttgagacagggtttctctgtatatccctggctgtcctggaactcactttgtagaccaggctggcctccaactcagaaatccgcctgcctctgtctctcgagtgctgggattaaaggcgtgtgccaccacgcctggctattataatgtttttatatggactgatttatcttctaaagaaacttaagtctttaaaaatattacttatgctaggcatgatggtgcatacctttaatcccaacactcaagagacagaggcaggaggatctctatgagttcaaggctatggtctaatggtctatctaaatggtaagttttaggacagccagggctgcctggacaagagagactttatctcaaaaataaaataaaataaattttgcttgtttgtttgtttgtttggttttggtttttcaagacagggtttctctgtatagctctggctgtcctggaactcactctgtagaccaggctggcctcgaactgaactcagaaatccacctgcctcagcctcccgagtgctgggattaaaggtgtgtaccaccacacctggctgtattttgttttttaattatgtgtctgtgtatgggtatatacccattagtacaggtgcctgtggagacccctgaaatgggttacaggtgtccgtggactctctaagtatagatgtgagaaacaatgcaaggcctccagaaagcactgcatattctttttttttttttttttttttattttattaatatatgtaagtacactgtagctgtcttcagacactccagaagagggagtcagatcttgttgcggatggttgtgagccaccatgtggttgctgggatttgaactctggaccttcagaagagcagtcgggtgctcttacccactgagccatctcaccagccccgagcactgcatattcttaacctctgagtcagtcctctctctgttcaacagaacgtagatcttgtctctccagcctccatccatacagacggtgatcctgactccttttcctgtccttaccttagtgctggatgaggcattgggaggtctctgtctgatggtgagagcaatcagagaggtcagaggtcagggcaggtcttccgtaggcatgatgatatcagcacgtctcaattgcttcctacctcctgagcaccttgcaaatagcactgccctgtgtcttccttaccacaaactcatttgagcagaaactaccatgtcattttggaggggtaaactgaggcctgcctagtccacgtgcctaggcaaagctgagctggcccctgccctggcattgtggccccaggccttttgatgcctgtgatgccttgggcagtggggacatcttcgtagtgggcagcacccggaggcacatctggcacccttcatttcctctgttgctgtgggccaggttgtggcttctccattgctgtgggacagtcgagagtccctggtgagcaccagcattgtgtctggcccttccgacccttcttgcactgttcctccgttctctgtaagggcagagttcatcagaaaccaattcttccctgccacacagtctcttagttccagatgtcaggctagtataatctcctctgtcgtatgtatgtatgtatgaatgtgtgtatgtatgtatgaatgaaggatgtgtgcatgtgtctgtctgtctgcctgtctttactgtggtgttggagatggaactgagggctcatgagtacagggaaccttcctctgttgaatcatgcataccccagcccatgcccatttgaaaggtgggaatctccgagggcaccatggcaagattcagttagatgcaaacccgtgccccactccggtgaaatctttatcacagtcccaccacacctggttacattcaccctgagaagaggaaacatggtttcaggggaggactgctttgagccacctagagacggagtctggagtcctgggcagtgggagccgtactcagcgcacatcagtggactctgggccatccacttagtcctcaccacaggggattgtgggatgctcctgagtgcatctcttaagtactcagtggcccttggctgcttgcctcatgagcacaagacctcaggtttcatccctggcactgtagataataattattatcacgagaaagcaacttccagctgtcacctgatgcagggtctaaagtaaaaggggactttccttctccagaccaaccccttgtcagatgaagcattgtaaagacttggggattctcccagaaatttctctaagtctccagtgtgtgtgtgtgtgtgtgtgtgtgtgtgtgtgtgtgtgtgtgtgtgtgtgtatctgtctgcacacacacatatgggcaaagcaatcatactacagcagtagtagatcctgcttgccagagcagagcccagcgcctgggttatctccacccctgacgaccctgtggtggctttagagggtgggcaggaggtgacaccaaggctgtgtctttgaggatggcggagccctggcttgagggctggggctgggttgagacaggttgcatcagaggaaggttgtggagtttcctcaggattccatgctgctgcagctagcacccagagccagcattctgcaagaatctggtgcaaggctgagctgtgcagggggtagggcagagttagggagatgctgagttaggcagaacctggtctattgggtctggggcgtggcagggaatatggaagcctttgctgtcctgaaatgtcaggcaccctacccacgggaaagtgctaccttccttttgggacctcagtttatattcttcactgcttccctttggccctcaaggacctatctctacctcagaacttgtaagcagcggaagaaatggaggctccctcaagtgggtgactcacggtgactgggcagaagtcacacccctactccagggaagcgtgaagtctgggtctcagttccaggagagacactctccaaagggagcctctactttaccctgtatgagccccccccacacccaaatactgctaaggtccttgttggtgcactccccagctgctggagttgggacagagtgggagggagaggtcctaaggagccccgagttcccatcagacccctcaagcagccgcttttcctgtttgccctgtgtggctgtggccacaaccaccctcgtcttttaattctcatgctgtgtgacgtcgggcaagttcttaaacttctttgtgcctgggcctctccatcagtgaactaaggatgctgttaatacccacattctggatgcttgtggggattcagtgttttcaaagagtttagagtggggcacagcgctcctggagggtttagacatggacacctagtggtcgctgtaatgtgaccctttcagtgtctaagcagggtgtagctctgtatggctgtgctcagtcttctatttaccttgcaaatgtttccagaacagctggtaacaacctgtctattatgggtgctgttcagggtgggagcctggatctaagaaccttggtccatagtcccctcatagacagcagttcccaagtccacttggtctggttaccatcctcagaggctggtacaggccctccaagtgttcctctcatccgttccctgtggacctgtacatagaggttccacaccgcagcctgcagcagcctgctgggttcttagagatctccactcacatgaagctgcagaaaagaattccaggatgagtcggtataaagcagagttgagtttattaagaaggtagtttaggggagctgaagaaatggctcagtggttagagcactggctgctcttccagaggacctgggttcgattcccagcacccacatggtagctcacaactcctgtaacaccagttccaggggatccaacaccctcacacagacatatgtgcaagcaaaacactaatgcacttaaaaatatcacttaaaagacaaaggaaagaaaaaactgtagggctcggtctgggaaagataaggtcaagaagcaactgtggaaggtcctcatgccagcgtctggcttcatctcatgtgtacacagaaacatgcacacacatgccaacacacacatcaaagtgtgcaaccctcgggtacacagaagcatacatacctcttgagtgcgtgcacacacttacaaacagacacacagagatgtaatcctggggcttaatagaaagagaggtgcatatgaaagggaaaggacccccagatgctagtgggacttcggaagccccctagactcttccctgtagctgtgtataggattttggaggcttttggaattatactgtttctaaggaaccctgcctcgtttgtctctcttgtactttgcctgttccctgcccccttttttctacgataaggtctcacctggttggccttgaactcactgtgtagaccagactggctttgaactcagagaaatctgcttgtctctgcctcccgagtgccagattaaaggtttgtgccactaagaaaagatctattttgtgtgcatgtatgtgcacaggtgtgcacggatgtatgtacctttgtccctggaggccgaaagagggcattggctccctccatctcagagtttcaggcatttgccagatgccaggcttgtcacgtgggtgctgggatttgaacctgtctaaaccactggggcatctttctagcccatttccctcccagatgagatcctggggtgattgtgggcaccctggggaggattacagagtgttggtgagaccatgggccaagcgggtggaacaagggcctctgcaaacaggatggagattcttagaaagtggcaggtttagccggaaaaggagaatgaatggtcacactcaaaggtcgtgtaatcttgggccttagccatagttcgttgctagttaagtatttgttattgtgtgtgcttgatgtgtgtgtatgtgtgtgcgcacacgcatgtcacagcatgtgtagaagtcagaagacaactttggggagttgggtccctcttcattgtggttgtcaggctccacagggccgttgctggctgagccatctagctggcccaactttggtccttacttgaaatacccctgtatagaaggaatcttacctacatcggcaggatccactgcatgtgctgggattcctgactcttggctggagagagactcgggtagtgtggctgagggttcctttactctcccacaatcccttgatgtgtcccgtgtctctgaccaccctcacactgaaggtgcagaggaatgtctgctgcagccactcctgggctgccccctgacctagccgccttttcaaacaccctgggtctgcatggcaggtattagccacagacctcttccacagacaactcctaccccagcccccacaagccagcattgtagccatggccctggtacctctggcttctccttaaaggcttcactttacccttctgtgtattggggaggtacctgcttcccttggttggtgtaaggtctcaagcccagggactgtatcctcaaaagatgtgcacatatcttcaggtctggctctccctcttcaggcagggagcccattcttgattccctccagcgacaggggacacaccatgtacagttttgttcttgttcattctagagaaagctcttgcaaagtaattctttgtatcttgtaaataggtttcactttaaaatctgttttcatattttttatggtttctcagtgtccttctgaagtcaaggacccgatgttcaggaattatacagcctcaaggaggtggggtggatggactggactgcggggaaacccatctgtcagcagaggtctcaggacagtgctgatgggcactgtgacctgagggatgggttaccatggaaacaggacttccctgaatgcccactgctggacagaccctcaggaatatctagtgacccctggagccattgggcaggtctccccagcccacattctctgaggctgggcttcatcctgagccacaccccagtctgcagctctgagggtataggactgactgctacaccagggtccccatgggtaggagccacagagcttgctaccgagtacaactgaagagtcttgttcctctcagggttctttttttttttttttaagatttatttattttattttatgtaaagagggcatcagatatcattacagatggttgtgagccacaatgtggttgctgggaattgaacgcaggacctctggaagagcagtctgtgctcttaaccactgagccatctctccagccccctgtcagggttctttctttgagagatctggtgccaaggcctcctgcagcccagaagagtggttggttcctccacaacccctggtggcacatccagaacacattccagtgactgctagtgtgcaggactttggccccatttggtcttgtcatggctctgtcacataagggaaagacatggtacaggggacgatagccacaccagtgtacaacttgggaattgggctccagagccttccaaactgccgtccatctgacttcctctcactcacaggatctttgggaaggtcaaagggcattttggcgggatcctgatcctctgtgtgagagtgtgtgagagctctaatggttttcatgtccacaccccacagcatctctgcaggtgcggatgttgcgacccagggagagggagcagcttgcctagggacacggagcaggagaggtgcaacagggtctttaggccaagaccccggatactacagctggtgtctgcaccaaggccccagtctgctccccagatccactggggtagctctgctacctatcaggtgagcagagatgggagaggggagccccagcccagcttcctgggttgggcacggatgtggaaggtagcaggcatcgggtggcatggggcctttcacttggtccctctgtgtatccaggtccctggacctctcagacttgctccccctgctcatcatttggttgtttgttaagcacctgctgtatacctcactccgtgcataccaggagcaattcatgaattaaaagaagagggggctacatataaccaagggggtacagtagtttgggggctcatgaaagaatttgaggaccccttcctaaaggatgtgacttgaagtttctcttccttccttccttccttccttccttccttccttcctttctttctttttctttctttctttctttctttctttctttctttctttctttctttcttccttccttccttcctctcttcctctcttcctcccttcctcccttcctcccttcctcccttcctcccttcctccctccctccctccctctttctttctttctttctttctttctttctttctttctttctttctttctttctttctttctttctttcttgatttatatgtaagtaagtacactgtagctgtcctcagacatcaggaaaaggaatcaggtctcgttacagatggttgtgagccaccatgtgattgctggaatttgaactcaggacctctggaaaggcagtcagtgctcttaactgctgagccacctctccagccccagtccacctcttttcaccatgtgggtcctggggattgaactgaggtcagcagtgtctgtgacaggtgcctttacctgtgtagccatctgcctgacccaggaagtaactttgagctgacagctgaaggaaactgagttgggaggtgaagctgtcagggaatagtgtttgcaaaggtcctgtgaccaggaggcctggccatcccttcttcaagccaccgtactgtactgcaccttcccccagtgttagacgacttgtcaggcatggattcattcagcaatccttaaatgagcccctcctatgtgctggggacatagatatgactcaagtgtccctgcctaagaaagactgaaactgactttgggtccagcagtcaggactttggactggtatgtcttctctccatagctgtgtcctaaggtgccagcaattcatttgacaggtgtaatgagacgagtcctcccagggtggctagtccccttcttaggacctcagtttccctatccgataagtgggtggggtggcttgtctcctcccagaggctctcctctacctcggggatttctgtcgcccctagccaggaccatgggcagcaacaagagcaagcccaaggacgccagccagcggcgccgcagcctggagccctcggaaaacgtgcacggggcagggggcgccttcccggcctcacagacaccgagcaagcccgcctccgccgacggccaccgcgggcccagcgccgccttcgtgccgcccgcggccgagcccaagctcttcggaggcttcaactcctcggacaccgtcacctccccgcagagggcggggcctctggcaggtcagccctcccccttgctgtgtgtccctgagctgtggtgcaccctctctgggttctggggactcggttttcccgaggctgcgaatggggaaggattcgtaaactggaaagcggggctcctggcgctttcgggctcccaggttcagagtatataacgggttctgaaggagagggttgtaggggaggggaccctgaggccctcaggggatggaccgccacggactagctgccgcctccgcccagcctttgttcctggctctgctgtgcgatggcccgagtgcgcccctgcgccctctgctggcgctgtgtggtgcggcagccctgccgcccaggagctgagcggggtgactcacgctcctgcatgcatggctacacacccacacgtgcaaatcccacactctgacggagccatactcacggctgcacgcccatgcgtgcaaatcccacgctcagacagagccacacgcatggctgcacacctacacgtacaaatcccacccagactcaaccatgttatatgcccacattgggcatgaacccacactgagtggagacaccaacaattcctagagacacctgggccagagcacacacagatacaggtgtgcatacaacctcgccccctcagatgggcctgtctaccatcttgcatgcagaatgcagacacgggatgtaggggttcccagctccacatcccaccacaggaacttggttgtggtgagacctttggacgggcagcccacttcccgccatgcagccacacacccattcgatcatttgagaagcatttgtggagcctcgggcaaccgagggtgggatgcaggattccacggagcagctgtgggtgaggggagaatcaggggaagggtcctgaaacttggaccagaaacctcgagctgccaggcacacacacaggcagagtcccttaagtgtggggcttggggcatcttctgtgtgctgcccctgagtgcagagcaagggagcctgatctcggggggggggggtcggggggtacggggacgggacttctgcttgtgtcagtggactcattagataaggaacacctagtctgcagcccagcaggaaggcacagcctacttagcttcctcccagggacaggcgcctgccccagcccctgcagggttctgacacctcgcatccttctctgcaggtggggtgaccacctttgtggccctctatgactatgagtcacggacagagactgacctgtccttcaagaaaggggagcggctgcagattgtcaataacacgtgagtggcctggcggggactgcactgggagcgtgggcctgtcttaccgagagctgccggcagagggcggtgcagagcctacagggctgcttctgctcttggtgggtggcggccctccctagacctcaaccagtatcctcccttgtcctgggccctgtcttcgcacctcagcctctccttctctctgcttctctctcgctggcccttaggaggaaggtggatgtcaggtgtgtaccgaggccaggtagagggggatgcttcgctgaggctgggggctgctctctgcatgtgcttcctccaccgcccctgtgtgtttccagctctctccccgtccctttagcttaccctgcatcccacctgtatgagccgaccctccatcttctccccacaccttcctgttagctctcttcctccctgttctgatttgtgattccacattgggtgccagctacatgcaggacccagtgtattctgtaggccagggagggaggcagtgtggtggggagtgggttacaccagaccaggtcaggggtggatagaagcaggccggggtccctgcaagatgtccccgggagagggggctgtctctatcagactgcccatccaaggaaggacagtgagccacagcaggtaagggcagcatccctgggaggggggcagctgctggttggaggtatgtgctgggctgtggaggcctctccctggagcaggtaaggcttggggactttgatttgagctgctctggagggtagagaggatccatcataaagtgccccaaaggtctggctaaagaggtaggctttccgtctccctgggcgtgtctcgctgctcatgcctcccgttcctcgtgcatgctactccgtttgcctgaaatacttctcctgtatccatctggtgaactcctattcagccctcaagatccagggaggggatgcccgttgtgtgaggcaaaagtgagcaggttccacgttctgcaccggtcactgtcattcatacccctccatctcgttatctctgatccccgggggtggggtggggacagcagcaatggtggaggggctggctctattttgtgaatgaggaaactgaggctcaaagtcaggaaggcccttgtccaaggtcatgtggctaccgatagcaagcccaggatgggacctgggcactttctcttcttttcctggactggcgccctggggaagagacctccctagtacctccccaccagtgtggccagctgctccttccctcctaaagggaagccctgagtccccattgtccccagctgctggtggcactggtggccaggaggaggagcagtgtgaccctggcgctgagaggatggtgtcccagagccacacggctgatagaggcagaggtgagagaaggaatggccacagaccttggagtgtgtgccgctggtggagactgccctgtggggagtctctgcacaagtggcaggaggcaggaaaggcttggggacttggactctgtgtctttggggtcacagcagcctccacgcctttggggtgcagtttctttctcctctcttgtcgccttttaggacagtggggacctgtacagccaggcagccagagtcagtcacaagggagtctcctccactggaggtccccgggtggtggggtcacaggaatgaatggtggggccaggatctggctgttagacctgctgccggggcctctgatcaacccctgctctgcccagagaagttcaggtgtctgtctggtggagaatgccattgttctcagctcagcatgttccccacctcttcctagctgagaatctggggcccctcgcatgggagagtgccagacccctgaccaaaccagttcctggctaccggaggcaaggctgtcctcctagacccttggcataggaagtgggaattgatgccccatttctagggtaggtgcactgacgcgtaggtgctcattcctgctctggcccagtctgaagctatgacagactccacttactaaatattgcctcctttataaatgtgaacatgaaaacccagagagggcatgctgtttgtccaaggtcacacagttttcctccaggaactactcagcttaggtttttgaagtttggggaggtgggggggaacctgtcaggctgctcgttctggctatagtttgaccacctcattctgtggtttctgatgtcaaactggggtcccattctggtacagactgtcttctgccccagtcctcctgtctcctggcttccagggatctcagctctgcgggttgggagagcttgctgcttttggctgtcgatgttagggaccccctgatttcagcctctctctgccattgattatgctgtgtggctttgggcaaatcatctcctcctctgtgcctcagtttccacaatctataaagaaaacactggtcttcttaccagagtggctgggtcttccacctctctcaaatgtagtttcctcagctggggtgggggtctcgccttctttcttgttggatgatcttgggggtcaaaccagagggaaatgtgtgtacaccaagcaagggtggagctttggggcaggggtgagcttgcaccttgcctgtgtgtgtgtccctcatggctccactcacatcttcttcactgctcatgtccacctagaagggacccctctggcccagcgttagccagggtctgatgctcacccggcctccagcccatctttcaagcctcccagctctgcttgctcctggcctcgacttccccatctgtgaagctgggcaaacatgtgcccagatctccagtgcattcaagttggggctgtgtgactcaagaccagggtgggaatgctgtgtgtcttctcagggtcaaagcagggacaaggtcaccagctgactaatttaactcccatcttgtgtacccctccaagctttgcatgaagagctgcagagccattgagcctcgtagtacccacagggaggcacctggcttggctatgtgaccttgcacagagccctttgcttctccagcctcagtcttcccatctgtacagggggtgtgggaagggctggaccctagctcccaggcctcgttctccgatcttccctcaaacctccaaccttttccctgtcccctttggttgctttggatgtgaggtctctggctgccccctggaccctatcaccagtgtccccagcactgcctggctctctcgctctctccctcggccccctgccacggcctctcaccacccccatctctgcctcttctctcctgtcgggctctcgcttgctcctccctcctctgtctctggacccctgctccagccagacctggttcacattcagatggctgcaaaggtacttctgcccctgcccctcctgcccaggcccagagcccgaacctgctgggatccctcctccttcctgccctcctccctcctccccctcttcctggggcagttagtgtaagagcactggggctcagccacctcatttccccatgacttgctgtgtgactttgggcatggcccagttctctctggcttcacttccccagacagggctaggctgcaggaggaagcctataggttttggttaaggactttaaggtgtgagctatggtttggaacaggggcacgtactgttgtttgaagggataggcctgaactattgccgggccagaagcgccagcccttgtctccatcgggcatccaggctctcaaggcttggggagagtttgaaggtctaatgtggcatctatctcatgtaaactctgcttttcccatccctgccccagacagcgagcttcctcccttcctctctcctaaggcacctgcaggccactctgcgcttctggacacttcagtctggggtgcgtggggctcagttctgctgaggttttaggtggcatccctctgggtcagtatgtcattatggaggtggatgtcccaggccagttcctgctggcttgctgtgtacgcaggctggctcagcttcctctgctgcggagcctggccgtgtacctggggaggtcaaggttaccgaccccgatcccccgtgacctcattctttgctccctccctcctgctcagagagggagactggtggctggcacactcgctgagcacgggacagaccggttacatccccagcaactatgtggcgccctccgactccatccaggctgaggagtgagtatgttgttcggctatggtccgctgccaccgccacttctagtaccgagtccctcgtgggcccgagtgggtagaaggctggccacactgaggtctcagtacccagggccagcactgtgggcagcgaaccctggccgacaggcacagccttgtccctcccactccaggtggtactttggcaagatcactagacgggaatcagagcggctgctgctcaacgccgagaacccgagagggaccttcctcgtgagggagagtgagaccacaaaaggtatgcctgagtgagcggtggctggcagagttcagctttgagggtattacttgagctgggtattggagagtgaataggagtttggtacatgagatggggaggggagagccttgcagtggaggaggtaacaggaattaaagttaaagtggcacttgaggaagactgaatgatccagaggtggacaggacacgcaagctaaggcttcctctggcctcagtttctcacatggagagtgggtacagtttaccaggagtgtgacacagctgtggatatgttttacagatgggaacaggagccgtatgcccctctgtttcccttttccctttcccaggggccttttctggccttacccttcccccacactgtctctgctgtttctgccctttctcttagtccatcaccatggcaaccaagccaggctgcttcctgtgggcctggggctcagcgggagatggaaaagtgcacatacacacacacacacacacacacacacacacacacacacacccgtgtgctgtgcacagtacacagggatgatgggtgtgtggtgtgtgtgtggtgtggtgtgtgggtgggtgtgtgtgtgtggtgtggtgtgctcgctcactgttggggttgggcagtgttgctggagtgaaatgtggcgaggtcccggttcctggggcttgggggtatgggcaaatgtgagaatgtgggctctgggcataggtatgccgtcagcggagccttctgtgtgcacatgaagtgggcagtcagtctgtagaaaacatgacttcccaagggttgccttgagacaggttagggtgggtcccaggcctagttctccctgactcacttatgttaccagaagatcacatttacctaatgacgtccagtggggctccaggggcctcatcagtgagtggtggacagtccgtcagtccttccactcagaactgccagctacatggcaggccgttggaccctgcaccccgcctgcctctccccaggctatccaggctatccaggctatccaggctttagttaacaaaggtttctgttgaggacattcttagctgcaggttttctaggctccagagaggcagcgcaggggcaagggctgcaggccacactcaggatgtacctcctgccctggactaattactcacaggtccacacagccagccgctactcctgtctgctcagctggtgtccagtaggcagaacagggcaggcaggcacggggtgggtatacctggagagggccagcatttatggagtgcttgctgagtaccgtgtgactcttcacggttgtctcattgtgtagggaggaaacagggcaagcagcaacttgtcagggtcacacagttgtgagcaccttggggttcaggtgtcttaccagggctgtgaggcacaggggcatgtctgccattggggttttgtgcctacacggctgccctgctcctctcagcacactaggggctgaaagagagtgggactaagtcacttcctcaagcaaggaacacactagcagggtacctctggggtctcctccctgcctacccacaggtgcctactgcctctctgtatccgacttcgacaatgccaagggcctaaatgtgaaacactacaagatccgcaagctggacagcggcggtttctacatcacctcccgcacccagttcaacagcctgcagcagctcgtggcttactactccagtgagtgtccccggccggccgtgtggggactcgcccaggggagcagggtgtctgccgtgcctcctcacccctgggatgcctcttccctccctgcctctcctccatctcctcccttctccccttgctccctgcccagcccccctcttctccttccgctgcagctggccagtgaggagggggcctgccttgagcacgctagaagggaggggctagaggctggtgttgattgtttctgcagccctaagactggtctgaaccggttcctgggagagaaggagggggaggcttctttgatagagaatggcagagcgggctggagctgggctgcgggccgtgtgcagtgatggggttggtgtgggctcttctgtgcgtggctgtttcaggtgtagctacttgagctgcctccttggcctgggcctcagcctctctcagaggactagctgcccctctgtccgtctgctgatgctctggggatcatctggttcccagaccaaatcctccagggctgccacggaaccttatgatacagtcccaaggccccaagcccaggtggctaaaggttgctccatgccttcacctgcagttcctccaaccgcatctacagcttcccacctcccagcacctcttccaaccccacagccgatcttgggctctggcacaggcgatgtgctgtatggggtgcctcctagttatccctcagatccaggccagggacctcttcctctggaatgccttccagggctcccaaagaattcctaaagcctgcttgacttccccctcccaaatatcctctgtttcatctgtgtcctgagatcttgctaggcgactggagtcggggtgtggcctccctagggcagactctcacacctgtttcacactagttctgatactctcaaatctgacaggtaaccaatgagtgatttgagcaggtgacttttgtgccgcaggcccctggggaatagatgtctacaggagggtgtttgcctgaccccagagccaatgtgcacatgatacatagagccgtacacacagggcagggaagccagcttgctgtgggaccctgcctgagccccattccctgcctccatctccagaacatgctgatggcctgtgtcaccgcctcactaccgtatgtcccacatccaagcctcagacccagggattggccaaggatgcgtgggagatcccccgggagtccctgcggctggaggtcaagctgggccagggttgcttcggagaggtgtggatgggtaaggaacacacgcccctgtccccatcccagctcaaagaccctgagtccctctctttaattgtctctactgaacaactgggctgtttttcattttattgttgaacattaactgtacaaattgttacacttgttacaattgttttcctgtgacactttgaaccccgcatgtaacatacttggctcacttccagtccctcaccccactccctgccccccaccccacgctatgactcaccagggtcagcactgaggtgggctcctgactccttgtaacccatgctgctgaagatgaagactagggcatctgtgtaccagccgcacctggggactgggcaccacggtcctcaagggcctgagtgagtgtggtcaggtctcacgccaagcctcagcctcccgatgtgaagaaggggctgatgccaagcttcaagggacatctgcatattagttcagcacagaaagagacagcgctgtgccgtgcggagggagtggtgggaagtcagtgttcggtttcctgtctaattgtgcagccatcgagaggctcctggagcatcgagctgccttagccaaacccaggctccctgctatggctgcttctacccgggtacccacgagtagagggggactatggggctgtagtggctgttgccgtttcaccatcttcctttcagagggcactggaggggccgggtcaggtaggcaagggaagtcttgggttgtgaggaggaaggtcagagggagaagccagcttttaaggtgagaccaaaaggagggtttgggtagagcctgagtgagccacggccttggtctttctcaacctcatctatgattcttggtgtgtggtgggaatctgagggcttcccacctttccctggagctctgcgcagaccagcaaccaccgggaatcagggcatccggcctgacccgacacagctagagagctgacccagtctaccctctgacctgtctctgtgacagggaggtctccctgcctaatgcagcacaggcactgagctgacctcttgcccccagtgaccccagacacagccctctccctcctctgacccgtgctgtggttgctggtgcctcgggtactgactacccacccatcaggctgctgttcggcttcctgtcctgtcctaagcagtcaacatcctagtagcagtcacattgtgagcaggctccagacacacagttcacagccctgggaggggtctccattccctgagcctatttaataagtgtgaatggagagtctcagcgtggtatctggccttgcccaaagcccatgccctgagttcagaggcagagattgagacaggcacttgtgtggactcgcctgggtggccccagtgcagcagaatgatagcctgtgctcatgttcccacgtctctccccgacagggacctggaacggcaccacgagggttgccatcaaaactctgaagccaggcaccatgtccccagaggccttcctgcaggaggcccaagtcatgaagaaactgaggcacgagaaactggtgcagctgtatgctgtggtgtcggaagaacccatttacattgtgacagagtacatgaacaagggtaaggtctgagcccggggtgaccttttcaggtgcccacgcagggcgggccaagggcaacttactccttaccccagaccaccccaatgagtgtacgctacatcagggactgactgcctctctccttttgtaaataataacaaatctagtgggtttttttctaaaagacggcttcttttgtcctttcccactgtcacgatccctgttgttgctggtttggtggcacacacctgtaatctcagtgcccgggggttgaagcaggagatcgtgagtttgaggccaggctgggtacatagcaggactgtctctgtcttggtaagcagcagtgtggggctgaggttgtagctgggttggtagagtgctttcctagcttgcacaaggccctgggtttggtcttaggtttgatccccagtactgcaagaattaggcacacacctgcaatcccggcaccggggagatagaggtaggagggtcaggagttcaaggtcagcctatagagttgggttgcttgagaccctgtctcaaaacaaaaatatatgtacagcatccacattacctaccccagagttccctgctgtccttagtgctgtgactctccatccagcttcagcctcaggcagccactggctagccgggtttggtcctgataaacctgtttgtcttgggctttgcacatgatcttttgcatcttataaccccctgttgtgtctgcctgacctcctccctaccccacttactccaagggcccagtagcattccttgatctagctccctggagtcttggcctttgagcagccctggccagggtctggaagccacagtttcctgcacagggagacccaggcaaggctagagctggatctctctctccagggagtctgctggactttctcaagggggaaacgggcaaatatttgcggctaccccagctggtggacatgtctgctcaggtgagtctcctcttccaccttcctacacctttggctctcgggctcagtgcgcccccttcaggatgcctgctttcattacaccagactctcacctggcaggcgcctggggtggtacgccacatctgggaatcagaggcacatacacataattaagaataaaaataaaatattaaaagtttaaaatttattacttccatttgctagatgaggaaaccgagggacagagaggggtcttgggacaacaggcaggacctggcacgcatctgtgtctatgggtcatctggggcctcttttgtatatactcgcctgcccgcctggctgtgtcttattgtgacctcccattgccctttgctgtcccctctccccctgagctttggtctaccttttcaagccagtgctgtttattataagctgaatgaagttccttgcttgaaaagacacgaggtgggcagggtgtttgggcatccttctatccttctatcaggaataaccagcccgagacaccggcttacagcactgggacgggtgtgggttagcccctgagccaggctctctgtctccacagatcgcttcaggcatggcctatgtggagcggatgaactatgtgcaccgggaccttcgagccgccaatatcctagtaggggagaacctggtgtgcaaagtggccgactttgggttggcccggctcatagaagacaacgaatacacagcccggcaaggtgggggtgcctgggggttatccgatggtatccgtctgtcaggtggaagtgagagtcatgctcctgcggcagactggtagtgagtgataccctgtgctttcttgcttgtaggtgccaaattccccatcaagtggaccgcccctgaagctgctctgtacggcaggttcaccatcaagtcggatgtgtggtcctttgggattctgctgaccgagctcaccactaagggaagagtgccctatcctggtgaggaggctatacctgtgtccctgaccttggccctgggggcaagtctcaccctcccccaaccaacacgccgcccctgggcttcctctttccaagctgatctctgatcacaggctgccttttgtcaggactcagcctcagaagcggggttctgtacaccatagggtcaaggctgtctaggctgtgtcagtctctctggagccatctcttcattgccctctctgttcatagggatggtgaaccgtgaggttctggaccaggtggagcggggctaccggatgccttgtccccccgagtgccccgagtccctgcatgaccttatgtgccagtgctggcggaaggagcccgaggagcggcccaccttcgagtacctgcaggccttcctggaagactactttacgtccactgagccacagtaccagcccggggagaacctatagggactgtgtgcgcagaactgtcacctctaggcttccgggtgttgcctccgatgcacctgcctcccttcatcctctctctggggctgcgttgcctcggcaatgccccttttggagcatggaagggcttcagggatggggcagcctggaaggacaggtggaggctggtacagtgactgtcccatgcctgccatggccacaggctctctctgtgcattctctctggagttagcctgcttctcacaggacacttgtgacagcagagctgggggtggttttccagcctcgacccactgcgctcacctggcactgccccactttcttcaccctgggtctgtttcaagccggccagagagcctttccaaagaggaatgaggcccaggccttggctatacgtacttcctgcccctggccatccttgttggaggcttctgggtggaacactgggtctagaaccttcttccgtggctctcaggcagcccaaggcccaacaccagttgggataagtgtcagagtgagcaccccctcagcccgtcctccacaagggacccttgagatcactgacacatcacccccatttctctgctggaaaaaaccagaatccaggaggggttgtgacctgcccaagaccaagggcagtttagggttgaggtgggcttggcacctggtgctccttctgttcctcaggaactaacgagaactgtcctccaaggcagggggcagggtggggcctgagagtggcttcaagtcggcagggttctgctgcccctgatgctcatgggtctgtcccggggaaagaggcaagcaggaggctgagccaggagcgaggggtagaaagtggtggtgtggaacaggcttctgtttgtcacagtgtgggtgggctggggtggagggagctctcaggctgcagagacagtcaagtagaagaggaagagctaaggggtgtggagtcctgctcctccatttgtcctgatcatttcaacacctggcccttgctctcctgcccgtgccaggactccctaactcagggagggaggggaggtccttagctgggggaaaggaggcgagggtccttactgctgtgtaccaacactgaccccgccctctctgagctgtactctctgcccgtgactatggcctctgtcattgctccgttccaaccccccccccccccccgtattgatagatccacagctgggcgtccaagggggtcctggaacagcagacatctgactgtctggtccctggctcctctgaccagcccttaggctatgtggtggcttctctctgcctcagtgtcccggtctgtaaggtgggcagttgatgatttgtggcatctcaaccaagggcccctgtgtgtgtgtgtttgtgtgtgtgtacacatatctgtgcctgtgtgtcttcccttgtgtccatatttaatgtgtaagaacatccctactctatcccagacacgaccatttcacccattgccccatcacagcaataatgtccccgctactggggacccgagccagccaggccatgtttgcagggaaggatgccaagcagggcctgccctgacagttccactttactcccatattctccccgtgctcctggcgagcctgagcttgccactcggttctccctgcccgactccagctgcccaaggacctttgtgtaaggtggcctcaactgtctggttttctttttttctttctttttaacagtgttttgtagatttcagatgactatgcagaggccttggggacccctccccagctctgggcagggcctggggatcccacattccatgcccaggcttgggggagggggacccagacttgttgtacatattttgcatactgtctgattaaacacaaacagacctcagtttggtcagcagtttattggacatcgactgtgtgtgggaataagaagagtcgtggatgtgagggaagccggcagtcagggtccttgacccctgcagctagtggcttctgggcctggaactgatcagatggggcagatgcggcatgtccgcacttacttgaggatctggaggaggcaccgagtccagggcaaggatgtttgtgagattcaggaccctggcaggatggagcagaactgcctagcatgcatggaatgtgttcctgggtaatctccaaggctgtggtgtgtgtatgtgtgtgtgtgtgtgtgtgtgtgtgtgtgtgtgtgtgtgtgtgcgtgtgtaggcggggtggggtggtccaggtgagctgtgtgtgcttcgtggagagttcctatctacccccatgcagtgttctctctaactttcccttcccactctcagtctctcctccagagttctcacacatctccagcttcatattcagggacggggcttgttcgactctgaaaaatctcttatctctcacaagctacaaactcccattcaatcttcaaaacccgtcagaggccatagaaggccatgcaagttttctctaagctccggaattgtcaggaattgccacgtcatagctgtttacaccgggctccatcccctggaccaggtgctggggggctgggtgagatgcccccagacccaacccatgggagttgtctatgcagggaagggaggcagtggtcacttctctctgtccaccaattccttctctggtttccagttcctcactctggcccgtggtaactgctttcccagggccctgcctgtgagagatggggacaggtgcaaggagccgaagctctgcctggccttcagttgcttccctgaactgcttcagggccaggaccctggggcccttcctgttgggtttgcttccacttggcatacatttttcttccaggaaaacatttccctgtggcaagaataatgtgcctttcttcttgtagcgtaggacaattcagaaaggcacagacaaggaaaaactgaaaccaaaaatcacttgtaccccagactcatctgcccctcctgtccggttggcagggcatctccccagggtgtgtgcagtgtctaggcactcacccttgtctcttgggtctctttgtcccttgggtcctgtgtactggctcacaattgagctgctggtcacaattgagctgctggccctcagttccttcatagaaaaactcggaccagagtttcagcctgggctcagcactgctgcagcccctgcatgtgtgcttgtgtggtggtgtagaaactactcgtggcttgcaagttagcctgccttctgtgtgctcctgccttccactgggggatacagtggcctccctgctctcaaaccaatagccactattttctataattgtatctgtgtgtgtgtgtgtgtgtgtgttcctaaatacacaaatgcgacctgtgcagtctatgtactgttacttgtctgtctgttttcagggctgaccactctgatcttggacaccccgttggcatgctctcccctggggaaagctatctctcctactcagtgttccatagtggcctgtggttctttgtctaggattaaggtttggtgagctgtccccccttctgtgccagcacttctgtcggtgtcatccttgttcaggtcctgttcaggcaggcatgttggtgagacttcatttctgacactgtgaggagtcacactctcacggcaggctctgtttctctggctctcagtctttctgtccgtcccctctgcctctttggtgctggtgttaaagtcctgtgtctgctggaaggtggaggtgcacgttgtgttcccagcactcgggaggccaaggttggcagagctctattgagttcgaggccaacctcgtctacatacagagcaagttcaaggatagccagggccacacagagaaaccctaaaaaaaaaagtcctgtgtcccattttcttttgtttgtttcatactccatactccgggtgtatgtatgtgtgtgtgtgagagagacatctctctggctctgtttctctgtctctccctctgtctctccccccttctcccaatcccagcaggtctgtctttttcccattcattcattcattcattcattcatatcacagacaaatgcacatggctttgatgtctgctggtctgcaaggggtggccccagccccagcccctatcctgtcttctatcctgcaggcctgggtttctgcaaagctcttcaaccccctgccccttgatgcctcctccttccctctctcctagctccggctctgggggtcactgccatcggctggcggggggtggggggnnnnnnnnnnnnnnnnnnnnnnnnnnnnnnnnnnnnnnnnnnnnnnnnnnnnnnnnnnnnnnnnnnnnnnnnnnnnnnnnnnnnnnnnnnnnnnnnnnnnnnnnnnnggctgggtgttgtttcctcttactcccatagttcttctgaaaacattaacagtggagcggctgttcctacccagctgtgtgtgtgaaggagggaaaggggcagacagaggcccctgtccactcttccttcctctccctgtctccagggagctgagctgcccactttcggtcatgtcagcttttacagactgtgtgcatgcatgtgtgtgtgcttggtatgggttaggggggcttcactcacccatttcctgtcggcttccaggtctccctctccatcctgattattccagatgtgtgggcttccctccgtgccacccacccccttcccctctgtttttataatctgcaaaccctggaagctcgcttcaccctcccttcctccaatgcgcagggaacattgtttcatccattccctccctcagtccatccatttgttcccttgacagatttgtatggcgtccccaatgggagtgacttaggggctagaaaacaagctgggcccaccaaccaccttctgtttaaatgacaagacaggacagatgctgaagtccccaggcctcaggagaatagagacaggccctcctgagcttgtctggatggtagagtagaacttcagggaagtaaaagtctgattacccgtgggggtgtctatgtgtgtgcttgtgtgtgagcatgtgtcagtgtgcgcgtttgtgagcatgtgtcagtgtgtgtgtttgtgtgtgaggatgtgtcagtgtgtgtgtttgtgtgtgagcatgtgtactgtgtttctgcatgtgagcttgtgcctgtgtgtgagtttccttaggtctagacttcccggcagcacctgacctcccacagnnnnnnnnnnnnnnnnnnnnnnnnnnnnnnnnnnnnnnnnnnnnnnnnnnnnnnnnnnnnnnnnnnnnnnnnnnnnnnnnnnnnnnnnnnnnnnnnnnnnnnnnnnnnnnnnnnnnnnnnnnnnnnnttgtgtgtggactgtggtacatgtgggtgtggctacaatttgtactgtgggagtatgacatgtggggggagacctctggtaggtgaggtgtagtggggtacatagcttatgtatggtgtgtgtggtgtggtgggtgacacacagtgtgtgcagcagggttgtgatgtgactataggtttgaagggtgtacaaggcatgtatgaagccttggtggtgtgatgttgagccttccctgtgcctggatccctttcatggcgtggacagagatgattccatgttacctgtgttcagactttgcacacacacacacacacacacacacacacacacacacacacacacccccgcattcagccctctccagggtcctgcctcctccctggctgtttcccagtctttctttgtctcctgtgtctctgccccgggttacagccctgagtgtctctggcgctgattagtttcaattgagctgtgattgcagagcccctccctctgtgcgcctgcagcatcctctatgcccctcagcactcttcatcaatctctgcccactcccaccccccagcttgttcaagtcccctcaggcatggcctcttggtcaggctcctgccctgctctgggcagctgcctcctcttccttagctttggggtcaccgccattggtttggaagtgtttttcattcccggggctcttcagaaagggcctattgtgaagcaattgttgctgccgcccatgtgtctgactctgggagagtgtggggggttgggtggggtggggagacatgagaagggtccttgcagcttctgccatgtggctttcatgcccatctctatgggccatgggtgcccatctgggtactcagtgctctttgtttccgtgtggccaagagcaagtgcgctggaagcttgagactctgagcctctccctgccttgcctgtctccagggtgcttctgaaatctgcctggccctgcgtgtgcagcattcagaggtgtgtgtgtgtgtgtgtgttgtgtgtgtgtgtgtgtgtgtgtgtgtagctgcctggcaacatgtcatctctgtcacttgctctaatcctttgtcccactctggggtcccaccccctttacattttcttttggtcagcacacactgaagctcctgtgagtgagcatgggtgagccccagccactgtctgcactgtgtgcctggcctgcaggcttgcccctctcccgggaccctttggggtaggagggcgctctcccaggctttgtacagggtttgcttatgctctaccgatatgttccaagacccacctgcccatccttctgtcctaccgtcctcctgtttgttcaagagtcatttaaaatttttttccttttatttatgtatttagtgtgtgggtatgtgaatcaaataggttatcaggcttggtggcaagtgcttttatcttctgagctatccctccagacagtcatttgtatttcagacattacatggttttcgtttgtctgggtggtgagtatgtgctacaccacgtatgtaggggtccaaggacaacgtgtgggaattacttctcttttgttttgtgggtcccggggactgaactcaggtcttcaggttttgtgctaggtacctcttcctgctgagtcatctcactggcactcagaaatgatttccaggctcccatttggggtcacagtgcagagtccaggcatccaggaccccttgcctactgcccagccccctaaccctcacggcccacttcttcctttcacttccagccctgctcccactccctaccccacaggccacaggcatctcttaaggcaattccccactgcctgctaaagagttttgtggtctctccttgcagataacagtctgctctttctctgtggtcctactgtgtgtgttgcttttgtcctggccttacttacctgggtggcccaagcaacctcacatgtgaacctacagttgccaccctatcccgtgaatatgtgtcaccttctttttcttgacctcttccactttaaatcagggtacagcttgttgaccatgggataattgactctgaattttgtgattgtcccatctctggttgacatttgttttaaatctcaaacaaatgtgagggtgtttaaaaaaaagtatttacagagttatttaggagtcgtgtgtgtgtgtgtgtgtgtgtgtgttagcttcctcctgtctctttctgctctccccatatttcaccgaattctgcctctttgctatatgtcagagagagagagagagagagagagagagagagagagagagagagagagagagggagagagggagagagggagggaggaagagaaggagggagaaacgacggggaggagagagagggggaaggagacgcaggggggactcctcaccatcttggtccctctctgcttctccaacctctgcccctctctctttctctcccgccactcctgggcactccccactagacagtttcaggggagcctggccagatttctcagctgttgcctctctatcacctcttttgctgtctctgaggggcagaacaggattctggcctccatccttcctgtcatccgtctcctttggaagctccttgctccctggtgtagcttggctttgagttgggatcttggaatcaagtctcagacccacacacctcacctggcctgtctttcctgcccccagatgtccccttagactccatgttgtctccactcctggaaggtttcttgtctgaatctccttctcagcccgtgacgcactggcctttctgatgccccctgactcgtggctctcatgagcttgtgggccttctcccttctcctcaccctgctgtaattgtctgcagcctccaggaacaccaacccagcctcctctaccccccagagccccttcttgctcctcctccttgcccaacaaccctgtccctacttcagggctcagcaccctctctgaaggaaccactctggtatctgtcacccaagtccaggtctcccaacactcctaatttacactaagcaaccccacttttgtgttggtcttgcctacagacccctagtatagccccgaccacctcactcagaaccccaacttgattgacataccctctatgtcctatttatgagtcctccctaatagatcctgcctcccctctggggcccagcttccctgacacctgtcacctgcctggtacaggggctacccgtggtctcccttcaccaggctatcgggctattcaacaactgactagtgtctgttggggcagccccgagaggtagataattggcttgggctggagaggccacacagcacgtgttctgcctcactctcctcatctgcatctcccaatgtcctctgcttcccttcccttctctgcgtccatccttggggtgtgtctggtgtctgagggaggttctgtgagctctggccccagacagaagattggagtctgtcacctctgggtgttggactttctctctgtgggtcagtatacatatagcttacatgtgtcaatgggcatgcatctggcactccatgcgttggggtgtagacccagctggccttatttgcccatctttatgtgggtcactggtcattctgtcagtgtaagtggtgacttgggtgtctgtgttctgtctgggtggtgaggtgtcttccttttctctgtggtgaactcaccaccctgctgtcctgcctactccttccccgtggccttcttccttgtagcccctctcctggggactttgctagggcttgcatgtcaatgtctgtgcctggcggcctctcaggcagtgaagtgcgtcatagctctgactgagatggctgagcgtgggctcagcttgcgtgcatgcgtcatcctgagccctggtggagttggggggggggtctcgcctcgccttgaagctcccactctaccagctctctagctccctccctacctccctccctccctttctccctctttcctaagctttcttcttccttccagcctttgtctgttccctgttgcttctccccgtagctcctcactctgcccccttcccctctggttacctctgctgcagagccagtgttggaagaacttttggggttcatctgaatattccatccagtcccacagggatggaactgcttggggcttctcgtggactttttttcttttcttcacctgttctccctaaggtctctagggcaccccatcacagaatgcagttcccagtactaaccacatgtacgggaagacaccagctttccttggccagctgctcgtcctggtctccagcctcttctgccactagcccttgttttcctctgcccaacctttacttaaatgtgatgagctgcttctacctcaggaccttcatgcatacggttctccctgcctggaaccagttgccagaggcttgcctgctctcactgcctcctttaggtctctgctcctgtgtctcctcttcagagaggccttccctggggtcctgctgtccttagcaagacaccctttgtctgacttcacagctgtcaaataatggggtcccctttaggtgtagcctctgtgtctcttccttacatgttgcctcccccctagcccccactggttctcaacctccagtctgtccctccaggttttgttctcctcagggacaacctgcttcctagctccctgagctccacctgtccaagnnnnnnnnnnnnn

SEQ ID NO: 745 - DNA, 1623 bp, Mus musculus
atgggcagcaacaagagcaagcccaaggacgccagccagcggcgccgcagcctggagccctcggaaaacgtgcacggggcagggggcgccttcccggcctcacagacaccgagcaagcccgcctccgccgacggccaccgcgggcccagcgccgccttcgtgccgcccgcggccgagcccaagctcttcggaggcttcaactcctcggacaccgtcacctccccgcagagggcggggcctctggcaggtggggtgaccacctttgtggccctctatgactatgagtcacggacagagactgacctgtccttcaagaaaggggagcggctgcagattgtcaataacacgtgagtggcctggcgagagggagactggtggctggcacactcgctgagcacgggacagaccggttacatccccagcaactatgtggcgccctccgactccatccaggctgaggagtggtactttggcaagatcactagacgggaatcagagcggctgctgctcaacgccgagaacccgagagggaccttcctcgtgagggagagtgagaccacaaaaggtgcctactgcctctctgtatccgacttcgacaatgccaagggcctaaatgtgaaacactacaagatccgcaagctggacagcggcggtttctacatcacctcccgcacccagttcaacagcctgcagcagctcgtggcttactactccaaacatgctgatggcctgtgtcaccgcctcactaccgtatgtcccacatccaagcctcagacccagggattggccaaggatgcgtgggagatcccccgggagtccctgcggctggaggtcaagctgggccagggttgcttcggagaggtgtggatggggacctggaacggcaccacgagggttgccatcaaaactctgaagccaggcaccatgtccccagaggccttcctgcaggaggcccaagtcatgaagaaactgaggcacgagaaactggtgcagctgtatgctgtggtgtcggaagaacccatttacattgtgacagagtacatgaacaaggggagtctgctggactttctcaagggggaaacgggcaaatatttgcggctaccccagctggtggacatgtctgctcagatcgcttcaggcatggcctatgtggagcggatgaactatgtgcaccgggaccttcgagccgccaatatcctagtaggggagaacctggtgtgcaaagtggccgactttgggttggcccggctcatagaagacaacgaatacacagcccggcaaggtgccaaattccccatcaagtggaccgcccctgaagctgctctgtacggcaggttcaccatcaagtcggatgtgtggtcctttgggattctgctgaccgagctcaccactaagggaagagtgccctatcctgggatggtgaaccgtgaggttctggaccaggtggagcggggctaccggatgccttgtccccccgagtgccccgagtccctgcatgaccttatgtgccagtgctggcggaaggagcccgaggagcggcccaccttcgagtacctgcaggccttcctggaagactactttacgtccactgagccacagtaccagcccggggagaacctatag

SEQ ID NO: 746 - protein, 419 aa, Mus musculus
VAWREGDWWLAHSLSTGQTGYIPSNYVAPSDSIQAEEWYFGKITRRESLLLNAENPRGTFLVRESETTKGAYCLSVSDFDNAKQVKHYKIRKLDSGGFYITSRTQFNSLQQLVAYYSKHADGLCHRLTTVCPTSKPQTQGLAKDAWEIPRESLRLEVKLGQGCFGEVWMGTWNGTTRVAIKTLKPGTMSPEAFLQEAQVMKKLRHEKLVQLYAVVSEEPIYIVTEYMNKGSLLDFLKGETGKYLRLPQLVDMSAQIASGMAYVERMNYVHRDLRAANILVGENLVCKVADFGLARLIEDNEYTARQGAKFPIKWTAPEAALYGRFTIKSDVWSFGILLTELTTKGRVPYPGMVNREVLDQVERGYRMPCPPECPESLHDLMCQCWRKEPEERPTFEYLQAFLEDYFTSTEPQYQPGENL

SEQ ID NO: 747 - DNA, 40070 bp, Homo sapiens
  misc_feature (1)...(40070): n = A,T,C or G
tctgttgcccaggctggagtgcagtggcattatctcggctcactgcaacctctgcctcccaggttcaagcgattcttctgcctcagcctcccgagtagctaggactacaggtgcctgccaccacacactgctaatttttgtatttatagtagagacggggtttcaccatattggccaggctggtcttgaactcctgacctcatgatctccccacctcggccttccaaagtgctgggattacaggtgtgagccactgcccctggctgatattttaataatgctaagctttctttcattttattttctaattgcaattggtatatatacacataattgatttgggaatgttaacttaattccctgccactttacttaatttgcttttggtttaatagttttgcagtagattctcttggatttcccagacttatacctataccaaatactataataatactcttttttttttttttttttttgagacagagtcttgctctgttgcccaggctggagtacagtagcgtaatcttggctcactgcaacctccacctcccaggtttaagcgactctcatgtctcagcctccagagcagcttggattacaggcatgtgccaccacacctggcttatttttgtacttttaatacagatggggtttcgccatgttgtctaggctgatcttgaactcctgacctcaggtgatccacccgcctctgcctcccaaaatgttgggattacaggtgtgagccaccacacctggccaataataatactcttaccttctcttttctaattccatttattcttcaatttctttttnnnnnnnnnnnnnnnnnnnntgccatgatctccactcactgcaacctctgcctcctgggttcaagtgattctcctgcctcagcctctcgagtagctgggattacaggtgcctgccaccatgcctgactaatttttgtatttttagtagagacgaggtttcaccatgttggccaggctgatctcgaactcctgacctcaggtgatccacctgccttggcctcccaaagtgctgggattacaggcatgagccaccgcacctggcctctttccttttttttttttgagacagagtctcactctgttgctcaggctggagtgcagtgctgtgataatggctcactgcagcctcaaccttccagactcaagtgattctctcacttcagcctcctgcgtagctgggtctacaggtgcacaccatcatgcctggctaatttcttttgtgtatttttggtagaaatggggtttcaccatgttgcccaggctagtctgaaactcctcaggctcacgtgatcctcctgcctctgcctcacaaggtattgggattacatgcatgagccaacacacctggccaaatttttgtgtttttttttagagatggtgttttaccatgttgccctggaaagtatgaaactcacgggctccagcagtccgtctgcctcagcctcccaaagtgctgggattacaggtgtgagccaccacacccaaccctctttttctaagctaattgtattggcaagtatcttagagtggggttaactggtggacatgtatcttagttcattcaggctgctgtaacaaaataccatagactgggcagcttaaaccatgaacatttatttctcacagctctgaaggctggagagtccaatatcaaggtggcagcagattcagtgtctgatgaggactctcttcctggtttgcaaacggccaccttcttaatgtgtcctcacatggcagagagagacagggctctggtttcctcctcttctcataagggcactaatcccgtcataaggactccatccttatgacttatgtaaacctaatcacctcccaaggcccacctccaaacaccaccacactggggattagggcttcaacatgtgaatctggggtgggggatgcacattcagtccatagtgatatccttgtcttttctgggttctttccctgtaaaggggcttttgtaggccttggctcctaatcaactccaccagacaacacccctcaggaccatgcacagggcatggcacatgtagtaggcattttggaggcttttgcctaactgtcaaagtgactgcaaaagagggcaagtgtctgaacaaggtcttccacagaaatcataataatagccaattagatattgagcactttctatgtgccaggcactttacaaatatgacatcacgcttcctcacaatgaaccccacattatgtaggaacaatcacaccaattcccatttcccaaggctgcatggttaggaagttgcaagctggcatctgaacctggcattctggccccgggccacctgtatatatatatacatattttggagatggagttttgctcttgttgcccaggctggagtgcaatggcacaatgtctgctcactgtaacctccaccacccgggttcaagtgattctcctacctcagcctatcaagtagctgggattacaggcatgcgccaccatgcccagctaattttgtatttctagtagagatggggtttcaccatgttggccaggctggtctctaactcctgacctcaggtgatccacctgcctcggcctcccaaagtgctggaattacaggcatgagccattgtgcccggccccacctgtagtttttgactgctctgtgatgcttctgcttccctggagggtctaagatgtgggcgatgagatcataggttgccctctgacccctgtgttgctttggaccatggggtcattggcacagtgggcggggtaccagaggtaggttctgacactgctctcctgaaccgtgagcatcccagctctgctgcactcacttgctgtgtggccttggacaaggttttagtttctctgaaccttgatcccatctgtaaagtgggtgcagttacagtccctgcgtcactgtgctgttgggtcaattaagaaccaactgtgtgtaaagcgcccagccttgtgcttggcattcaaggccctgccactgcctcctcttattccctggaatgataataacaacagtaaacaacattgtgtgctgtttgtcatgcacttattcttttcctgccacaaggactctcactcgtacttttcagttgttaggtttctatccccattttaaaggggaggaaactcacaggcaaagtgacttgcacaagaaaatgtagctactaagaagtgcagccaggactcgaacccaggtttgactggagtcctcactctcagctcctaagctcctggcctactctccacccttagaagaggtgagatgatgttcttcagagtcaggaaggaaggggctggtgtgtggtggctgaacagcagtgtgacctgagcatctgtgagccaggaggtgagagagagtgtgtggcaccctgtggttgggtagatcattgtgggaggatgggacacgccgtgggagcatgggacacaccatgggagacggcagcaccaccagctgcagggccatgtggacccaggtgatggctttaggcctcatccacaggcttatgatgggaagctcttgaatattttttaaaaattgtcactttagaaaatcatgacaaagtcatttctaaatgtcaactgatacagggtgtaaagtgaaaaagggattttcctctccccatcccacacttttgagatgaaacattgtgatgaatttggaatccttccagagctttctttttttaaagtttttttaatttttaatttttatgggcacatagtaggtgtatatatttatggggtacatgagatatcttgacacaggcatacattgtgtaataatcacatcagggtaagtagggtatccgtcacctcagttatcattcctttgtgttacaaacaatccaattctactcttttagttttttttaaaattattattattattttatttttattttttttgagacatggtctcactgtgttgctcaggcagagtgcatgtgtgtgtgtgcaatttcctttctttcttctctttttttttttttttttttgagacagggtctcgttctgtcatccaggctggagtgcagtggcgcgatgatagctcactgcagcctcaaactccagggctcaagtgatccccccacctcagccttccaagtagctgggactacaggctaatttttaatcttctatagagatacagtctcactatgttgcccaggctcaatcttctttacagagataatagcagctcatgtttgctacaggtccagtaccacattaagcccactgcctgcattatcatgtttgattgctcacaaccctattatgtgggtagcatcgtccccattttccagaggaggaaactgaggccctaatatgcccagaggagattctaccctgccgctgccttcttttcactgaaacagtgtgttggggtctcttatcaggccactctcagctctcattctttgtaatggctgcactgctgtccacttgaggactggagcccctttatttaaccagcccctctctgaggaacacgtaggttgttaatggctttctgtggagagttttaagcggaggaggcccagttgtctgtgaggtttacagagccgcctctggctgcggggggagggtggactggaggggcccacactgctgtgtccaggcctaggatcacagggccctggcctgaaggactggagatagacagggtggaggggaggaatgcgcttgaggaagattcaggaactaccccggggctccccaagggcagagccccacacagggcttggcacgtggcaggtgctctgcgaatacctggagaatgactggggtgggatgtgcaggggttgtcgctgagtcagtgatggggatgggggtgggggggagatgcaggcttagcgggaggtactaggccacttggggacctgctgagctcaaggcactgggaacgccgagggaaaagttcttatagcagcaactcggcacctctcgagggagcgagccatagtgcaggccccctgtctgctgaggagtccagagcccacggtgaggagtggcttcccgaaggaaaggggccacctttccctgggaacctcaggcagccccattgtggggcccccactgcttccccttgacccccgcaagggtctatctctaccttggaggctgcaagtggcggaagagatgaggggggttggcccctctccaaggagcaactcatggtgactcggcagttgggccccagaaccaggaagtgcaaggatagagctctgtgccagggaggagggtggtctctcatgaggtcccacggcatggaagcagccctccgagactaactcccaccctcactgagtcatcgagtgaagagccgtgtagctttcgagaccagcccagccgacatggtggaaccccgtgtctactaaaaataccagaattagccgggagtggtggcactcacctgtaatcccagctactcaggaggctgaggcagtagaattgcttgaacctgggaggcgaagggtgcagtgagccgagatcacaccattgcactccagcctgggcgacagaggagactctgtctcaaaaaaaaaaaataataataataattagccaggcgtggtattcggtgactgtaatcccagctacttgggaggctgaggcaggagaaccgctggaacccgggaggcggaggttgcagtgagccgagatcgcgccactgcactccagcctgggcaatagagtgagactccatttcaaaaaaaaaaaaaaaaggaaaagaaaaagaacgagagagcttggagtaaaaaaaaaaaaaaaaaaaaaaaaaggaaaagaaaaaagaaaaagaacgagagagcttggagtggcctgagaagatgctctgaacacactaacacataaagtgaaaagagggaggcggcagtgtagaatctcctctgggtatctcagggcctcagtttcctcatctggaaagtgggggccacagtgctacccgcatgaccctcagtgggccattcttgctcaaggacgttctgctcggagctttctcaggctttctctgggagtggggtgggctgctttatcctctcacccctcttccaaggccatctggctgctttgtgagagagatccctgggggtaggaggtggggcctgtgagtttcggcccctgattcccacctgcccagtgtggtggccccttttcactctcacccatgctgtgtgacttcaggcaagttcttcaacctctctgtgtcttaatgtcctcaacagtaagataaagacatgattagtatttacctcctagattatcatgaggagccgatgagtcaatgtttgcaaagtacttagagcaaggtccaattcaaggtctgagctctgggagtatttgaataccacggaatgatatttagtcttttcagtgtggcattgcaggaacaaagtaggatgcaaattatacatccatgcccatttagtcttttgtctattctgcaaatagttccagagcacctagtgggtgtcaggcccgtcctggtctctgggggcatggagatggatcctgcctggccctgacagccgcgagtgcacagtggagggcactgggtggaccccagtttgttgaccgtcttgcgttgctgtgacgctggaaggaaacgcaccaccacacccaggtgtttgtcttctaggggcagaattatggggcattttcttttattttttcttttctttttttttaatcttcttgtagttctcaaagagtccactctgaatgataaaagttaccatttacggaggcctggtaacgttccgtgccatcctgagcatgttccgtgtacttttctcacggattctcccagcagtcctgacacgggtgttattcccgatcgatagagaggaaaactgaggcgaagggcggccggccaggattcaaaccagggagtctgctccagcactccggctcttaacctcaaccgtctgcctctccacaaacaccaggatcaaccaccaagaccaaaaaaacagtctcacaaaccatcaaacattgcacttggtggctcaggaccttagcttcgtcttaaaggtccctgttatgctttttctgagtgccccagtgtggagtggtcttcgtgtttgtgagtgcaggggtcaggggttgtgtcttttcttcttgtccccttccaagaggtgacatgtatccttgatactggaagggcccttaaggtctagccctggctctctgtctcccttcatggcacatcagccaagtacccattctcccgtctttgattacctccagtgacagggagctcactcctcaacatttattttattctaaagaaaattcaggctcttagatagttcttcctccataaaaattttttaaaaaaatttttacttcctcttaaagtctcataaacaagtcccctgctttggggtcctgaggcaggacctggctaattcgtctctatgtccccctatagtgaggagcacagggcctgctagtaggtactataaatgctgcaccaggaagcaagtggctagggggcgggctggttgggcccccatcaatccttgggctgcaggtaaccaggtcagcagttcttgtgggacaccagctgggtgagtgctgatgggtatcgtgacctcaatggaataggttgccatagaaactgactttggacctgtccccaggtccattgacttgtccctcaggagaccatggtaatcccttgagctcttcagcaggtctccccagggcctccccaaccccacattctctgagctgggtggtccccagggagcatgcaaaccatacccccattgtgcagctgggtagcctgaggccccaggggcacaggggacaggctgaaattcacacaggcagggggcgtctcatagctgggctgggcgctcagggcaaacagccttgcccgaggacccagccagtcagggggccttttccccactcatgggttctcagaggaaattctggaccgattcccaggccttctgcctccccaaagaataatcggaacctgcctccctggtgtgtccagaattacacaatatcaataacggctgaggtgacctgtgatgcccctagcaccctacagtgtcttgtgcatttatcacaatgaccccatcgttacagatgaggaaacggcacagagagaagttaagtcacatgcctaaggttacacagctatttaggggtagagccaggatctggatgtggagagcccagctccagagcccactctcaccaccatgccataccctgtctcgctcttgctttgagagggttgaaaagactttgggagggttgaaggatatttcaggtctaggaggctcttagcacgggcctgctagagccatagcctgatgaacagtgatcagagagtgggcgccattatgatttctctttctaatgacatcctcaaaacagtgctgagatgtctgctttatccctgctttgcagatgaggacgctgaggcccagagagggaaagccacttgcctagggacacacagcggggagaggtggagcagggcctctatttcgagacccctgactccacacctggtgtttgtgccaagaccccaggctgcctcccaggtcctctgggacagcccctgccttctaccaggtgagatgatggccctatcagggctcaagatgggtggggagatcccagcgaatctgggtgggagctgggaccagccagggcctgcggatggggaaatgggaggcagagggtggtggcaggactgtgggcgtcagggggagttttcaacttggtttactctgtgtttccgtctctctggacctcccaggtttctggctctgaagtcccttagctcttaaatagtcactcattcgttcagctgtttactgagcacctactgtgtgccacaccccatgctaggcactgggagcacagcagtgaacaagatgaacaaaagcccacgacagtagtcacataaccacatgaattcaaacaacaaaaacaaaacaggaccacatgttatcaaagacagacacaagtcagggggacccagtgaaaggatttggggaacacttcccaaggaggggacttttgagttgagaacggaaggaggcaccagtcaccctggtgaagtggccagggaacagcatttgggcagtgggaatggtatgtgtgaaggccctgtggctggagtgagctcccagccatctctgcttcaaacctcctgctgtatggccttggctgccacttttagcacctttccccagcgttaggcaattcccgtcagccacgtattcattcaacaaaccctcaatgagccccctccatgtgctaggtgcccgggacataggcgtggctcagatactgtccctgccaggagggagggaaacagtgactcagggggaggtgggtgggtaaggtcagggcttctgattatgaggcatttcttccgttcctggcgctggaccgaggaagccctttacggatggatgccatccttacgctcattttacagatgaagacatcgaggttttgagaggctaactctcccaaaaaggctggtgcccctgtcccccatttttttcttttctttcttttttttttgagacagagtattcctctgacgcccaggctggagtgcagtggcaggatctgagctcactgcagcctctgcctcccctgttcaagcgattctcctgcctcaccctccggagtagctgggactacaggcgcgtgccaccatgcccggctaatttttttttttttttcaagtagagcccgggtttccgcgtgttggcccggcaggtctcaaactcctgatctcaagtgatccgcccgcttcggcctcccaaagtgctgggattacaggcgtgagccaccgcgcccggccctgctgcctctccttgggcctcgttttccctatctgtggaatgggtgggagggaggccggccaaggggccccggcagccctgcctgttccagtgtcttctctctctcctgccaggaccatgggtagcaacaagagcaagcccaaggatgccagccagcggcgccgcagcctggagcccgccgagaacgtgcacggcgctggcgggggcgctttccccgcctcgcagacccccagcaagccagcctcggccgacggccaccgcggccccagcgcggccttcgcccccgcggccgccgagcccaagctgttcggaggcttcaactcctcggacaccgtcacctccccgcagagggcgggcccgctggccggtcagtgcgcgggcggcgcggggtcctcgcccacctggggccacggcggggaggcggcggggctgtgtgcccggggtcgccccctctgcgcaggcccttcctctcgccaggggtagcgcccctgggtgacttgggtgtccggggggtgggggggcggccgtacacactgtgaagcgtccgcgccgccgccgctggctttggggtggagcaagcgcaaaagacacggggtgtggttaatgggttctaattggacgcttaagcccaagaagaagaagggcggcgcgggaccgggcctgttgctgccttggcgcccagtcctttttcgttgcctgggtccgcccagagatgagtcgggacgcgcggcccacgtgcggcggaggggcagctgggtcgctcggggaacggggcaccggatggccccggttgggcccgcgccaggatgcgcccctgcgccctctgctggcgctctgcggtcaccgcagccccggagagggccgttttggagagccgcggcggtgccccagacactccacgcagacttcactccttcactcagacccgttcactctccccacaggcacacgctgggccacacacacggctacacccccgccagggacacgcacacatgcggggtggaggcagggtcacagacacccgcagacacatccccaacgcagatgtacccagatacaaactcacatgcacaggtgacctcacacttgtagctgaagacacacgcacatgccgtcagaagcgcattcagagacacacgctcagctggaaatcacaatctcaccatcgtggccgcccaggagacagatacacacaggtgcatcgagaacatgagaacactcagagacacacggacaggcgtggacccttcagacgcagacgcacgcccaagcgagagaaacagacccacagacacaccattcatttgttcaataagtatatgtggagctcctactacaggccagggctcctctgctgcccgggccccagcggtgcagacagaacccacctgggggaaggaagcaaagggcagctcgtggagggtgttagaaggggcgctgctgcgaaggcgcaaaacaggcagggagggagggctgggggatgtgaggaggtggaggctgtagcttaaaatggtggaagggggtacgggggcctttctgagggggcagttacttggagccaaatcttcctggacaccaggagcgcccagagtgacacactttatagagagagagcgagcctcctgggggagtgttcttcattcaccgcttccttcagcctatagctctttcttgagcacctactatgtgcctggctctggaaacaaaacaaagatgctggttattggcgacttctgctcctagagcaagacaggcaccaaacagataagccagcacccagcactgcccaaagccccggggacggacgcggacaggaagggatgctcccgctcccacacgcccttgcagggatgcgcagatacacggatgcagtggacacgtgcacaggcccatcttcactgaacctgactgtgtctttgggctgagcacttgcgtgtgggagacaaatccactcctcctgggtacagggccatcctgcccatgccttccctggctgtggccccactgttctgacacaccccacccctctctgcaggtggagtgaccacctttgtggccctctatgactatgagtctaggacggagacagacctgtccttcaagaaaggcgagcggctccagattgtcaacaacacgtgagtgcccccttccctattgcccctcagggctgggtggtgggacttcaaagcgggcaggggctcatgcaggatctggcatcagggcagcacagtgcagagcccagggcagtgcgaagcccagggcagtgtggaggcaggcgcctgctgcactctcgccctgggcagcacctgctgttgctcccccagccatggggaactcctcccaatccctggctctcgcttgctccctccagccctctctcagcttctccctctctctgcttctctctcgctggcccttaggaggaaggtggatgtcaggtgtgtacatgctccgtgggcggcgggctgggcggggtgcttcgcggggggtgggggctgctgtctgcatgtgcttccactccctgcctgtgatctctggctctcttggctgctcctcacctcccagcttctcccctcccccctccaccaatttgattaggtcctggaccttaacgcaggctgcgatcaggggcccttccattgcactctcctgcacatctcctccccatccaccttcctactcactcaccctcccattctgccccgtcagcccacccaagtatctgctgcatgcaggacccagtgctgtgatggggatagcctgggtggagaaggccttggccacgtccccctggagccagcatgtggccagggagacagcacatggccccagcccaggccaagagtcaggcagtgggcgagcccagagtcggctcctggagcccctgctgtggacctgcctccggtgatgaccacagggactgagagggtcaagggcctcgaaggaaagccagtgaagttatctggcaggtggaggtggtggaagggcagcttgcgggagggtgccggactggagggggctgacgccttcacgggtgtggaaggcaggaaggttctagaaggcagaggagaatcgatccctgggtgtcctcgaaggcctggctaaggaagttgggggtttccactgccccgagcgtgtctggcttgctcatgccccacttgccttgcgcatgctcttccctttgcctgaaatgccctttctccagtgtctgcctggggaactcctgttcatcgctcaagatcagtgcaggactgccttctcagaggggcaaaggggaacagaggtgccagttgccatgccagtcgtctccacctgtgtccttgtattgactcctctctgcagtctagccagggctgaagtgatcggggagggggctgtctccattttgcagatgaggaaactgaggctcagcgatgtgaaggcccttgtccaaggtcacacagctgccaagtagcaaagccaggattggaaccgaagcagcaactttctgccctcctcaacctgctcttggcgggggggtgggagggggggctctcccggctccgcctccccccttgcatggccgagtcctggtgcgaagctacagtttccttattgtcaccagctgtttgtgtctgcttcccccctaaactgggagctgctggagggtggctctctggtgcacctcacttctgggtccccatagcacctgtaactcagcacagtggcgggtgcccagcaggtgatggtgaacaggatgaatgaacagcagtgacaatgtcaccatttcttgtgctctctgtgtgagctgggccctgtgctgagtgcttgaagttgcgttattttatttacgcatcaccatagcctcgagaaatgggaagtcttacttgcaccattttacagatgaggaaactgaggcccaaagaggtgaaataacttacccaaggtcacatggctagtagtggcagagctggaagactaggctggccctccgacccatgatcctttcaggaaggctcagtggaggtgcagcagaggccacaggagggagaggcccgtgcaggggaggggcgtcagcaggatggctctgaagtcctggtggagtctctaccaagcgtctcagactggggtgacagctggggcagagctgtggaggcaggaagggctgggagaactttggttctgcctttttcacctggattcagagagtagccccatgcttgcctttttccagccctttccctccactcttcttgtcttccagggagggtgggctgggggaggtttggccaggaggctggggctgccaggaggcctggaagtgatggaatctcattcagggaagaccctggggtagctgattgggagatgggggtgggtggattgggagcccctcctcatgtcacaatgctccaatgctccttcgcttagacgtcagagatggtggctgagcgcggtggctcacgcctgtaatcccagcactttgggaggctgaggcaggaggatcgcttgaacccagaagtttgagaccagcctgggaaacatagggagacctggcctctacaaaatataaaaataaattagctaggtgtggtggcgcatgccagtggtcccagctactcaggaggctgaggcaggaggatcgctggaaccaggagttgaaggctgcagtgagccatgatcgtgctactgcactccagcctgggtgacagagcaagactctgtctcaaaaaaaagaagtgaaggagggaggtgtaggtggggggctggtattagtagaagaggagagggaaagggatttggggggcggggcttggtaggagatgggccaccggaatttaaggtgtttgagtctcacacctcatcccggggacccgcctgcatgcacgtccttcctccatcagtgctcagggcctattactgtgcagtgcctcccccaccctgtaagagtggggggctttctgaatctagcatggggcccaggcacgtgtggaggctgggctggctgtcagggcagtagagagctagaggaggaacccgtctgtggatggggtctggccaagtgggggtcctcgcagtagcagacccagagatcccgcgccatggatcttgctgccacatggccctgggtcctggtattctgggtattgtgtggccctgggtgtgaggaagccctctggggctgaggtctgactgcctcaagctccctcatctgacatcctagtctcaggagtcagggcccctcctgggtctgactctgggttgctccctgaactgccccttcctcccacccaaattccaggagcttcttttgggagttttctggcaggcgcttctgggcaacagcgcctcagctggcctctgcctccttgcccccggcatggcggcagggggcacctcgggagtctagagcctcggggtcctgccttcatgctctcctccagagacctgtgctggcttcacccctgcctcgctcctccctcaccccacagaccatgtgctccaggtcttggggcttggcaattgacctcctggccactgcccacctggccagcctcagctgtggtgcaccagctcagcggccatccccagagtgccctcccaaccagtcccagcagcccaagggagcgaatgtcagtgcccacgctggcacatgtcccaggttccaaagctgccgtgcccctgagccacacgccaccctggctggccccaaggattagggccccaaaagaggatcctgaggctcagagaggtgaagtcagttgcttgaggtcacacagctggtgaccagcagttgtgaaaaatcatggctctgggactcttggcccttcttctagccatgggtgggaaggcttcccttccttccctgcttgctgcccacctgatgaggaccaggcccgggggaaggtgctggatgccgtagaattcctctccctgatggcttgatgctgctgtgactggtgaccgcagccaccggaggcagctttgagcctcccaagcccttgacatgggaagatggggattgatatctccatttcacaggtgggcaaactgaggctcagatgatcatcacagtcgtcatctcagtttactctgagcccagcatgacgctcactgtttacacactttgcctgcaagggagattctgtgaatgttgtctgctttttacatatgaggaaactaagactcagagagggcagggtacttgcccaagatcacacagcaaatccttgttggagactgggactgtgctgctttggtttttaaaaagggtcactgtggaaataccaatttagttgtttttatttttattttttagctaaatccagatctaacagctgatgcatgttgtgctgggctctgatctggctttttttttttttttttttttttttttgagaccggatcttgctctgtggcccaggctggagtgcagtggtgcgatcttggcttactgcaatctctaccttctgggttcaagtgattctcctgcctcagcttcccagcttcccaagtagctgagattacaggcacgcaccaccatgcccagctaatttttatatttttattagagacggggtttcgccatgttgctgggctggtctcgaactcctgacctcaagagatccatccaccttggcctcccgaagtgttgggatcacaggcgtgagccaccgtgcgctgtctgttctggcatttgatatcctgggagggagacatgctgaccctgcagatgaggaaactgagactggcgagtgtggtatggaggggccaaggtcagacagccagcaagtggtgagctgggatggtgtctagggcagtgcagcactggagcccattccctcagacccctctaaatcaggggccaggctgagactggatcttgggtccttcagtaaaattggagtgcatctcatctctctccctgccccttgtgaaatgaaacctccagactagaccatgaaaccccaggctcacaggtgggctgactctggggagctgggagccctgctcgctgaagtcgggtagcatcggctgcactcctctcgctcttgggccctgcttggctggcctccgagcacaggcctcctgccagccttccactctgggtggctggagactccccagaggccggccagcctgcggactgcagctttgtcaaacggcctcaatttttagcgtctggtcttagaccttggccccttcccgctgtggcctgtcctctgaccccgccctgcagcctcctctttcatctgccacaggctttcccaaaggtctcagcctctctggggcctggggaggccctactgtgcctggctgtggacagtcaggggccctgcttctcactcttgctctgccattggttgaccatgtggctttgggcaaatcactggcctgtctgtgtctcattttcccccactggtaaatggaggctttgaactgaaagatctcagagagctgttttctgtgatttgagtccttgctttgtagctttgggcaagtcgctgcacctctctgtccctcagtttccccaactctctaaagaaagtgctggccaggcgcggtggctcactcctgtaatcccagcactttgggaggccgaggtgggcagatcacttgaggtcaggagttcgagaccaccctggccaacatggtgaaaccccgtctctactaaaaatacaaaaattagctgggcatggtggggcttgcctgtaatcccaactactcaggaggctgaggcaggagaatcgcttgaacctgggaggtgaagtttgcagtgagccgagatcgcgctgttgcactccagcctgggtgatagagcaagactccatctcaaaaaaataaataaataaataaagtgctgggctactctgacctgggtgctgtgtgtccctgcgctgatcgcttgacatttctgagccagtttcttcatctggggcctggagccctgccttcctcccttgcagggtggccttgggggtcagtgggagagacaagtgtggacaccccgggtgggtgtacaacaaggaggtgggtggggatttggggcatccaaaggcttcttttcttgaggtgggtcttgcctccttactcccgggccctccctccagtgaccccatatggcttgcccccctgcccgagtgtgtgtgtagccatcacagagccaagacaggccacacagccccagtcacacccccttgcctcactccatcaggaggggacacaacaccctctggctcacttcgagccatccggctgaaccccagtgtctcaggtgctcacctgtcctccgacaggtccctggagagctccccaagccctgctccctcctggcctcaacttctccatcttctatatgggctgaagaatatggccaggggcagctcagaagaagtgggagccagggatccaggttcatgttcagattgtgtgactgtaggcaagggcctttctctctctgggccctggcggtgggtgggggccaccctgcctgccgtgtgtcttctcagggtcctggtgaagtacaaaagtggccttggattgagaagagcccagcaagctgtcaagccctgctgcaacctgcagggggtgctcctatctgggagtcaggagcctgggcctggctgtgtgaccttgagcaaagaggcctttgcttctctggcctcagtcttcccagctgtacagtgggaatgagaggggctggaccctagttcccaggtctccctgcccattgacctctcctcactccctgtggaccccgtccctgtccccttggttgctttggatgtgaggcctctgtggctgccccctcgtcccctgtccccagcaccgcctggctctcccgctctctcccctgctctttctgccactctccgcctctcaccacccccatctctgcctcttctctcctgttgggctctcgctctctcctccctcctctgtgtctctggacccccgctccagccagacctggttcacattcagatggctgcaaaggtacttccgcccctccccgctcccgcccaggcccaggggacccgaccacgccgggagctcttcctgccccatccccatcacaccccccactccttctcctcactttcgcatagaagtgccctgggcattggggctctgccacctcaccccctctgacagggctcactgtgtgactttgggcaagtcccagccccctctggcctcagtttccccctgcagatgggtaggctggaggaggaggcctgtagttttcagccgaggagccctttaggtgtgacccgtgatttgggacagaggcaagccttgctctagtttgcagggttggggcctggatggtcactgggtcccagcagggcccctgcttgcctccacccaggtctcaccagctcccaggagcgggcttccaaatctcagagcatggggacactttgtaggtctcacttgactttctctcagccaggaatctcttctattacaaccttacttgcccgcagagacagggggttccctccctccctcccaaggcagctctcggcatcttgagatgtcttggtacatctgaaaggaagtgaatttcttcctgtcccgggactcctcccctatggatttgagcctcagatgaccaaggccagtcctgccctggtccaagacaaagtccatctgatccagctttggcaaaaaggcgtctgcgccagggaggggaggagttccaggccagctggacctggcatgctgtggggactcacgctggccccaccacctccctgggcctccctcagccactagagccctgagcacagcacctaggaggatggtgggcaccgggcttgtggctgacggctcccttctcctttcctccctccttctgtccctgctcagagagggagactggtggctggcccactcgctcagcacaggacagacaggctacatccccagcaactacgtggcgccctccgactccatccaggctgaggagtgagtaccgtctctggctgcctctacccgtcgtccctggacactgccggtgcagagtgcctctcctgggctggggtgggaggtctggctgtccagcgccccagccatatccagggagaagcactgtgagtgggcagaagcctggacagtcagcaccatcctccgtcctcccacccccaggtggtattttggcaagatcaccagacgggagtcagagcggttactgctcaatgcagagaacccgagagggaccttcctcgtgcgagaaagtgagaccacgaaaggtacgagcgctcttgctggccaacggatactgagtcttctgtgagtggtttgagctgggtgttgtggaatgagcaggagtttggtttgtggagtagggagggaagaaccttccgggtggaggtaatggcaggatcaaagtcagggaggtgcatttgaggaacactgagtaatccgcggtggccagatgtccagagaaagatgaggcttagtctctctggcctcagttttctcagataaaagatgaacataggttgtctggaggtctgagtgtcacacagtaacaggctcgttcccagggtaggtgctgctacaatgagccccgcttcttcctcttccccaggggtccctgggctgcactggatgctggaggctggttttgccctcccccaactgcagtcctggtccctgcccctctcctgtccctcccctgagccagagaatgaagaccatcccctttctctccagcccctctgaaagtgggttgcaggcgcccgtcaccatggcagccaagctgagctgcttcctgtgggcctggggctcagcgggagatgggaagcagagcatccatgtcgagccgtgcatttacgagcagtcgtgcagccatgtgcgggtgtgcatgctgtgtgtacatctgggcgtgtgtgtgtgtgcatgtggggtggaattgtctgtgtgttgctgtgtgggaatggactgctgtggtttgtctggtgcctgagggcctagggagcgtgtacttgtgtgagcgtgtggctactgggcatgggcatgcctgtgcgtgtatggacatgtggctggggttggcttcagcctcaggcctgtggcttccacatgcaccctcccgggccatcagtagaaaatcatggttgcctaaggcaggctttgagtccccggatgtgggtttgagccccagccctgtctctggtttgctgggtgaccccaggctggccacttccctctctggacctcatttcttctgtacgctgggattgtaatctcctgaagatcgcagagggggaggtctgtgggctaggatggctgggcttcccccatgcccatgcactgcctggccaggctcctgagaaggcctgtccctggctgctggagcctctgcccctgcctccggggctcagccttgttccctgatgccatttgggcgtctcttggcctctggtcctacccaggcctgctggatgggaggaaacttttccggccaaaagcttttctatgctcaagggaaagaggggaggcaccagggctggccccgtttgacccaggcagccttcaggccacacccagcccgtggtctcctgcccacgacggccaaagcctctgccaaccaccccctcccgcctgagcctgggcctgtcttcagcaaggaggttggggggacatggacagtgcccccgcaagctgacccagagagggaaagcagttaggccagggccacacagccacagggagccactcacaggctcccagcagttattgagtgcccagtgtgtgccgggcccttctatatgtggttgcatggaatctccccagcagccctgggagcacccgcattgtgcagaggaggaaactgaggcccagatagggccagcaacccctccaagtctcatagctaggatgtgcacctgggatatggaggtcttgctggggccaagggtgcgtggcaggacgtactaatcaagtgtctcttgggtcccttggccctgcctctgtggctgccccggggctggctgttgagagacagggtgggcctggggccccgcctgggcctcccttccctccaatgtcaggcaggcacagaacggtgtccagagcagcggcctgcggggggagagggcatggcggtcacggctcccctcggtgccccgcaggtgcctactgcctctcagtgtctgacttcgacaacgccaagggcctcaacgtgaagcactacaagatccgcaagctggacagcggcggcttctacatcacctcccgcacccagttcaacagcctgcagcagctggtggcctactactccagtgagccagcctcggagggcggagggcgggcgggcaaagcctcagctgcagactctggggaggggccttggagcctagaagggtggggacttctgttatcctgcttctctccccacttccccctcccccctcccttcctctctcctcccttttccctcctttccttgtctccttcttcttcctcttctttcccccagcccccctcctccctgtccccctctctccctgctccacgcagtgtcccactgcccgcctttctctgcagctggctggtatggagggggctgccctgaggagccccagagtaagctggaagggaggggacagaggctggtgtcatttgtctctgtagccctaggaccggtctgaaccggttgctgggagaggaggagggggcggccagatcgattgcagcaaagagggaagagagcggcagagggagctcgcggggcttgcgtgctgggtgagggctcgggcgtgggcgcagtgctgtagcccacccacctgggcatccggagctgactgcagtgtcgggcctgtgggtgcctgtgtgcccgtgtgtctgtggcacacatggcctctgtgcacaggtgttggtccactccccaccccgagcctcctcctcctctcagcttggcctcctgacttcctctgggatcacccgccactctctgtctcttcggccaccgctgtgtagctcattctgaacccctttccctcagatcagaactctccaggggctgtcttggaatcttgggataaagacccccaccggcccctgagtggtctaatcctaactgcctccccacctccgcctggtgccacccttccccacctgctccctgcgcccctttgtcctccgcttctccagccctgcagctgttctttcctcagagcctttgctctggctgtgcccctgcctggagggctcttccctacttaacccctcaccgtcctgcacatccaagctcagttgctgcttcctccaggaagccttccaggccactcctgctgttgcgcgaacagctctccagtcacattcacatctgtggtcctgggaggtgattagggaagtggggctcctccctggactctgagttcctgagggcaggttccctggacatgttccctccccgcagggttcctggcaccccctactgtctgctgaatgactgactgaatgactgactcagcagatgcataaagcactgtgggcctgtgtgggggtggggctgtgtgcacacagatgtagatgcctggctttgagggcaccctgcgtgtcccctgaaatctgtgtgcatctggcatgtagggcgacacacactgaggggcagggaggccccagggcagaagacccgcctaactgctcctcctgcctcctcctcagaacacgccgatggcctgtgccaccgcctcaccaccgtgtgccccacgtccaagccgcagactcagggcctggccaaggatgcctgggagatccctcgggagtcgctgcggctggaggtcaagctgggccagggctgctttggcgaggtgtggatgggtaaggcctggcccctgccctcgggagaggcatccaccccccaccccgtgtggcagctccgggctcccttggtccctttgcctttagctgcctctgctggatgacggggccctgttgtaaatctggagctccccagcggtggctggcaccgagttgggttgtggccacccaagcactgtgccccggaccgtgcaaaccatagtgcctgattccaagatccgcacagggctgggcattgcacagacctgctgtgtaggctgggcccggtggcctcactcagagcctcagtcttcccgactgtgaatggggctggtgacagtgggacctatgggagactgtggagaccctgacccagtgcgtgtccacacactagctgttcgccatggagagagaagcccggctcgcaggagggagtgctgggaagcttaggtctggcatggtctgggcctgttagcgatttcccgtctgaccctggagaaacagcaaagcatgagcaccgtgcagccctgacaaaacccaggcccctcttccaccggatgctttctgctcacacggagggaccggaggccagggtggaggagagacggcggttgtaaccccgtaagcccatggtgctagcggggatcacggtgcgctgttttcaaggtggtttcatctgagccgcatctccactcactcccactgcctccacgttccgccctccagagggctgatggaggagagcagagcggcctcctgggtggaaggcactgcagggacagaggcctggaggctggaggtcaggctgtccgggaaggggaggcgtgggctttgagctggtgagaggggagaggggtgagaagccagggtgtgggcacagccacaaagtgaggacttgagcaacacctgggtgaatgcacagcgtcagccattatggtggctgcaaaactcatttctggcttgggtgagaggtgctgtccctgggaagggcctcacttcctccctgggtgctccaggtcgactcatgaagtgccacatgcagatggcctgagccagcagggccacagagattggcctgagccccaaccctcggacggaggcccagcgactgggaggaacgggcccaaggtcacacatcaaaggaacctcgaggcccactgggacaagaacctggattaaacatgctggtctagaatgcagcttcccccagagccccacagttagaaaagcagatagtagtgaaatgataaccacattacttactgagccctcacggtggggctggcccagtggttaaaatctcattcaatcctcaaacagctccacgggtaggcactatggaatccccattttccagatgagataactgaggcttagagaggggaactgactctcccatggtctctccgctggcaggaggcggaggtgagaggctctggccagcctgacccccaagccctcatgcttaggacagtgtctcattttggggggcgggtgggctccagaggtgacctcttgttctggcaacagccttagaaatccctgggccagctccacatcacccctggcttccaccagtacacattgcatttgctaacacatgaggcacgttcaaagtcctgctcagagggaacatgactaacccagaagtgacaccggttgagttggaaccttggtcccctatctgtctaggctaataagctgctttttaggactttttttttttttttagacaggatctcactctgtcacccaggctggagtgcagtggcacagtttcggctcactgcaacctctgcctcccaggctcaaaccattctcctgcctcagcctcccgagtatccagtattacaggcacgcaccactaccacctagctaatttttgtatttttagtggagacagggtttcaccatgttggccaggctggtcttgaactcctgacctcaaatgatccacccgcctcggccccctaaagtgctgggattacaggcgtgagccaccacgcccagcctggacattcttaataatcacagtcccgacaacagctactggttcttgagcatttaatcctagtaacagtgccatgaggagcaccctgtcattgtacccattgtacagatggggagactgaggctcagaaagggcccaggctttgactgggtttgtcacatggctgtggaggccacagctgacactggcgcccaggtgggcagatcctggatccctgtgtggtaggagttggggggctccactgagtcagcctgcatccctcctcaacagggacctggaacggtaccaccagggtggccatcaaaaccctgaagcctggcacgatgtctccagaggccttcctgcaggaggcccaggtcatgaagaagctgaggcatgagaagctggtgcagttgtatgctgtggtttcagaggagcccatttacatcgtcacggagtacatgagcaagggtgagtcctgggcggccggggcagggggcaggggcactccggacagggcagggagcatgagcctcatttcctctcatgtctagaatgggcatcttcaaaggtggaatgcagtagagccaaattctctgttgcctgggccggagtgtggtggtgcaatcatagctcacttcagcctcaaccttccaggctcaagcagttctcccacctcagccacccaagtagctgggaccacaggtgtgtgtcaccaggcccagctaattttttattttttgtagagatgggaccctatgttgcccaggctggtctcgaactcttgggctcaaggagtcctcccacttccacctcccaaagtgctgggattacaggtgtgagccacagtaatttttaaactaattagttatttttcaaaattccactttttggaggtatagtttacatatgataaaatacaccccttttaagtgttcagttcagtgggttttaacaactggatttactgtgtacccctaaccataatgaagatatataacatctccatcacccagaaagttcctcatgccctttgcagacagtaccctccagccccaaacccaagcacccactgatttgctttctgtcattataaatttgttttgtttattctagaatttcatacatggaatcttttacatctgggatgcattgtttttttactttttacatttcaattttttattttttgagatgaggtcttgctatgttgcccaggctggagtgcagtggcgtgatcatagctcactgcagccttgacctcccaggctcaattgatcttctcatctcagcctctcaagtagctgggactacaggtgcacaacatcctgcccagctacttttttttttcgtattttttgtacagacagagacttactgtgtagctcaggctggtctcaaactattgggctcaagcgatcttcccacctcggcctcccacagtgctgggattgcaggcaggagccactgctcccggcctgagatgcatccttgttgcatctcccagcagtttgttcctgttgttgctgagcgggactccgctgtctgcattagcacagtttacctgttcacctggaggtggacttctgcttgtttcccatcctgcttgccttttgagtgacaagcactgagtgagactttattcagagatgagtttacgtaaaatctgctgtgctggttaaagcaaggccagccacctgggaggatgggttttgggaatcactgcatcctggcagagggacagggcaggagctggagctgggtctctctctgcccagggagtttgctggactttctcaagggggagacaggcaagtacctgcggctgcctcagctggtggacatggctgctcaggtgagtcagcccctcccgcctccccacacccttggtcctcaagcacccagacccatctggtgcagccagttctggcctcttgagtgccccctccaagaagcctgccttgattgcctccacactcactgatcttgccgcacgtatttaccaggtctgcttacaggtgccctgaggggtgattctgggcagcagaaggcccttacctgggcatcaggggtcactgacttactgtgggacctcgggcctcagttgtcgtctctgtaaaggtcatttagtcgcttagcagacgtgttcatgcttgctgtaggcagtggtcaacaagcctttttttttttcatttaatcctcatcacgaccaggagtgacgaggattggctgttattcccattggacggatgagaaaactgaggctcagagaggggacttgggcagcaggcaggacctggcactcatctgtgtctgggtccgctggggcctctttccctggtcacctcgctttcctggctgcatcggatctcgtgcctcccctttgacctttgccttctgccctctgctctgtgccctgtgctccctactcccgcagagcactgctcctgctttcgatgccaacagcatttactgtgaactgacctcacttgcctgaagaagtgtggggagggtggggaaggggtggttggctctccagccccagagtgctctgtggccctgggagggcatgggtggcacctgagccaggctcccacggttccgcctgcagatcgcctcaggcatggcgtacgtggagcggatgaactacgtccaccgggaccttcgtgcagccaacatcctggtgggagagaacctggtgtgcaaagtggccgactttgggctggctcggctcattgaagacaatgagtacacggcgcggcaaggtgggcaggggctgtgtggtatgtcgcgcttggcctgggacaggtcacgtcccgctctgagccccagttttttcctcagctgtcattcctcatggtgcttatctagcagagcggtcatgacaggaggtcagagctgccctgacctttctcgttcctgcaggtgccaaattccccatcaagtggacggctccagaagctgccctctatggccgcttcaccatcaagtcggacgtgtggtccttcgggatcctgctgactgagctcaccacaaagggacgggtgccctaccctggtaagaaggtcctcatggcctgtctgtggtccctgaatccctctgccctggtggccttgggcaagtcatgactcctgctgggcctgtttccccacccgtaaaacaaagaagttgagcgtctgatgttaggctctctcgatggtccatgctctcagcttcggggacaggacttatctatggtcactcccaacctgtcctaggcaggaagccctcgctgccctccccatcagcttcccccaccccactttcctcaccggagccgggctccccatgcctcgctctgcccacagggatggtgaaccgcgaggtgctggaccaggtggagcggggctaccggatgccctgcccgccggagtgtcccgagtccctgcacgacctcatgtgccagtgctggcggaaggagcctgaggagcggcccaccttcgagtacctgcaggccttcctggaggactacttcacgtccaccgagccccagtaccagcccggggagaacctctaggcacaggcgggcccagaccggcttctcggcttggatcctgggctgggtggcccctgtctcggggcttgccccactctgcctgcctgctgttggtcctctctctgtggggctgaattgccaggggcgaggcccttcctctttggtggcatggaaggggcttctggacctagggtggcctgagagggcggtgggtatgcgagaccagcacggtgactctgtccagctcccgctgtggccgcacgcctctccctgcactccctcctggagctctgtgggtctctggaagaggaaccaggagaagggctggggccggggctgagggtgcccttttccagcctcagcctactccgctcactgaactccttccccacttctgtgccacccccggtctatgtcgagagctggccaaagagcctttccaaagaggagcgatgggcccctggccccgcctgcctgccaccctgccccttgccatccattctggaaacacctgtaggcagaggctgccgagacagaccctctgccgctgcttccaggctgggcagcacaaggccttgcctggcctgatgatggtgggtgggtgggatgagtaccccctcaaaccctgccctccttagacctgagggacccttcgagatcatcacttccttgcccccatttcacccatggggagacagttgagagcggggatgtgacatgcccaaggccacggagcagttcagagtggaggcgggcttggaacccggtgctccctctgtcatcctcaggaaccaacaattcgtcggaggcatcatggaaagactgggacagcccaggaaacaaggggtctgaggatgcattcgagatggcagattcccactgccgctgcccgctcagcccagctgttgggaacagcatggaggcagatgtggggctgagctggggaatcagggtaaaaggtgcaggtgtggagagagaggcttcaatcggcttgtgggtgatgtttgaccttcagagccagccggctatgaaagggagcgagcccctcggctctggaggcaatcaagcagacatagaagagccaagagtccaggaggccctggtcctggcctccttccccgtactttgtcccgtggcatttcaattcctggccctgttctcctccccaagtcggcaccctttaactcatgaggagggaaaagagtgcctaagcgggggtgaaagaggacgtgttacccactgccatgcaccaggactggctgtgtaaccttgggtggcccctgctgtctctctgggctgcagagtctgccccacatgtggccatggcctctgcaactgctcagctctggtccaggccctgtggcaggacacacatggtgagcctagccctgggacatcaggagactgggctctggctctgttcggcctttgggtgtgtggtggattctccctgggcctcagtgtgcccatctgtaaaggggcagctgacagtttgtggcatcttgccaagggtccctgtgtgtgtgtatgtgtgtgcatgtgtgcgtgtctccatgtgcgtccatatttaacatgtaaaaatgtcccccccgctccgtcccccaaacatgttgtacatttcaccatggccccctcatcatagcaataacattcccactgccaggggttcttgagccagccaggccctgccagtggggaaggaggccaagcagtgcctgcctatgaaatttcaacttttcctttcatacgtctttattacccaagtcttctcccgtccattccagtcaaatctgggctcactcaccccagcgagctctcaaatccctctccaactgcctaaggccctttgtgtaaggtgtcttaatactgtcctttttttttttttaacagtgttttgtagatttcagatgactatgcagaggcctgggggacccctggctctgggccgggcctggggctccgaaattccaaggcccagacttgcggggggtgggggggtatccagaattggttgtaaatactttgcatattgtctgattaaacacaaacagacctcagaatctgatcaacagtttattgaacatctactgtgtgctggaaagcgagatggggcggaatgcgagaacaaactaccccttgaggggtctttgggcagcactagtagctggagggcttcaggccaaggcaggggtgacatcagattggagacagctacggcagaatgtggctgtttgtgaacatctgcacctgtgttagggggtgagcacctgggagaaggacaaggcacatcacaggacttccctgagcatgacaagttcaggactcaaatgtccgtggtggatggtagcagtgacattggggagtgggtggggctgtcaagcctgcctagaggagatcacaaatacacgacgagaataccgttgtgtgtgctcttcgtgtgtttcctaggagtgcagggcaggggtgctgggtcgatccacaaaagtcctgaaaacgctgaagaaaaatccaaagacccttcccctcctccctccttccccaccaccgaagcacacagtcttgaaggttgatttgcaaccgtctatacaaacacatttattttacacaaatatacatcagatcacacacctgtgcaccggagtcaactctggccacgacattgcttaattaaaaacaaatttcaaaaactggacatttttctgttcagtattattttcacaagccaaacacatcatagtgtccaggtcagggtggcatctgggtggcatctggagatcgcagggggcgggtgtgtgtgtgtgtgtgtgtgggtgtgggtgtgcgtgtgtcttaggagtagagatggagttctggatgtgaggttgtggcaggtgttctctgcttgctggtgggagtatacctggatgcgtgtgcctttgtgttcatgggggtatgtgcgtgggctctgtttgttcgcagacatggtgcttggatgtttgtgtgtgagcacttgtctaggtggtctgtgagcctgggctcatggaaatgcgtcccagatgtgtgtgcttgggcattaacgcgatgaggtgagccggtccgcttgctctggctgtgtgtgcagaatgtgtgtgtactgtgtgaacacagatccaggggcttcatgagcctgtgggctcctggagtgtgtgggcaccgaggtgtgcagctgggttcacgtggatgtgggtgggaacagcatgtgtgcccgtggacccgtgtgagcttgggctcgcacccccagcgctggccactcccggcgggacccacgtgtgcccgggggcgcagggccacgtgcgagcgcaaccgggacaaagcgctcgcccgcgctgccgcggcgggtcaggcgtgcgcatgcgcatgcgcggcgcggcagggtccaaccccaaccccgcgcgccgggacaggagggaccggccaccgcgcggcctctctcctcttccttgtccatctgagtctttctctctcttcctctctcttgtctgtcagtgcctctccagccctctctggccttacatcaatttcctgtttcttcttttttaatttttaaaaatttcagtagcttttggggttacaagtggttttttggttacttggataaattatgtaggggtgaattttgtagtacactcgtcatccgagtagcgtacgttgcacctaatatgtaggtttttaaaaatcccacaccccgccttccttgcttttttctttctttctctttccttttctttttctttatttccctttcccctccctccctccctttttttgagatggagtcttgctctgcccctagtctggagtgcagtgactcactgcaacctccacctcctgggctcaagccattctcctgcctcagcctcccgagtagatggaaccacagctgtgtgccctcatagcccggctaattttttttttttttttttgtagagacggggtgttgctatgttgcccagactggtcttgaactcctgggctcaggtgatctgccccctccggctcccaaagtgtagggattacaggtgtgagtcactatgcctggctgattttccttttctttctctatgtgtctctctgtctcactgttgctaatttctgtctcttttcctctttgcctgggtgctgtctctctttctctagtccccaccctccctttctgcctctcagatttttctccccatccacctcttcacatctctgactcttcccaggccctcccacacctccatgcctttgcccaggctgttttcaccgctgagaatgccctttcttccctctctacaacctggcaaactcctattcatcctgcaaagcacatctccgaggccacagaccggccctgggagctctccctgacgccctggaatccgcagagcgtgtcagcccgcccactagaacaagcgcttgagggactgggtgacgttctccctagtgatcccaggtcccgccacattggtaatgtctgctcagggaaggcaggcgggaaagtcgctctgcctctcccactcctgtctctggctccttctccggttgggacttcctcactctgggcctgtgtccagttggcttgtgctggactcggtgtgtaagggagacagagatagacacacagagatggagtgcagaggcgagagatgtcatccactctgctgggccacagtctcctggccccgctgtcccctccttcggccctgtgtagtgtccaggtgtctcccggggatatgagaccccagggctccatgccccctcagcctttcctttctgccttcagttggttttactcttaattctgcatgcatttttttctttttgagaaaactaaaatgtttcccccatgacaaaaaaagaatatatattctttctggcaaaataggaaagatacaggaaaacacaaaccaaccaaccaaccatatttcacaccccctgctccacccctcccgcctggagtctggggcatgtctccagggtgcatgcagggtgtgtgtggtgtgtggtgtgtggtgtgtgtaggggtgtgcggcatatgcgtgtccctgctgctgttgcctcccaggctttttcctatgagcttcgaaagtctctttgttcatcctctgcttctctcgtcccctctcttcctccctccctagttacattctccagaccagacttcatgctgggtgcacgcatgcacagacacacacacacacgcgcgcatacacatgcacacacacacacacacacgcacactctgcattttctatcatctctgtcttcttttcccatttttctctcagaggctctgaaacgctgtgattcatagagagaaaaagagacaggcagagattcagagattcagacaggacagacaggaaaaggggatggagacagaggggctggagttggtggcggggagggagcggcagggagagaagctttttgtccatctgtttgtcgtctgtgaggtccatcccgattctcactccccgcagccctcccctttctggggcttttcccacccagcccttggagcgtgtctcctgggatcctggggccgtgtccatctgtccgtctgtgtgtcagcctctgcctcccgcctgcctcttgctgtggtctcattaaatgctcatctctttctttgattgttccacccccaggttgtgtgtgtgggcacgtgtgcatgtgtccatgtatccagatctctgtgcctttgtggctgtccatctgcctcccacctgacttccccttctccctccctcctgttcttgccaccgtgtcagtgtgtgtttgcatctgtgtacgtgtatgcacctgtgtacatgtgtgtctgtgcatgaatctcttgctcacctcacttcccctgtcccagaggctcctggacttggcatctgggggtgttcttctcctcactccccatcctggtccagcctcagcctcaaggcttgcctcctggacaatttccctggcaaccatccctggacatcttacctgcaacctccgaaaactcaactcacttgtccactcccactccgtcagcagggggacctctggcacagagccacatgccctgggtggctcagccttctctcacttaacgctctgctgtgggctttcatttcctcttaccacttctggccccactcagagccctgtgtctcccccacctgcctgtgcacaggctgacctgtgtcatcctgatccccaccatgcaggcattgctcatggtgcctctgcctgacatctttcctttcttttttttttttgagacagagtctcactctgttgtccgggctggagtgcagtggcgcaatcttggctcactgcaacctctgcctcccgggttcatacgattctcctgcctcagcctcccgagtagctgggactacgggagtgcgccactatacccagctaatctttgtatttttagtagagacagggtttcaccatgttggttggccaggacggtcttgatcttttgacctcatgatctgcccgcctaagcctcccaaagtgctgggattacaggcatgagccattgtacctggccgacatctttcctttcttcagcctgcaaatcccacctcctctgggaagccctcttgataaccccctttgctgggttcccttgtctctgatactccctgcagtgagatctgtcctggccttggtcttatcgcaggctgggcacccagctggagtcccatttggaccttcgtgggcctagacaccttggccctttccttagaaaagaaaattaaaaattacatgttacgatagcactggtatcaacacgaatatattaataggacatactgagacattttctttgagttaaaagttcgtttttcttctgattttaaaagaaattggaacattttcttggggtcccaaaagtatggtgcatgggctatagattcactgatcccctcctcttgccaggcctgggcgaatgccatgccgggcaggctgtgtatgctccccgccttctaccctctctgtgtctgtcttcttcattttgcctctgcagtttgtccttgtgttagtgcattaaagcaagacgatgcgtgtgtgtgtatgtgtgtgtgcatgtgtgcatgcacacgcacgccacatcctccctcttcatctctgtgtccatctctctgtgtttgtttgtttgtttggtttttttttttgagacagggtcttgctctgtctcccaggctggaatgcagcggtgcaatcacggcttactgcagcctcaacctcctgggctcaagtgatcctcctacctcagcctcctgagtagctgggactacaggcgtgcacaaccatgcccggctattttttttttttttttagtagaaacagggtctcactctgttgctcaggctggtcttgaactcctgggctcaagagatccgcccacctcagcctcctaaagtgctggaatcacaggcatgagccactgtgcctggcttatgttcatctctttcaccataacaggtttgtctctttctccggggtcccctcattcattcattcattcattcctgcaacaaacacctgtgtgtgtccctgtgtctgtgcgttggcgtgtctgccagggagcaggggtcttggttcctcatctttccccaggtctcctgctctcccagatctgcaggctgtgagctttccagggtgggccatgctccctgctcccgaccctttgcctgcccgcctccccttgctccagcattggggtcactgctatgggtggtggttgttttccctctcccccttggttcttcctagaacaccatgtagcagctgctcctgcccagcagggtgtgtgtgtgtgtgtgtgtgtgtgtgtgtgtgtgtgtgtgtatgggagggagtgagagagagggccaggccgacatatagacagacagacaccaagagagggtgacaagtgcacagccggcacctgtctctcctgtatttgccttctgtctccttccctctcctctctgaggttttgctggcattttgtcttttctctgggcttcctgcatttgtgtgtgtgagtgtgtctgtgtatgagtgtgtgtgtgcacgtggcatgctcaggtctgggtccccccttcctcaccctccctttgtcccccccaatccccacaccttctctaccacagtccaggtgtgagtgtggtctgcggtgtgtgtggtgtgtgatgcgtgtgttgcatggttgtgtattgcatggtttgggtggtgtggatgtggtacagtgtgtgtgcagcacggcctgtgtgtggtgtggccgtggcctgcggtcccttgcggttgcctgcatccagcgacggctgtgctgatgcccctcccacccatcgaggcctctcctcctttctttttcccttcccttcccttcccttcccttcccttccctcccctcccttcccttcccttccccccttcctttcctttcctttcacttgctccttcgtaaaatcctgattgagccattcccatgaggcagccctggtggccggggcacacttctctcactgggtcgttctctttctccttttctctctctcttttcctgtctttggctccgtttctgtgtctgtttttctccctctgtcttttgttttgtttctctgttgtctgagtctttgtctctttgtttctatctttgcctgttggttttagcctagcccactcaggcactaattagttgttcccgttaggaagtggctgcaaagtcgtgtatgtgtgtgtgtggggtgtgtgtgtaagtgtgcatgtgagtgtatgtgcctgtgtgagtgtacatgtgtatgtgtatgtgagtgtgtatgtattgtgtatatgtgtgcatgtgagtgtatgtacctgagtgtgcgtgtgagtgcatgtgtgtgtgtatgtgtgtacatgactgtgtgtttatgtgtgtgagtgtgtgtatgtgtgcgtcttgtgaatgtgtatgaatgagtgtgtgtgtgttcttgctctctttccaacagttttggccatgactccacctcccattcatttcctaagcgcccccctacacacacacactcacagggtcctcccaggcgtgagtatgtgtatgtgcagctaacaggtctggctcctcattgttccccgaggctcttgcctaccgtggctgcaggctggtgggattccggcgtgggcagcagctgcctccccttgctccagcgttggggtcgctgccatcggctgagggtttgtttctttcactttcacagctcttcccaaaacactcgtctcggagcagctgctcccgcctgtgtgtgtgtgtgtgtgtgtgtgagagagagagagagagagaatgtgcatgtgtgtgtgtgtgtgtgtgtgtgtgtgtgtgtgtggagggtcacagcagcccctccctggccccctttctgcagggcttggcttttgtgttcattctgagtcccttgcacttgtccctcagttcaatcaacacctctacatctctcctgtgtactgggctgtgtgtgtgtgtgtgtgtgtctccacttctccctccttcccacctgttctcgccagtctctaaggcactctgaaatctgccctggctgtatgtgtgtgggttcacagggcgaggtctgtgcacgtgaaccagtatgtgacaagctgtcagggcatcatctctgccactgtacctaatccttcactctcaccctggggtaatttcctttgtactttcctttggtccacacatgcagaacagctcttgtgagttgtgcacacaggtgtgtgtgtgtgtgtgcgcgcgcgcgcgtgtgtgtgtggtgtagggggagagacagagagacagatctcctcttccctttgctctctctggctgcatcttgacctttgcacacctgcccggatccatctctctctccacttctcctaaacctctccttgtctctttctgcatcatctctgaggctttgctttccctctgcagatgagagagggtgctctgtccatccatccatctatccatctgtctgtctgtccaagagttatttgtgggcccttttctacctccccacccctttcctgggcctgcactcttgtcacccgcccccctgcaccctcctgcggggccatttcagcgcccaccctcttcacctctccatctccatccctccccgcttgtgggttctggaccgggacctgagaacaaagctgcctcctgggccccacacccatcacccggccccaaacccttcaaggcccgttgggcttggcatcctgtttggctccttccctcatcagggggcctcatgcagcctcactccacttccagcaggtcacccctgccgggccattcccctgccactctcttatgcccccctctagctcaaggcgatttccttcctgccttataaatcccctacccccaattcaggtctcccaggggcctctccttttccatgtgggggtctaggagtcggtctttctctcctggtcaggttccattttatttcctttttcctctgacttggtcgggttttgttcttccctgggcatcactggtacctgtgtgtgtgtgtctgttcctgtctccctgtctgacgcattcacctttccttccaccttttatcctcttcctctcatttcaaagaattgggatctaacttacatatcgtaagatgcacaaatctgaaatgaaaagctttgatgaatttcacatgtgtctgcacctgtgcctccaccacccggagcaagaaacagaccgtcctggccctcgagtgcaggctccctcccacccgccccttgaggctcggggtgtttctcactgtgtgtatgcgtgacattttgtctgtctgtctatcctgcaactttctcagctgttgcttccctctgggagccccttgtcttt

SEQ ID NO: 748 - DNA, 2455 bp, Homo sapiens
gaccatgggtagcaacaagagcaagcccaaggatgccagccagcggcgccgcagcctggagcccgccgagaacgtgcacggcgctggcgggggcgctttccccgcctcgcagacccccagcaagccagcctcggccgacggccaccgcggccccagcgcggccttcgcccccgcggccgccgagcccaagctgttcggaggcttcaactcctcggacaccgtcacctccccgcagagggcgggcccgctggccggtggagtgaccacctttgtggccctctatgactatgagtctaggacggagacagacctgtccttcaagaaaggcgagcggctccagattgtcaacaacacagagggagactggtggctggcccactcgctcagcacaggacagacaggctacatccccagcaactacgtggcgccctccgactccatccaggctgaggagtggtattttggcaagatcaccagacgggagtcagagcggttactgctcaatgcagagaacccgagagggaccttcctcgtgcgagaaagtgagaccacgaaaggtgcctactgcctctcagtgtctgacttcgacaacgccaagggcctcaacgtgaagcactacaagatccgcaagctggacagcggcggcttctacatcacctcccgcacccagttcaacagcctgcagcagctggtggcctactactccaaacacgccgatggcctgtgccaccgcctcaccaccgtgtgccccacgtccaagccgcagactcagggcctggccaaggatgcctgggagatccctcgggagtcgctgcggctggaggtcaagctgggccagggctgctttggcgaggtgtggatggggacctggaacggtaccaccagggtggccatcaaaaccctgaagcctggcacgatgtctccagaggccttcctgcaggaggcccaggtcatgaagaagctgaggcatgagaagctggtgcagttgtatgctgtggtttcagaggagcccatttacatcgtcacggagtacatgagcaaggggagtttgctggactttctcaagggggagacaggcaagtacctgcggctgcctcagctggtggacatggctgctcagatcgcctcaggcatggcgtacgtggagcggatgaactacgtccaccgggaccttcgtgcagccaacatcctggtgggagagaacctggtgtgcaaagtggccgactttgggctggctcggctcattgaagacaatgagtacacggcgcggcaaggtgccaaattccccatcaagtggacggctccagaagctgccctctatggccgcttcaccatcaagtcggacgtgtggtccttcgggatcctgctgactgagctcaccacaaagggacgggtgccctaccctgggatggtgaaccgcgaggtgctggaccaggtggagcggggctaccggatgccctgcccgccggagtgtcccgagtccctgcacgacctcatgtgccagtgctggcggaaggagcctgaggagcggcccaccttcgagtacctgcaggccttcctggaggactacttcacgtccaccgagccccagtaccagcccggggagaacctctaggcacaggcgggcccagaccggcttctcggcttggatcctgggctgggtggcccctgtctcggggcttgccccactctgcctgcctgctgttggtcctctctctgtggggctgaattgccaggggcgaggcccttcctctttggtggcatggaaggggcttctggacctagggtggcctgagagggcggtgggtatgcgagaccagcacggtgactctgtccagctcccgctgtggccgcacgcctctccctgcactccctcctggagctctgtgggtctctggaagaggaaccaggagaagggctggggccggggctgagggtgcccttttccagcctcagcctactccgctcactgaactccttccccacttctgtgccacccccggtctatgtcgagagctggccaaagagcctttccaaagaggagcgatgggcccctggccccgcctgcctgccaccctgccccttgccatccattctggaaacacctgtaggcagaggctgccgagacagaccctctgccgctgcttccaggctgggcagcacaaggccttgcctggcctgatgatggtgggtgggtgggatgagtaccccctcaaaccctgccctccttagacctgagggacccttcgagatcatcacttccttgcccccatttcacccatggggagacagttgagagcggggatgtgacatgcccaaggccacggagcagttcagagtggaggcgggcttggaacccggtgctccctctgtcatcctcaggaaccaacaattcgtcggaggcatcatggaaagactgggacagcccaggaaacaaggggtctgaggatgcatt

SEQ ID NO: 749 - protein, 530 aa, Homo sapiens
MGSNKSKPKDASQRRRSLEPAENVHGAGGGAFPASQTPSKPASADGHRGPSAAFAPAAAEPKLFGGFNSSDTVTSPQRAGPLAGGVTTFVYDYESRTETDLSFKKGERLQIVNNTEGDWWLAHSLSTGQTGYIPSNYVAPSDSIQAEEWYFGKITRRESLLLNAENPRGTFLVRESETTKGAYCLSVSDFDNAKQVKHYKIRKLDSGGFYITSRTQFNSLQQLVAYYSKHADGLCHRLTTVCPTSKPQTQGLAKDAWEIPRESLRLEVKLGQGCFGEVWMGTWNGTTRVAIKTLKPGTMSPEAFLQEAQVMKKLRHEKLVQLYAVVSEEPIYIVTEYMSKGSLLDFLKGETGKYLRLPQLVDMAAQIASGMAYVERMNYVHRDLRAANILVGENLVCKVADFGLARLIEDNEYTARQGAKFPIKWTAPEAALYGRFTIKSDVWSFGILLTELTTKGRVPYPGMVNREVLDQVERGYRMPCPPECPESLHDLMCQCWRKEPEERPTFEYLQAFLEDYFTSTEPQYQPGENL

SEQ ID NO: 750 - DNA, 24518 bp, Mus musculus
  misc_feature (1)...(24518): n = A,T,C or G
atagtgagaccctggctaggaaaagagatgaaagagggagggagaagagacaacagaaaggggacttagagaagcaggactccaaaccaaaaccaaaggaagacacatatgctatggtgatttcccaggcttgtaattagctacagattttctttttttttttcttttctgttttccttagtttttcttttgttttgttctattttccccagacaggctatctctacatagtcctggtcgttgtgaaactcactatgtagatcaggctggccttgaactcacagaggtctgcctgcctctgcttcttgagtactgggaggattaaaggtatgtgctaccatgcctaacaatgagaagccctcctcctccctcttcctcctcctcctccccccttctcccccctcttcctcctctgcctcttcttcttcctcctcttcttcctcctccttttccttctcctcttcctcctccttgcttaaccttgagacagagtcttatgtgtgacccttgactcctgctttcgcctgccagatgtgcattgctccaggcctttaattctgcatgggctttatctgagaggtctcttttccctggatgtgtgcttctctcccttctattgacttagtgggtctctctcttctagtctatatttaggtgacagccattgctattggcataaccaataatatttgctgttccttgactagagatctatagctgagaccacagaatgcactcgcagttagtttaaagagtggacatccattgtctaacatcccctgagcagagaatgttaaggccatcctcgccttgatctcatggggtcagtagtttctcattttacagatgagaaaggagaaatgacgggtagctgtaataaagctgctccaactgacctacaaactcgccaaccggcagcacgcatctctactgtttgccgttgagatctggggctactggttatgcagcaaaagctggctggtacaggattcaaactcagttttgttttgttttaattgcatttgccttcccattctcttccactgagcttgctcccttgatccctgctgcaggcaacacacaagcaatcatttttaaatgggttacattttaaaatgcagctacagccccccttttctctgcccctccctgcaatttaacaccgagcaagcattgtaccactgagctgcaccctgtggttacagccatctagctgccgaggaggaaaccgaagcttagaggaaatcagttgtctgggaggcctaggtttacttggaaacccatctcttggattctggccctgggctcattccacaacaccttactggtgctgagtgcttgacaaagcccatcatctggcacttcctgtgtagcgggcacaatgccatgcagttcacatgttccggctcctggacgagtgtggcgaagactgtgtgacagtgacggggggggggggggagtggacatttagttgagctgtcctcagccttcccgcttgttttccaaggctcccttgaagtccccctccctgattcaacatctggtcaatgagaaggcagcgcacctgtgctccagatgttcctgaaatcagaacaggctcattacaaagagctgctgccagagaaaaccgtactagggaaagccgggcagattccaggcagggaacttgcttgcctggtgtgcctctggctcatccctagtatggggttgcggggagcacagctgtgtacaaacctaagcctgcctggctctcatcttcttcctgtgcccatcatggtgatttttccatgtctcagggtcctgatgtttttctccatctttttttctccatctatttactgacacccaactgttagagatactctgactacaaagggcttgcattgccctggttcacaaccctcacctttcaggataaatctaaatgctacttcctctgagatattttctgctaaaaccaacttgttttcctcctcaaattcttttacacaatgtccttcatcatcattatcaccatcatcatcatcagtttgacaggaggtaggggtgtgggtggcattttgtgtgccataatagctgtgtgaagttcagaaggcaatctcgtggtacagtgggctccggctgagccatctcgccagcctttaccatacttacatgttcacagctatgtgtttgtgtttgtgcctgtgtccttgttccttgtacactgcccctgttacactctgaggcccctggaggagggactctttctggcttgcattcatgttggatcccacagcctagcagagcgccagctacttcagctacttaggaagtactcagagagaggtacttgtaggacatggcaggcgaacgaactgatctgctccacactgtgacctcttcactcaggtcccctggaatatgtccctctgttcatgtcccccgatgccataagttaacaggagcaggtgcggttacccgctgctccgtctcaccagccccttcatgcttttcatcacctgatattaaaatatgacatcaccgcctgccttgcttgtctgtggcttcctaaagctagagtgttcctcttggttaacttcgttcgttcgtttacatcagttcctggcaaacaatggatgcctagtgaatgtttatcaaatgaatgagcgacttctaaaaaaaaaaaaaaaaaagtctgagtccttacagttaagagcaaagagtcatttctaggcagagacagggagttacctctaggacagggtcaagaatcaagctacgagcccaggcatgaaagcacatgcgggtaatcccagcccttgagtggctgaacaggaagatgcagagtttgaggtccacctagactacataaggaggcagcctgggctatccaatgaggccttgtttcaaaaccaaagtaaaccaaccaacgaaccaaccaattagaagaaggaggaggaggaggaggaggaggaggagaggaagaagaagaggaagaagaagaagaagaagaagaagaagaagaagaagaagaagaagaagaagaagaagaagaagaagaagaagaaagcttgtcattcgaggggaaggcaattgtttgagaatatgttgcctgcctcttttccttcccaaggtgtcttagatatcattaactcggataggtaacccctggagcagagtccggtatttaagagaaacaataccagccaactagaggcccagccacttactggcatgcctggcattatccaccccttaagagatgttttgcagaaaagtctccgtgataaggcttagaagacagaaccctctccccctggccctctgtggtacagggaagaactggaaactcgcaggctgcaggcagacacagactctccacacttctgaactgtattacccgttgttttggtttgcagcactggcaatggaatccagagttttgcacgtgctaatggagtgctttacctctgagagatgcctctagccattgtggtgcctaattttgatcctgcctgctgaggagacataccttatgcggctggctgaccttgagtgattgccccctctgagctccagtcatctgtgaaatggggacaatatttatgctcaccttgctggggggagggggggtgaacatagacaaggttatgtaggtcagagtttttttgttgttgttgtttgttttttgggtttggtttttttttttttttatgtaaactgtaatgtccagtggactctgtggggaagaggtgacttcgtctagagtcgagctgacttgggttggagttcagcgctgcccctttctggaggcctctgggtaagtagcacccttctctcaacctcaggtttcttatctgctacgtgagaataccaatagtgtgccctactcgaaggcttgttttagaaatcaaataaggaccaaaggagataagagaagcctctaacatacagtaggcacccaggaaatgtcccttctcaaatgtgtgcacacacatagcccttaatgcagtcagggtaacaaagtattctcagtttggaggagaaaacaggcagccaatgagcaacccccgctctcgtttccattctaagaaaggaactcactggccaaagtccaggacagtcagtgatgtggagaacaggaacccatgccaacctcccacacggagtttccaaaaagtgtgagcgcagcattgcgtaacctgtcctaggacgtgccttcagagaacttccacaaactagtccccaaaaggaaacgtgagcagagccgtggagtaacctccggagggaggaggatgggagctgaagtgtggggttgagattggagagagaagccgctggccctggtgccaccagtttgtcctctgagctatgccagaggctgagacaggaggatcacaagttcaaagcctgccggaagtacaaaaagaattgcagagtcagcctgggctacatagtgagactctctgccttcaaataaaaggtgaaaatggagacaaggaaacttgtccatgagacattctccaggtatgcacaaggccttaggtctagacctcagtactaaaagatggacacagagaaagaaccatatttattgagcttctactatgtcctgggctccagattagttctgtctgatacttattatagtaagatccttgtctcaatcctgagagcttaggtatttccactcccacattccaaaggaagaaataactgcagtaatgaatcctgccaacatttacacaacactgactagttatccggctaagaacacatttgatcctcagcacagcccacaataggggtgctactgtgatccctgtgttatggaagagaaaaaaaaacaataagatggggcgggggagggggtgaagtaggttccccaaggttaccaaacgaggcagtaactggagccaggatttgactccagtcccatgggacctgagtggcttcccagggtggatcagaaggtgaccccagtactagttgtccttatatgcttgtagttaggcccccatatggggaatgatgtaagtgaccaaatgaccagacactcagaggacagtttgtcccagctggtggctgtttgccacttctgcctctgacccaaagtttgaatttcattcataagtttgtaaccacagacttggcagtgtgggaagagcccttggggaccagctattctagtccgactcccccgtattacaaatggaaaaaaaccctaaagcttagtgacaaccatggacacatcaaggtcacagaaaatttttcggttggattgggggagttagtttggggtcaattagagagcatcttctagggttgccaaatatgtagctctgactcactcttttaaagttgttgttgttgagacaaggtatctctatgtctccaagcttcctgtaacttctgatcctgtcttggcctctagactccagagtgtacggatcacatgcatgtatcactatgctcagtttgggattagctttaaatgtatagattttggactgaagtgtagctcaatagcatagtgtttgtataaatgtaggaggccctgggtttgatctttagcactggggacacacacacacacacacacacacacacacacacacacacgccatatgcttgtagaagttgggcagttcacttctcttagtctctcactgtgtgtgtcccaggaagtggactcaggtttttaggcttggcagcaagtgccttggcttgctgagctagccatctttcaatcctgacactaatctctacactcagcttttgtagagaatccaaatatgccctgtttcttaaggagctcagatggggcccaccaggggacttgcccaaggtcaaatgacaagtcaatgacatttcctggaccctttgatcaaatgtcaaaaataagctaaggaggctgttgaagagaactgtcatgggtctcttagcccctagtttccttgctggagtcaggttaggacataggtggcctttcctcagactcaacaaggtaggaacccaaaagctgaaccctcaaagggaaaaggaaacagcagggcaggaaaggatgtaccccactactggggctttcccagaggcaggctctgagctgcaggagtgacatcagacgggatctgtttacacagtcgcaacgctaccgtgagtcctatctcaggatgagaaggaacgctcccgtgggggatgagatggggtggaccctaacccagctgtggtgtgaaggggatggatcaagtaaggactgacctgcctgagggaactaagcagggaactacatttccctgctgatctttctctagagctcccccatctgttccctgatctgtgcttcctaggcagcgtgggggaatttatggctcctttttcttttactacagtgccaccctcttcttccttctttctttctcctgtcatgtggaaaggaatttggcgcttgcagccacgtagcctttgtttaagcccagtctaagtcaccttcctctccctccccctctccccctnnnnnnnnnnnnnnnnnnnnnnnnnnnnnnnnnnnnnnnnnnnnnnnnnnnnnnnnnnnnnnnnnnnnnnnnnnnnnnnnnnnnnnnnnnnnnnnnnnnnnnnnnnnnnnnnnnnnnnnnnnnnnnnnnnnnnnnnnnnnnnnnnnnnnntgcctctctgcctctctgcctctctgcctctctctgcctctctgcctctctgcctctctgcctctctgcctctctgcctctctgcctctctgcctccctgcctctctgcctctctgcctctctgcctctctgcctctctgcctctctgcctctctgcctctctgcctctctgcctctctgcctccctgcctctctgcctctctgcctctgcctcccaagtgctaggattaaaggtgtacaccaccaccactgcttggccagcctcggtttcttcacattcagctgtcttgggctatgagatttccatcactcatgtgtgtccctgacagtctcacagacactgagttctgcaagtctgtgaactggaggagtctgaacacttatgctgaactgaactgaggtgcctcaaagatgatggagcagaggagtggctcagcaatcctcagactagagtccaggtgaattatttacagtttccgactgtaagagaaatcacgtgccctggctagagccttgtttctttacttttgtcgagagtcctagcaattctaagtggtcacgtgaccatcgctgctctttgaaaagtctgattagcagctatgtggggccttcgggaaagttcttagacagtgtcgattagatgttggagaatgttcattcactccaactcctcatttcagaaatagggaagggctggtgagatggctcagtgggtaagagcacccgactgctcttccaaaggtctgaagttcaaatcccagcaaccatatggtggctcacaaccatctcacaaccatccgtaaggagatctgactccctcttctggagtgtctgaagacagctacagtgtacttacatataataaataaataaatctttaaaaaaagaaaaagaaaaagggaagctgaggtttaaagaggggcgctgctttgtagtcacactgctagcaagcagcagagtcagcgcgaaagcccacagtcttcctcagaagtgttcacttcccttcccgtgctcttctgtggaagtggggagcttgggtctctgggaacagaaatcaattcagtcatggatttgcctttgcccttttctgttcttgattcattcagcaaatatttgccaactgtccactactcactctcagagaaggcggagatcgaaaatgaatgtggaggcaggcaaggtcatggcgtgatttcagaagctgtgctttcttctcattggatgagccacctcaacacccactctcctgccatcaaatgtagccgtgtctgagcacagggcaatgtctcatgtgtccaaacctgcctagcctccaatggacacaaacccaccattgcaatccctggaaacattgaattataatgtctcctttgctgcagtatggcacacacttttaatttcagcacttgggaggcagaggcaggtggatctcttgtgagttccaggccattctggtctacaaagcaagttctaggaaagccagcagtgtgattacacaaagaaagaaaccctgtctcgagaaaacaagaaccaaaacctgttttgccattaactttatttaattaactaatttatttattttaggtttttgatttttttttttcaagacaggtttttctctgtgcagctttgactgtcctggaattcatgctgtagtccaggctggctgcaaacttacagggatccacctgcctctgcctcctgaatgctggaattaaaagtgtgcaccactaccatctggctaactttatgtttttaagagtgtttgttagctgggcagtggtggcgcatgcctttaatcccggcacttgggaggcaggggcaggtggatttctgagtttgcggccagcctggtctacagagtgagttccaggacagccagggctacacagagaaaccctgtctccaaaaacaagaacaaaaacaaaagacagtatgttgcccctcttctctgacctttagtttaaacatgtgtataatgggagcagaggccaaaagaaaaaaaaaaaagagcctgaaaactctgtactaaagaaagaaaacactgagaatctaaaatgaaaatagtcattttttaaaatgtattatttccttgggagtccttgggaattccatgtgggtctggaatatagcaagtttcagaccatccagggctacatagtgagactgtaagacccctgaagctgggcctctgctcaagtcccaggatgagttggccagcaccccagtgacccgagagaaaaccacacctgatgcaaactgcaagaggttttattattaggtagctgaggatgaagtccctctgctgtgcaggggctgggagttgaccctgagcggtgacagtagggggcttttaacagctagctggggaattgggaggagttgggaggagagttcttctcttccgggtgtccttggtgaaatttacaaggcaggagtggggagtgagttctttctgaatttttatctccatgtcctcggcacaggaaggcaggcatctctggttgtaaagtatagaaacaaaaaggctttttgctggctatagagaacaaagagcttctttctggctgtattttagagatcgggggaaacaagcttggggaacgtccaggggctttaccttccagggagaaacgctctaagtcggggtcccacgagactctgtctttaaaaaaaaaaaaaaagaaaagttcccttttgttaaatttaaattgttgccgggtgtggtggcgcatgcctttaatcccagaacttgggaggcagaggcaggcggatttctgagttcgaggccagcctggtctacagagtgagttccaggacagccagatctacacagagaaaccctgtctcgaaaaaaaacaaaaaaaaatttttttatattgttatcattgtatttctatgagtgtgatagtcagatgatagcttacaggaggcagtcagttcttttcttccaacatgtgagttcaagatataaaatggtcgtcagtcttggcagcaagcatctagccctctaaccatctcaccattcctcagtgaatgctattttattttattttttattttttatttattttatttattttatttttaaagtctagaccttccacccctttccctcctaggaatggacctgctggattttaaaaatctccctctagagggcgcgcaagacccacggttttgtgcctcacttccgtttgccttcatccttcatcttacgcatgtgcagagtttatttccgggctgctcgcaagggcccctttggatggcgtgtagggttcatccactgcgtctgcgcaatgcccctcggttgccgtccccggaagctctcccttcccaggaagccgtgggccgcagctattcggcctctctaggccggcgggtcctccgctccatggtcctgtctgtcagcgctgtgtcaggaggccagtgccgaggtccggtcgcgctccgacgcttcgaccctcgagccggtcgcgggtgagtgaacccgggaggagcccggcggtcggaacgggtgggtccgcccgccccgcctctcccacccgggaatgggcttgctcccgggtcccaggccctcctccctccctcccgcgccgttaccaaggcgacggccggcccgccggctgcagctccctgtgtcttcccgcaggtatcccggcggccgcgggacgatggcgtggtggcactgacaggcgcgggcggctgccgagccccgcgggccggcatggcgggccagttccgcagctacgtgtgggacccgttgctaatcctgtcgcagatcgtactcatgcagaccgtctactatggctctctgggcctgtggctggcgctggtggacgcgctggtgcgcagcagcccgtccctggaccagatgttcgacgcggaggtaagcttagcggaaaggagtggggttttgtggtggggcaccgccgagctctaaatccggctgggccaagttctcattttgtggacactttttttttttaagaagggatttcagtgtgcgctccccgcgcgaccccggtgcccatctgtaaaacggaacgacgagaacagggaaggagatagagtctaggaagcaaagtagtgatctacaaagttcacgctcaggaactgcgcgttcgagatacaaacaagcaaaatctcatagggttttaaagaaccttacagtgttgtgttggctgcctatgcgcttagcctcgtagccagctccgcagcttgtggctagaggttgaacacacatggcagatactacagtcaacagacttgtgtcccgggcaaacatgatgtctctttcttgaaaccctctagaaaaatgacttcctttctcccagctgagcttgtcaggagccacagtaagaagagggatagacaaaagggcatccgtaatgatgaagtggaaactgttaagacttggtgtcagataggtccctttaaattcctctctgccctgtgacttgggcaaatgtttcctctcccgtctgcaatatcacactgttggtacgaggtggtgaactgttcaaagagcctgctgtgcttagggtccaatctagctgagagaacttgaagagttgttttgcctttccaatcccttttatcctctgcaaagtgagcaggataatcctgtcatgttacctatagtaaaatgttaaaaggcccagaggggtttaagaataagaaaatgcttcgtgccgggtgtggtggcacacgcctttaatcccagcactcgggaggtagaggcaggtggatttctgagtttgaggccagccttgtctatacaaaagtgagttccaggacagcaagggtaacacagagaaaccctgtctcaaaaaaaaaaaaaaaaaaaaaaccaaaatgctttgtgaggtatagtggaagcctaagaggttgctaagaggagagacagtgatagttgatatgaacaaagttcttggttcgggagacctgggatggagtccttgtgtttgctactgttgtttgcattggcctttgggtaactaattctgtggaaagagacactaggagctttgtgagatcatggatgtcaaaggcctttgcaagctgaagtatggcacaggtatttagtatttggtagtactctgtcaacaataagtatctcaaacatagcagatgctgagtagtggcaccttgtgggtgactccatccttcttgtaagggccaatgggaatcaggctttgttgcagagtggcctgatgtccacagcctgagttcagccgacggctttggaaggatgagatactaacgggcttttggtcatggttattcaactctgcccctacagtgtaaaagcaatcctaaacaatatgtcagaaaatactgtgaactgtgtttctgtgaagcagaagcctgacctgtggagccacagtttgctaaggagatttcctagacttgattcttgctgtctagacaagctattgcctcaggcaacttccctaaactcttgcatcttttgtaaatggagaatagtagtctctccccatataccatgaggttcaaatgagatccgagtggatgcgtgtgaagagagcatggtgtctcctgtcctctgagaagagtgctcgtgccatcggctctgtgctgggatcctggctgtgcaaagccacctctagcatgtcccctttgtgattccccttcagatcctgggcttctccacccctccaggccggctctcaatgatgtccttcgtcctcaacgccctcacctggtgagtatcaccagctctactatctgtctttcggggtctaacttcctaaacttaagcatgaggcaggctggcacttcttcttgggagtagtaagatgggtcaagagtgtgtttctgtggcctggccccgtcatggtctccattgttgttctgaattaagtacaaagctcagctgtcactgtatgtgcctgatggcgttctttaatgtagtgtgaggtagggaaagaatgacgccaggcaccgggagaattggcttacactcttctcctgtgccatcgcttgagttactttcctcttcctctcctggccccaggctccctgtgtataccaggggttggacttgttagcatcctaggtctcttaggaccattgctcatcttttaaggatcagtttagcatagggaccaagatcttagacttaagagcagtctcacttggctttgaaccttacccactggtatagtgactttggatagtttatctgcaatttggtcatcagtaaagtggggcgaatccaatcacttagctcatagctgtaaagtgctgttaattcataggaagtacttcaaacaatatcttgtcctttatattcggactttacgctgatggtggggaagtatacagatttctggcttttcttgattagtggggaaatggattgattccaggctgtagtaagatttgcctagatgtacgtagcttttgtctgcattttacgtagaccatgtatactttccagtacccagcagtctgaaccattcctgggtagctgtttgtcatcaaactctccacccgacctccctctgtcaaccactcttgatcttacccagtaggtttctgtaggcatctgattaggatgacccttgcttctcacttaccgtgcttgcttctgatcatcatgatgtcatcctaactgtccccacttccccagaaacctgatgtaaggccaggacaacccagtgacaactcgctgctatcctctccccacagtgccctgggcttgctgtacttcatccggcgagggaagcagtgcctggatttcactgtcactgtgcatttctttcacctcctgggctgctggctctacagctcccgtttcccctcggcgctgacctggtggctggtccaggctgtgtgcattgcactcatggccgtcatcggggagtacctgtgcatgcggacggagctcaaggagatccccctcagctcagcccctaagtccaatgtctagagttgggccctttggacactctgctggcacttgggccccatcaccttgggctgctcagacctccagatggggtctggcccaagtctgagcagaaccctggaaatgtgaagtctgttggtggagagataatgaggtcccatcataaaggcaggtagcagccatgatcacagatgtaagaatggcctctgtctgccaaagccttgatatctggaggccagtaagggacctcatggagggtagtggcagatttggaaccatgtcacatgagccatcatactgtcaccagcctgttattttaaaaagaaaaaaaaaaatcaaggatatctgattggaataaaccactcttctcgttgtctgtcttatgcccatgacagccagtacctttgctgtgttgccaaaccacagggattctctgtggagaaatacctgatttctgggtccatagccacagaaaaagatgtaggtacagagtgctaggctgctgacaggacgtcgaggggaggaggcatcaagcacaagaaaaatgcatggccgtgccgttagacacacacacacacttttgtgtgtgtccaggacccatgactgtctccctccagttccctgtatggactctgccttgctgttgtcactcagcacagccagagacaggacccagagaaaaccccagcatccctcccagccttcccttcataataaaagccattgtctgctctctggaagtgagcaggcagccagcttctactggacctcaactgtggcaggagtttctgtttgctgtcttttgagttctgtgatagggagggtgtactaaaggtgctggaggctcaccctgctaagctttcttccaagtggtttcctcaggaagggctggcagctgtccttcctaggtacataaatacactattttccaatcctttggcttgtacttaagtcattgttgggaccaagagagatcaactgtgcacaagagctataaataattagtattccttcattcctgagccccagagttatttctccaggtaaaatactaaatgccagagtaagtgtggtagcactaccttgccctaagacttgggagactgaggtatggggatcatgagtttgaggccaacctgggcaacatgacaaactcaagggttaagagtgaagccctgtctcaagaaaacaggcaaaataactatatctcaccctccacctgcagctgcctctacagtatctggtgtaaactgccacactcccccacccccaccccccagagacacacacttgtgattcctgaactgtggcatacatttttttgtgaagcctctttggtttctggagcttgtccaagctagctgaggatcacagctaagatgagttttgcttcctgcacagagagcccttcttgcctcttggctctgctcggtagagtgagaatctgagactgaaaatattcaaaggctaggtgagctagggtgaggcccggggttaacccggggttggggccacactggctgcagggcctgggcccagctagattggtgggtttcctccctaacacaaactctgaagacatacgtgacagtaatgaatgatttcagcagttgagtgtggctgctcccttaagctgaggattctgttgctccaggcaggaacatctcttatcggtttctcttaaaggctgtgccagcttttcctgcataggtttttgttttgttttgtttttaaatgagaagcctgtgtcctttgactgctaatttgatttttagaaattggaaaatcaccaaaggaaccaaggtggattttttaaaatttctttttattccaattaatatgatgactgagctgagtaacagttgattaaagattacataaccttccccagaggacagggagacaggtctatctccatagctaactggccatcccgcctatctgaagtaacaagtttccagttcaggataccctgtctcaggatagtaggcagagagtgaggggggggaaattccatatcctgctctgggccccgcacgtgtgcatgcccacactcaacctgtacagacaccatatgcatgaaacgcatgcgagatctgtgtgcagtttctgaagcaacagtgcgaatggtttagagagatgagttccaggcttcagtagcagtgacagcatatcatcttaatataaatgcatccacggggtgcttaacaggtgtctgtctagtagtgggccagggacttgcctcttctcatgtgacaacttcagttggaagtcccatcatccgtatcttacagataaggaaactggagcttgtcagcctcgggatttgggctctggaggtgacaatgcactcttgcacagagggcggagattaggatgtgtaagttctgattggtccagcagtctataaccttatagtcaggccttcagacctcactgtatagctctagattaggttgaacagagttttacaagcataacaacctcttcatgaaaaatgggtaggcggtgcataaggaccacagcttatcaagtgacagaggaacgcatgccatgtgtgtctttccagaggatgaaggctgcagtctaaaacaaacctacctccagcttcctggtgaatgaacatacctcctctggagacctgaagtcttggccctgcctctcccttcactctgcctaacacctgaattcaagagacatgtggagacttgtgcacttgccgctcaaaacagttaaccccaaaagacaggtgaggtggggtggagtatggctcagaggaaacctacctcctcttctaggcagccccgttttgatcgactacatggaagtcagaatgcactggcagacatcttggagggaggggtttgagggaaggccccaggtcctcctaagtcctgaaggaatcatgactcataaaggctctcctggaagctgagtttctggggctctcctctgtggctttggggtgacttccttcttctgacccaagggcagtcagagagcaaacatcacggcttgtaggagagtgacaagagctaagggaaactgttgtgacaggcgaggggccgtgtgtcctggcacgtcctactcagtgggacctgccgtctggaggactaggaagctgcatggggtgactgagtcgaggccagcttggctggagtgcgattgtatctcacactctaaccccaacccctgcaaaagacagtactggagtgtttccatgttaactatatacattctttcatgtttcaggtggtgcagtatggtggtggtggggtgggcatgcagtattgttcagggtacaaggaaagcctacatactcagtgtggagggacatctttatcaagtatttcccatctacagctggataaatccatatatgtatgcagggctcaggactgtggagggcagattgtactcacttctttagattattgtgtgaatttcatgagatcccacatgtaacgcagatctggaaagtaggcaatgaccaatgattataaaagttagcagtctctctcctgcatccccattttatagaagagactctttttaccagtctgcctcaccctgcccatgaatattctcacttaatccacggagagagggaccacaaagaaggtgttaacaattcagctccacaccacacaactcacgctccaagcttgatccagatacgttaggaaaccgacagctagtaccttattggcagccaattagcagctcacaagggagaagcaggaccaagcctgggatgttagggaacggaactgtgaaggaaacttgggggaaatctaaaatccttcagcaccccacaaactgaccttccacataagcttcatttacttcagaacctccaggtgggtgttagtggtaccccctctctttttgagacaaggtctcactgtgtagacttggcaagtgctatctatataaaccagggtagccttggactcatggggatccctctagctctgtttccccaacgctgggattaaaggccccacctctcccagctagtgtcccttaaaaaaacaaacaaaaacaattgaaatagtgagatgtggaggtgcacacattcagtcccggcacccgggaggcagaggtaggcagatctggaatgggggagagggggcagcctgttctacagagtaagttcagtgccatttctgggatactcttttctcaaatagtggatcttaccaaacccagaagttgttcagacttaagtagttaaatgcaggaaaggaggcagtggaatgtaagcagatggcagtcacaaatgtccagggcttggggacatggccacgttggaagaagttctgttggaggcagaagttgtgcctttcaccaggcccttcctccccttggtggtggtgtacctcagcctctgcacataggcctcagcctaactcctctccagggcacagactgcagcatgtcaaccttggccaggccttctccactggagcctggtacacccgagtccctctctgaactgggtgccatgaagacagagcttgtgccctgagcacctactgagggatgctggtctgaggtcacaggttaataagcaggaggttgggaagagattgaacaggttatttaccaaggttgatgggacccaaaatggagaccactgagcaggaaaacagctggagaggagcaactggggaggagggtcctgggaagcggtaggggtggtgatacacaggtgggccacagagtgctcagatgcccttgggctccacctctaagaaacagcagtatagtgggacactcccgatgccatgtgtggctctggccggtccatgttctcaggctgcctctccaatacagatggcagtgccaggcccagtagggagcagcagtgtgggagcaagtgaggccgatctccatccttctccctcccagagggctctgtgggaggacctgccctttggtgcctcacctgagggcaggcacactcatggaagccagctccagggaggagacctgggatcctttgactctcccgagctgtgtgtacaaggcctatggttcctgctgacaactggtgacagagatgagatcaagttagccagagccagggctcaagggcgaacctgtgttagacctcagctgtaggacacttgcctatcccacctgtcctggttttcccatgatctttgaccaaggttagagtggttggccaggatccataaactgtgaccaaggaggcccagttattgacaccacaagcactgacaatctatggggagctggattctgggaagactgtgggccaagtccgtgtgactttctccccttaggaaagtagaatggagaaaagccaggagaatgagggtaactttgctctggtgactcctctctgagcaagcctgggtgagtcacctgctgtagaggcatacaagtctctgctgctccttggatctcaggaccattatgaggtacctgtacccaggagacaagtgggctctgacttcatagaggaagtgtgcactgctcaaagggaccaccttgtggggagttgggggaggctgaaggacacagcttggtagattttctgttctggttttacaaaatgaccttaggagccaagggatggaggaggatagccgactcatgacacatacacacccaccctcctcccctgcacctccccaggaaacctttgctccatgtttatgtgatgtcagcctcagataggcagagccagtagtgccataggggagattttatttgtagacttgcgactgtcttgcctatcccttccactaagctgatagcacgatctctacttcttacaattcaagttcccgtctagggttacacaccacctgaaagcagagcatcctgttagttatgagaaccgcccctagagggagctgttattcggtgagcaagcacagggcctgggcgctttggtttttgtggcaagttggagctctttggttttcccaaagggaaacacattaacgtggacttcatgacacagtcggcctcttccattcgtgggaacctcaaccaacgaaggggagagtttcttgtctttgctttaagaactttctctgtagcataagtcttatttaaaatgtgagtaaatcagagttgatttggtctaaagggaagtgacgcagttaagcccagtgtggctcctcctcccgaggtttaaacatcaattgagcttcagagacagagtggtttccactctcctgaggcctcctcatttgagatggtgcatatcaggtctcaatgccatcgcaccttgcctggagcttagagtcagaccaagatgtatcctcagcccagcttagcctgctgtgtggcctgcttcccctctctggaaatggagtctcccagtactgccaaccacagtcaccaagacccacagccccgagcatgagcctggctgaggtggtgtcacacttacctagtgtggatggtacgtaggcagctcagagtgatgcacagcagaaacgggtgcaggagcgcttgaggcaccggtaggtagacgatctacacatgattcggcgccctgggatgtgtatgcgtgtgggaagcccctcaaaccagaccaactggtcagttatatccagtgccttcatcttccccatggtagtgctgtgatggtaggtctttaagaagacaactcggggcttcttaacgtaggtcttcctcttctgggccctggcttgcaagccaccactctttattaccttggagattttaaatgtttcctgcttttttctccatgtcacggctgcaggtgaccccttagatccttgcttgggcttccactttttggatgttttttgcttgggttcctttacggactctgccttcttagaatttggtctcatttcaaggaccctaatctcttggaattttatattattttgtttcactttgtccttgtccctggcagggagaagaaagaccatcagcagattaaggctaaaagggtccttctaacccagccctgaggtggttgctatgtagagttctagctctaccaggctccctgaaccagactgaaaagaaatgtctctggagcctgggtgtggtgtaagagtagtatgggcagaatggatgtgagacctcgggaagtcagatagcaggaccagtatttgaggagcctaaggatagtatgttgttggcacctgccagtatactaggcttctgtctcaactgagagggaagactgtccagtgttcctttcaaattatattctgagaaatcatggcattccaaggagccttctccagtaccctcacctgccctgggtagaaggcaggatgaaggtaagatgcccctcacattgagggttagttagggacaactgtttctaagagatgtttctgtgctttcagaaccatggtgttctgtgaccctgagccacgtggttctgggcttcccagtcacctgtatctgggaggccacattaaagaaagagcctcaggaaggaattaaccgtctctctctctctctctctctctctctctctctctctctctctctctctctctctttctctctctctctcactctctcaccagaaaggagatttcctcaggagtactgcaccagctgggcaaaaccccacgctagctcatcctagctgatgagagtgatgccagtggatggcggctctcaggatctgccaagtaggaagcagtggagccgcagcagactgcagcagtctttggagacagacatgctagactctgatcatccagatgaggtgagacatgtaacctcccagagccctgggtctccatcataaaaatggggcacacgtaggattgttgtgaagaaggaactaagtaggggtgccaagcagagagcagacacttacacacatgttcttcaaattctagagtgacctacgaatgatcagggtctgagcaagatgcatgggtcatcaaattcagagggcagtctgtgagtgagtctctgggcgaggctgccagggagaggaggctgccagggagaggaggcagagaaagctccctagcacatgcacactcagtaccccagtgatcagtgggcccttcactgtcactaggtgactgtgatcgctgttacagccacagctttgctatgaggtgggaatgacttgagacaggtactctaccaattatcaattcaactggccaagctaaatcacttcacttcctgggcttcaggccctatcagtaaaatagcttgagtgaatacctgttgcacagagcccttctataaagagggccactgtttccaatcctttactacaatttctgttcctggaaaagatagccattgggtccgttttatgagtgtataaagagggggtgtgggcaagcttacctagaagagatttgcaggatctttggaactctgagcattgaattccagcaccttctggccagcttatggagttcttggatccggctatttgagctcttgaatagcttcaagagggacaagttttttaatacctgccagggtcaagaaaccggaaagaggtctccagatctcccaggggagcccttcatcccctgtgtgttgcttggctcatcccagggatgagtctgctggctcccatggcacacccggtctagcacttgggggtggcacttcaggtaggggttggcttccctaagcaggggctaaaatagaacatctcaccattttaagtcgattccgctcaatcactttgctcacatgctgggttatcttgtcctgcagtttctcatcttgcatcttaggggtaggaagaaagagagagagctagtataggggaatccccttgagttcctgtattgtgcctttcctgtttgagtacggtctgagcagtcctagactggagtcttggcatgttgggtttggaacagaactgagagagttttagctctaccggcctctatttcaccttcccctttccccttcccacatggctggagagactgtctttgctgtggctggattctctggttagaccccttttatggggcctgccggggctccaggacaaggtctgaccttagaaggcactttatccctcggcctcttctttgtagatggactcatgctggggctgtaggagcaagactggaccagtgctgcctgcaccctgctcctcgcactgcagcgctcggctgagtaacataggatggtgctggagctgccaggcaggggagctgtgacatcactgaaatgtgcgacagcatcaggactgtgtctccaggggtaaagggtgaaggggcaaaaggccacacccatctgtggagaagctcagtatgaggcaggtggtgaatatgatcatgacctccctataagataagaagatggacccctctttttaaatgaagctaagatttttaaaggttatgtagtttataagttcacatgactggttgctggtagagctgagaacatgatgtaggcccgacaagtcaatccatgaaaaggggagttcccaaactgcccatctccagccaggccacatatgttgactggcacctgtgacctttttttctctgtataattcctagaataaaatgagcttatattcagttgaaatcaggcacagtttgggtggtatggctgtagactggctcacactgtagtggagacaagtatccctcaaatagtatatgtgtgtattataaattttactgatagaaatctaaaaataatcttataatgctcttattataaattttattattcagttactattcttttgtttggctttggttttgggttttggagacagggtgtcttggtgtgacagagccctggctgtcctagaactctctttgtagaccaggatgatcttgaactcacaagagatctgcctgcctctactgtttaaaggctgggattaaagccatgcaccaccacatccagcctgttttgggttttaataagtaatttatttttatttatatggggtgtgtgtgtatgtgtgtgtgtgtgtgtgtgtgtgtgtgtgtgtgtgtgtgtgtgtctaggggtgcttgcagaggctggagagagtgctgtccctaggagttagagctctaggcggttatggtgcttgggtgttgggaagcaaacttggatctttcgtaagagcggagtgtgtttctaagcacagagctgtctctccagccctcaattttgtttttgaaataattgtcttgctatgttgcccaggctagcctcaaactcagagagctgtcttggttcctttgcttagctctcccttagttgtctctcccaacgtagctagtacttacactttccttgaattttgcagaagtcttcttcctatccctggccagcatgtggtcatgtctaaacaaatgaacaaatgcggtaccaacataaggactggaatttgtattcaaactagagggcaagaaaacaaaaatatgaaataccagaaactatgaaacaataagagaaactttgaaatttctctctccctcccatgacctgactgcctttgcatagctaatgttttctctaggattttcttttccttcttttcttaatttttcaagtcaggggttctctgggtagccctggctgttctggaacttgctctgtagaccaagctggcctcaaattcatagagatccacctgcctctacctccaagtgctgggattaaaggtgtgctccaccccagcccagcttccattacttaaggacaaaccagttgccaggaactttcttctgtgaagggctgctactggacttttcagctatagctgtaactgcttaccttagttctgtataaagcagccacagatagtatgtgagtgggcatggttttaatgcaagaaaactataaatacaagagatgagctgaatttggaccatgccaaccagggacaaatcaatgaaacaatacttttaaacccagtttgtcatgcttacctctcctgtggaccacttctactg

SEQ ID NO: 751 - DNA, 1586 bp, Mus musculus
gcagctattcggcctctctaggccggcgggtcctccgctccatggtcctgtctgtcagcgctgtgtcaggaggccagtgccgaggtccggtcgcgctccgacgcttcgaccctcgagccggtcgcgggtatcccggcggccgcgggacgatggcgtggtggcactgacaggcgcgggcggctgccgagccccgcgggccggcatggcgggccagttccgcagctacgtgtgggacccgttgctaatcctgtcgcagatcgtactcatgcagaccgtctactatggctctctgggcctgtggctggcgctggtggacgcgctggtgcgcagcagcccgtccctggaccagatgttcgacgcggagatcctgggcttctccacccctccaggccggctctcaatgatgtccttcgtcctcaacgccctcacctgtgccctgggcttgctgtacttcatccggcgagggaagcagtgcctggatttcactgtcactgtgcatttctttcacctcctgggctgctggctctacagctcccgtttcccctcggcgctgacctggtggctggtccaggctgtgtgcattgcactcatggccgtcatcggggagtacctgtgcatgcggacggagctcaaggagatccccctcagctcagcccctaagtccaatgtctagagttgggccctttggacactctgctggcacttgggccccatcaccttgggctgctcagacctccagatggggtctggcccaagtctgagcagaaccctggaaatgtgaagtctgttggtggagagataatgaggtcccatcataaaggcaggtagcagccatgatcacagatgtaagaatggcctctgtctgccaaagccttgatatctggaggccagtaagggacctcatggagggtagtggcagatttggaaccatgtcacatgagccatcatactgtcaccagcctgttattttaaaaagaaaaaaaaaaatcaaggatatctgattggaataaaccactcttctcgttgtctgtcttatgcccatgacagccagtacctttgctgtgttgccaaaccacagggattctctgtggagaaatacctgatttctgggtccatagccacagaaaaagatgtaggtacagagtgctaggctgctgacaggacgtcgaggggaggaggcatcaagcacaagaaaaatgcatggccgtgccgttagacacacacacacacttttgtgtgtgtccaggacccatgactgtctccctccagttccctgtatggactctgccttgctgttgtcactcagcacagccagagacaggacccagagaaaaccccagcatccctcccagccttcccttcataataaaagccattgtctgctctctggaagtgagcaggcagccagcttctactggacctcaactgtggcaggagtttctgtttgctgtcttttgagttctgtgatagggagggtgtactaaaggtgctggaggctcaccctgctaagctttcttccaagtggtttcctcaggaagggctggcagctgtccttcctaggtacataaatacactattttccaatc

SEQ ID NO: 752 - protein, 219 aa, Mus musculus
QLFGLSRPAGPPLHGPVCQRCVRRPVPRSGRAPTLRPSSRSRVSRRPRDDGVVTGAGGCRAPRAGMAGQFRSYVWDPLLILSQIVLMQTVYYGSLGLWLALVDALVRSSPSLDQMFDAEILGFSTPPGRLSMMSFVLNALTCALGLLYFIRRGKQCLDFTVTVHFFHLLGCWKSRFPSALTWWLVQAVCIALMAVIGEYLCMRTELKEIPLSSAPKSNV

SEQ ID NO: 753 - DNA, 25694 bp, Homo sapiens
aaaaatgttaagctatcaactaaaaattatgtcaaggagtacctagtcttaaaataatcatttacagagtacactagcaaaaaaacaaaaacaaaaactgaaaacagctcgtttagagagttaatggaagttcttctataaaactatcttaacctcctggaattaaggaaataatttccccttccccaagttctgagaatctctaaagggatgcaacatgtttgaatataattatttgtggatgtatgggtctttaacctgggctccatgactgggggcagaggacacatgcatggtcagtactcctctaggttatgtgtctctgcatacattattttggggcaagaaacttcagattctttctttatatccacaaaaagaggatgtttgggggatcctccttttgggtgatcctgacccccaaagagttaaaaataatttgtccaaaacctgagattctttgagaagttttattgggttcttctttggcctccaaaaaacaaaatgcagtagtcaaaggtttgtaatactgaataggagttcctaatttcctgcatggggctgaggtacaaaaacccaaacaaccaaacaaaacccacagtgtttacagccagaagttcttcattaaaatcctgtttccaggacttgccaactggaggaaagtttgtgagtccctttgctcctccctacaatggagataattccctcttgaactaattaggagaatggaataaggtgaagtggtgaacacataacatatactcacctatgttgggtccagcactctttctgtatattctaacctgagattgagtgagtctgagagatggcattggtcaaacactttacatcctccccctagcttcctttcaagcaaaaggaaatgatctaggacatcaacaggcagccccctcccatggagctaaaaaatgagctcagacccagcctatagcagaggtggtgtccctcccccttttctcagacttcctaggccggagttaaccaaggctaggtgcacacctggtacatccagagacaccttaaatgctaccttctcctggaatcctccatcctcttcttttaattctcatttcttcctgccttgaggtttctaggactctatctgtcccactctttgggcaggcatccctttctcactcatgttagttttaggtgaagagcacagtcttcaaagttaaagagacctagattgcaatcttggtggtatggagcaagacactttttctctctgtgcctcagttttctcatgtgtccccccatgtaatttgagggtcattatagttcttaacatcataaaaatgttaagactacagtgcttagcacaatacggagcatcaaagtgttatctatttttataatcaagggggcctccccataagagtcttgacttactcccctccccagcagctcctcacacatggttaataacaggtaacacattactattttcagaacagaaaaaggattgggccatagggctctcgcccaggatggtgccaaccctttctggtcttcctcagtttatgtaaatctctctccagctacagataatgacagcttagagtttccaggggctgtggaatgtccagccactgccttgcataaccacagaaactaagaacactaggcccagaagggtcctctcaaatcattcagtccaacagtacccgcattataagataggcaaaccgaggcccacacggtgaatcagcatccaccacaggcattttgaagaattctaaaaataacacctccaattactctttccacttgctttgctttatttttttgtcgtaacatttcccttacctgccatcacacacttattcttttacttgtttattttctgttttctctgccacatgtaagtttcatgagggcaagaacattgttgtgttcacaactgcatcccttgcaccttgtccaaggtctggcagaggtttacattcagtaaatacttgtcgcatggataactggatgaatgccatttggacattttcccttagaggctcagatgtagcaattcactcacttggtcatttatccaaaaaacatctgatgaatatcttgtatgtgagaagcttttcgataaatcctggtgaacaagacctgtccgtgttcttaagcagctccctgattagcggacaatagctgccagctatacagtagactgaggatctactatatgccaagctgtgggctggcaactttatatgcatcttctctgtcttagctcagttcttgcaattgcgaggaaacatgcctcactcaggactccttaagaaaaggcttaggagttattaggaggaccgggagggctaaaggttaaaactgaaagggaaacatcaaggactgagatgatgccacagactggctgactcatctcttgctctttaagcctgcttattctttctttaagagtgtctcttctttttcctggatgtgtgcctctctctcttttactgacttactggttctctcttctagtctaaattttgggaggggaccacaagactcattggcttggccaatggccttccttattccttaagtaagcgcctgcagcccagaccactttttggattactatttggcctagaggttgaacatttagcttctcacataccctgagcagagtgtatgtttaatcagaagggagtgttgagcatcatcttcacttggatgctgtgaagtaagtagttttatctctattttacagatgagaaaacaggcggagcaaggagaaatgacaacaaaaccgtaactgtaacaaagctgccctaacccacctgcaaatctacaattgagaaatccatttctgttgcccctgagatttgtggggtgtttgttaagtagcaaaagctgactgatacaagattcaaactcaagtttctttgattctgtctgcatcaccatgctgtctcactgaacttacagccctgattcctgttcctgattcccaagtgtcctgtcctaaaaggagcagagataaatattgtattcatccattttctgatgttataacagaatcccacactgttggtgttctgagtatactgacattccttgacgctagattttatattgttgattgacttgtttatcatctctctcctctatgagattagagtattttctctttattcactttattcatttatatccataccacctggatcagtttctggcacataataaatgctcaatgaatatttatcaagtagatgattgaatgaataaataatgataaaaaggaagtgtaaaaaaacaacttttcatcttaaaacaaggccctgagtcctttaaggtcagaataaagaataatttctaggtagggacagaaagtttagtacatgatggatggggtcaagaatcaaggtaagaaaacttgaaggtgtgaggctgggcacagtgtctcatgcctgtaaccccagccctctgggaggccatggcatgaggatcacgtgagcccagaagtttgagaccagcctgggcaacatagtgagattccttctctacataaaataaaataaaaatagccaggcctgatggtatgcacctgtagtcccagctactcaggaggttgaggtgggaagattgcttcagccccggagtgtgagcctgcagtgagatatgatagcgccactgcactccagcctgggtgacagagcaaggacctgtctctaaaataacaacaaaggccgggcacagtggcttacacctgtaatcccaacactttaggaggctgaggtgggcagatcacctgaggtcaggagttcgaaaccagcctgaccaacatggtgaaaccccgtctctactaaaaatacaaaattagccgggcatggtggcacatgcctgtaaatcctagctagtcaggaggctgaggtaggagaatcacttgaacccaggaggcggaggttgcagtgagccaagatcacaccgttacactctagactgagcaacaagagtgaaactccgtcttaaaaataaaataaaataaaacaacagtacaacaatgaaaataatacaaataaaaattaaaatatagtttcacaactatttacattgtattagatgtttagagatgacttaaagaatgtgggaagattgcatagactatatgcaaatactataccattttatataaaggatttgagcttctctgggttttcatatctgccaggagtcctggaaccaaccacccatggatgctgagggatggctgtactcagaggtccttccacccactgtcatgcctggcatcatccaccctgcatagatagagggtttgcagaaaacccctgatcattagacacagaacacagaaaaccagtttcctgactccctctggtgtgaaggaaagaacagggaggttggggtggaaagttagagtggaaagacagacaccccagatgtttcttaacttttgattattccagctgacaagacatgccacacctcaatgtgtactgagtgtgagtcacttccttctctaagcctcaatttccttacctgtaacatgtggacaatgtttatacctacatccctggggctgttgcaacaataagatgaggtcaggtagatgaaagctgtatgtcactgtaatgtccagtgcctttttttttttttgagacagagtctcactctgtcacccaggctggagtgcagtggtacaatctcagctcactgcaacctctgcctcgcaggttcaagcaattctcctgcctcagcctcccaagtagctgggattacaggcatgcaccaccactcctggctaatttttgtattttttgtacagacagggtttctccatgttggccaggctggccgccaactcctgattgcaggtggatccacccacctcagcctcccaaagtgttggaattacaggcatgaaccaccttgcctggccttcagtgcgctttttgttacacactgagaaggaatagtgtgtggagtcaaactggcctgggttggagttcagctctaccactcactggcagcatggctctgggtaaatgtcccttctctgagcctcaggatctgcatgtgttcagtggggctattaatagttctcaactcacaggcttgttttagaaattaaataaggattaaattatataagtgcctgtcatacagtagatgctcagcaaatattcctccccaaacacagacacaaacagcacttaaagcaacctgggtaacaaaggggttttcggtctggaggagaaaccaggcagctaatgagctctctctccagttttccttctaagagaggaactcactggccagagcccaggatggtcaccgatgtagaggacaggcagccaactccaagcctcccacgtggggtttccaaaaacctgtgagcacagagttgcataacgtgtccctgagacacgtgtttctactgaagtgtcttcatcaaatattccctgaaaggaaacatgtgagcagggcagtagggcagcctagcgggggaggaagggagagggggaggaagggagagagggagggatctagagaacacgacagtaggggtgagaggaggaagagaaggtatcacatttaatgtgctcttactatgggccagccaccgggcttgacttgtctgatacattgttagatccttgccataaatctgagatcaggcatttccgttcccacattccagaggaagaaataataacaatcatattaacattgctgaggttaacatagtgcccactgcatatcaggcagtggactaagcacacatttgaccctcaggacagcccataacatgggtactattctgaactccactttatagaagaggaaaccaactgagactcagagacatgaagtaactttcccaaggtcacccagcaggacagcaagacagccagagagccaggattcgaatctaagcagggctctcaagcctatgggcctatgggagaacatttcccaagggatttatgggggtggatccagaaggtgaccttagcgattgtccttacatgcatgcagtggggccccagtgtgaaagtgacgaaagagaccaagtgaccagaggcactcccctcccctccacccaaaggacagtttgtcccagcttgtggcttttcgtcactctgcctctgacctgaagtttaacatttcattcataagtttggaaccacagacttggcagcgtaggaagaaccctcgtagaccagctagctattcaaatccaatcccctcatattacagatggaagaaaaccctgaagccggaatgtgactcgccaaggtcacagagcagttttctgttggatgaaggagccggtttagggtcaactacagatcatcttgtgctgtagttatcaaatgtgggtgcacctctgaatcacttggggagctctctaaatacacagatttccacactctgctttgggagacttgaactggacttaggtttgcaaacaaggactggaaatttgaatatccagtatgttcctcaggtgattcagatggcacagggccacgacagcatctgcaagtcggagtccaatgtccctctttcatttgatagtttgggatactgggacccaccaggggactcgcccaaggtcacatagcaagccagtggggctctagttcagactctgtggtctgaagcagactgcttgtggtcaaatttgaaaatgggccaatgaagctaaacaagggggttgccatgattttccccagctcttggtttccttcttggatccaaattaagacggaggatgatgtacatttccgaagcttggcaaggcgggaatccaagaactgaactcccaaaggggaaaggaaagggcaggaggttagcttgcacgcccagtggggttttcccagaggtgagctccggactccagggatgacatcagacattccagccagccctaatatcaaaagctacctgtgttttctagttcagcagaatggggcaggcctttcctattgggaggagatggggtggagtgggcccagctgtgacgtgaagggagcagagcccaggaagagccacgcattccagcatctgcaaggaagacagctgccctgggtattgtcaacctctgcagcccttttctaagcctttcctcccatttctccctaatccctcaccccagggctaactgagcagagagattcactgccccttttccacttcctgctactccaccacctattttactatctcccttcctttatttccctctccctccctcccttcctcccttctttcctgttcttttattctaaaatggcatcttggctggacacagcggcttatgcctgtaatcctaacactttgggaggccaaggtgggaggattgcttgagcccagggttcaggaccagcctggacaacatagggataccctgtctctacaaaaaaataaaattaaatgaaaaatcaaaaaagccaagtgcgggccaggcatggtgactcatgcctataatcccagcactttgggaggctgaggcgggcagatcacttgaggtcaggagtccagaccagcctggccaacatggtgaaatcccgtctctactaaaaatacaaaaattagctgggcatggtggcacacacctgtaatcccagctactcaggaggctgaggcatgagaatcgctcgaacccgggaggcggaggttgcagtgagccaagatcatgccactgcaccccagcctgagcgacagagcaagactccgtttcaaaaaaagccaggtgtggtggcacatgcctgtggtctcagctattcgggaggccgaggcttgggcctgggagtttgagggtgcagtgagccatgattgcaccactgcaaaccagcatgggtgacagattgagaccctgtttcaaagaaccaaactaaaccaaaccaaaactaaactaaaagtcatcttgatgtttggagtcagttgtcctgaatttgaatctcagctctgctccctgtgagctctctgacctagagagtcacaccacctccccccaagcctagtttcctcccctataaaaaggggacaatagctatattttcagattgtgagaattaaacaagatcatgtaggcacttaagaaacagatgttttctcagaaacactagatcatgtgcataatcagtgaactagaggaatttgaatacatatttgttggactgaattgaggtgcctaaaagaatggttgagctggaaagcacctaagaaatctttgggccttaataactccccaactggagtccaggggaactgttcagggtatttccaaatgataaggacaatcgcacactctcaataaagtctcaagtttctttacttttgtctggaattgtatcagctcaaggtgataacacggctatcacaagctgttcagaaattctgattggcagttacatggctctttgatacgttttttttttttttttttgagacggagtctcgctctgtcgcccaggctggactgcagtggcgcaatctcggctcactgcaagcttcgcctcccaggttcacgccattctcctgtctcagcctcccgagtagctgggactacatgcgcctgccaccaggcccggctaattttctgtatttttaatagagatggggtttcaccatgttagccaggatggtcttgaactcctgaccttgtgatctgcccgcctcagcctcccaaagtgctgggattacaggcatgagccactgtgcccagcctaagttttttttttaatgagaaaataattactggaaggtagattaaatggtggaaaacgttaatcatgtccaactcctcatttcataaacagggaagctgaggtttaaagaaggaagtggcttgctggtcacactgggtggcatagctggccctaaaacccaaattcttttcctggaacaacttacttcccgtctttccacttcagagagggggaacctaggatcaatgaagttgatgggttttcgtctgctggagtaggaataagtgagttatcgatttgctcttgctttttctgttcttaactcattcagcaaatatttactgactgtccactattcggatttggaagatagataaaacagtcatggcagcagagagggtcaggatttactcctatgtgcgacttcagaacctgtgcctttttccaatggacacccacattttaaaacacccactactctgccttctaatatagttcatctgtgtctcagggcaggggctgtcttatatatacatgttctagccttcctgccaccgagtaggtgcgaaatcaatgttgtagtgttgaggaaacacttgaattttatttatttatttatttatttatttagagacggagttttgctcttgttgcccaggctggagtgcaatggcgtgatctcggctcactgcaacctctgcctcccgggttcaagcaattctcctgcctcagcctcccgagtagctaggactacaggcgtgcgccaccacgccccgctaattttgtatttttagcagagacggggtttctccatgttggtcaggctggtctcgaaacaccgacctcaggtaatccgcccacctcagcctcccaaagtgctgggattacaggcgtgagccaccgcgcccgaccaacacttgaattttaatacttactttgctactaactgtgtcgttgaaacagtatgttgctttccttctctggcccttagcttaactatctgtacagcgggaacattggcaaactcctacgtggaggagcttgcaggtccacttcaagttatcagactctaactaggagaaaacattgagaatttaggctgaaaataacgacacagtttatcacctcgttaattcccaaacatcattaccgcgtcctaagccaccccacttccctctcccctagccgccttcctttaaaaaaagaattcccctctagagggcgcgcaagctctgcggccttcgttcctctcttccgtttgccttcactcttccttctgcgcatgtgctcagttcgctatccggctgcttgtacctggttcaggaggttcaggcagaggttgcacccactacgcctgcgcaacctcagccccgcccctccgctgctttccccggaaacgtttctttcctacgcagccgctcctgccgccgtggtcgctggagctttgcctctctaggccggcagcgcctctcctccatggtcctgtctgtcagcgctgttttgggagcccgccggtgaggccgggccacgctcagacacttcgatcgtcgagtctgtcactggtgagtagaccccagaggagctcgtgtacgggcgggggccgcgcaggcggaatgggctggatttcccctcactctgagaatgggtctgtctgccccgccttccccctgactcttggaatgggctcaccccttggttccagtccctcctcccgggcggggcgacgttgccatggagacaggccgctggctgaggcccggctcgtgtccctgcagggcatggcgggtcagttccgcagctacgtgtgggacccgctgctgatcctgtcgcagatcgtcctcatgcagaccgtgtattacggctcgctgggcctgtggctggcgctggtggacgggctagtgcgaagcagcccctcgctggaccagatgttcgacgccgaggtagggtccccggactggggcgggtggggtctcggcctccccgagtaggctttgtggtccatcactactgtgctgtagacgtggctgggtcaccttctttctttgtagccctgggaaagggatttcacctttctgagcctcagctgcctcatccataaaatggaatgacagcagaggctgattagtacaaagaaaagggcctggatgttaatacaataaacacgtctgtgttccaggcaactctgatacatttcctttctgatactctgggaaagtgacttgatttctctgagctaggttctcaggtgccatatcggagagaggggtggataaaagagcattcgtgcgggtacagtggaaactgcctggactttggggtcagacaggcgtccgtttaagatccacttactagttgtgtgacctggggcaaatgtcacctctgtgaacttgttttcctgtcttcaaaaccatgagactagttgcagagaggtcgtggactgcaatataaagagcatgtgctttgggttcagaaaagcaagggttcagtctaggcctaaacatataaaactagctgtgggaccttgggcaagttgcttcccctttctgagccttttctgaaaagtgggccggatgctcctaccatgttgccctcaacaaaatgttacaaggcccagaggggtttaggaataagaaggtactttgtaaagtgtaaaggaggcctataagttgttacatctaagaggcagctgtggcgtggtgatgagcacagttctttttttttttttttttttttttttgagacggagtctccctctgtcgcccaggctggagtgcagtggcaggatctcggctcactgcaagctccgcctcccgggttcacgccattctcctgcctcagcctcccaagtagctgggactacaggcgcccgccactacgcccggctaattttttgtatttttagtagagacggggtttcaccgttttagccgggatggtctcgatctcctgacctcgtgatccgcctgcctcggcctcccaaagtgctgggattacaggcgtgagccaccgcgcccggccgagcacagttcttaaagccaggagacctgggatggagtccttgctcctgctgcttgttctctgtgttagcccttgggcaagttattatccaaaaagtgataagaattaaaagaagaagaatggctttgcgaggtttttttagggataatatgagattatgtatgtcaaagacctttctttgtcagctgaaagtgtggtgcagatgtttggcatttgatagtattgtgttggatagtggaggttgcacacccaccatatgcctagttgtagtctcgtaggagactctatgctcctgggaagagctgtgggaatgccaggctttgttgaagagccatatgatgcacacaacctgagttctagcctagggatcagcaaacctttcctttaagggtgaagtagtaaggattttaggtcacaattattcagctctgccattgtagcacagaaggctgctatagacaaatatataagtgaataggtgtggctgtgtttcaataaaaccttatgtacaggagcagatgccgggcctatggagccatagtcagctgaacgctgttctagactttactcttgttgtttattactttgggcaacttaacttgtctgagtttttacgtcctcctttgtaaaatgagaataatccctttccacctgctgtgagaaacaaatgaaatcccataatggatgtctatgaaagcacctattggaaataggctgccgtacagatgtagggaggtattatcttctgtgctctgggaagaatgcttgttccttaggaggcttgctgagatcctggggctctgccaagtcacttctccagtatatttccatttgtgattccccctcagatcctgggcttttccacccctccaggccggctctccatgatgtccttcatcctcaacgccctcacctggtgagtatcaccagttttgctatccagcttttgggctcttagtgctgggactaacttcctaagtttgaacatgagacaggctggcacttgtttctggggagtggtggagtaaagtgggtgacagaggccagttctgggaccagctgtataatgggcctccttccattgctgttttgacttacctggaaagctcttatgtcactatgtttgtgctgcctgcaagacaacttccatctcagataacttccctgatgtggagtgagctgagaaaggattcgaccgagaggcaggagaactgggttctgttcttggtttgtgtgccattggccaagttacttgccatgggcctcaggctcctcttttgtccatgagggtttggactcagtgatgtctaaggtcacacgtaatcattgcctgtctcttaagaggcagtttagcatagtggtcaaggtgtcaggctctggaggcagactcatttggcattgaacctcagctttactactagtctagtgactttggacaagttaatctaccacagttgcctcatcagtaaaatggggctagtaatattacctacctcatagttgtaaggattaaataagttaattcacaagaaggacttagaacagtgccttgcatgttattattattcttgtccttacaccggaggttgaaaactggtgggctgactttgacctaaatttgtcttccagataggttctatttggcttacatagatgtcagcccacacatggtgtttaaaacatttttttcacttagttgaaaatcaggctattttatataaaaatccagatttctggcttctcttgaataatggaatgactgactgattccaggccaaccttctagcatgataagatttgcctagatgcaagtagctactgcccccctttagctagaacatgtatgcttcagggtgtcatgatccccaccaattcctaggatcccctagtgacaattgccatcgatcatcaagctcatactcagtcagcttcactcttgacattacccgccaggttcttctaggcgtctggtatcataacccttgcttcacacttatctcgtcacttctgaccactatgctgccgtcctaattgtccctaccctcccaaataacctaaggccaggacaacccagtgacaactcactgctgtcctctccccacagtgccctgggcttgctgtacttcatccggcgaggaaagcagtgtctggatttcactgtcactgtccatttctttcacctcctgggctgctggttctacagctcccgtttcccctcggcgctgacctggtggctggtccaagccgtgtgcattgcactcatggctgtcatcggggagtacctgtgcatgcggacggagctcaaggagatacccctcaactcagcccctaaatccaatgtctagaatcaggccctttggacatcctgctgacacttgggccccttaacaccttgggctgctcagaccctccagatgaggtccagcccagatctgagaggaaccctggaaatgtgaagtctctgttggtgtgggagagatagtgagggcctgtcaaagaaggcaggtagcagtcagcatgacagctgcaagaatgacctctgtctgttgaagccttggtatctgagaggtcaggaaggggacctctttgagggtaataacataattggaaccatgccactcttgagccacaatacctgtcaccagcctgttgttttaagagagaaaaaaaatcaaggatatctgattggagcaaaccacttctttagtcatctgtcttacccccctgggacagctgttacctttgcagtgttgccgaatcacagcagttacctttgcagtgttgccgaatcacagcagttctgttggagaaacgcttggtttccggatccagagccacagaaagaaatgtaggtgtgaagtattaggctgctgtcagggagaggatggcagatggaggcatcaagcacaaggaaaatgcacaacctgtgccctgttatacacacgttcatgtgcacccaagaacctatgactttcttccagttccttctaccaggtccccatcctgctgccagctctcaacatagcaggccataggacccagagaagaatcccagtgttgctcaaagtctaaccatcataaagacactgcctgtcttctaggaatgaccaggcacccagctcccactggactccaattttttttcctgccttatttagaattctttggcgggaagggtatgatgggttcccagagacaagaagcccaaccttctggcctgggctgtgctgatagtgctgagggagataggaatttgctgctaagatttttctttggggtggagtttcctctgtgaggggcttgcagctatccttcctgtgtatacaaatacagtattttccatggttctgcctgcacttactttgtaatgccacggttgagattgagagagatcagtgcagccaggcaagggaactttaaagaattattaggccaccttctccctttcctggaccccagagtcattcctccatttggttaaaatactcagtgcagggaactcttacatcctgtctccttcacttgcagcgtcccctgctatgcctcaggtgaaccacataattcttgggtttccgttcctacttgctagtgatttctgaacatgttcaatggagcggcacacagtctagacccacttccgcattgaaaccttcactgttcctctttggtttcttcagagctttcccaagagagctgtcagttttcagctgtcagtaacacaaatgagtttatggtaacacaaatgagttttgctatctctctgagaagctcatctgacctcctgactctcagccctacagagtagggagttgatgctgacaggatgaaggtttaggaataaatatgcctgggaagagactgggaaggttctagggtgaggcacctcagtaactcatggtaccttggccaagttggaaggaagcagtttgttaatgaggcacagtaatcctggctgcagggtctaggaggtaagaccagctgggatgaccttccctgggttaatcaatttccctctagacaacacaaactgcaggcatgtgactaactttgaaagaacacccatcatgtggctgctgtcacccttgaccagctgtggtggtggttactccatctgtggttggagcgcctctttgggattcacttcaaggtcttgtgcctatttttctgcatatcttctgtgatgacaaatctctgtcccctgagtgttaatttgatttttagaaatggccaaaagtaacgtgatccaaactttttttcagtaatatggagactgagctgcatggtagttggggatcaaaaatatgtgaccttaatgagatttttatgatttctaaagtaacaataaaagcagtttttagagttgagttccagagagggcagggcaatggcagtgacatgtttgtcattttaataataaataacatctattgagtgcttaagaggtgtccagcagtgtgggctgagtgctttatgtctcttttcaaaatcttcacaagaaccctctgaagtaagaagtaacgtcatctgtatcttacagatgagggagctgtaaggaacttacccaaggtgactttttaggagctggcagagccaggatttgggctctaatagtgatattaataagctcattttgaagaggtcagtagttagggatgtataagttctgactggctaaacagtctggttaaatagtttatcaccttataatcatatcttcttgtcctgtcaatttttttaaataccgaggatgaatagtactttataaacattactagctttctaagaaaagctgatatgcagtacattaaatatagccagagatttccttttttttttttttttttgaggcagggtcttactctgtcacccaggctggagtgcactggtgtgatcttggctcatcatagcctcaacctcccaggctcaatgatcctcctgccgcagccccccaagtagctgggactataggcacatgccaccacgcccagctaatttttgtatttgtatttttatttttatttttttagagacagggctttgccactttgcccaggctggtctcgaactcctgggctcaagagatccacctgcctcggcctcccaaagtgctgggattttacaggtgtgagccaccaagcccaactggccttttttttttttgaaacagagtttcactccgacttcattacccaggctggaatgcagtggcccaatctcagcttactgcaacctctgcttcctgggttcaagcaatgctcatacttcagcctcccaagtagctggaattacaggttggcaccatcatgcttggctaatttttgtatttttcatagagacggggtttcatcatgttggccaggctggtctcgaactcttggcctctcaagtgatccacccgcctcagcctcccaaagtgctgggattacaggcatgagccactgtgcccagcattggccagagattttcagatgatcttaggaatgtgggaaatctatttccaaaggataaaggaaggtacctagataagagagtactagcccactactgagttggcatatctcttaactctccaggtgtctgaagttgacctccctttttcccacccaccacctgaactctggccattcagagagaaaagtggagactcctacatagctgatggtcagaatagtttataacccttaaaggaggacaggaaaggaaaaagggatgtctggctcagagggtacttctaacccctcgctctaggcagccctgtccatatcagtgccaaatgagagccacgatggcagccagcagacatcagggggtacaatgggaagctccaggactcccagcatcctggagggtacacagctcaaacagtctcccctggacaggaatccccttggactccttcctcagcaactcccaggtcagagtagcttccttctgccagccccagaaggcagtcagtgcacaggtatgcaacacctccttgtaccggcagcccagggaccacggagtctcagaggtagggccctggggacctagggcagaggagtagggatggaatcaaggtacaagagaactcctctgtggagagattaaaaaccactgtcttaaggttttctgttgtaaagtaataaagggtggtagaaatagcattgaggcaggagggagtagagggagctgagggttttaatccctgccctgccgctacctgggcaagtcacagtcctaggtccaattctggaaggctttagagagctgcagtggagtgcaaagtcctggagtcccattactagctgtgagatcttgggtaagctatgttacctcccttacctagatttcctcatatgtaaaatgagggtaataatggtacttatttccctgggttttgttttgtcttgttttgttttgttttctggtaggtcaacacttacttctttaaaatggaaaaagtgttccctccctggttttattgtgaagatgcaataagatgtcacgtgtaaagcgcctagcccagcccctggcacgtaggaagtgatccataattctagacaattattaggctaccgtcccccctatccattttacagaacagggacatttttcttctgagcctgtgttttcaaatgttgggggataggcttgccagtcctctaggtaccactaccaagtattgagctcctatctggcatgtactgcaaagtgatttatgtgtattcttactcagtccaataaggtaagcactactatttcccccattttgcagacaaagaaacagaggattgggagtaaacaactttttccccattacaaagttggtaagaagctaggcctgtctgcctcatctgcttttcacgttccagttatgtttatgtgtgatccagacaattgtgagacggacagtcttagggatctaaatgccatattagcaaaaggttgtgaatgtaaacgtacgtttggcttgttaacaagcagctagttccataaaggtgagtagttaggtagctgctgataagtgagaaatggagccgggactgactggccacagggctttattatgatggccgtggtgtggcgtgggaaaaggccaaacatttgttcaatgccccacaaactggcttctcctacatcaagcttgatttgcttaaacccccctgaaacagacattagtatcactattttataaacatgaaataggctcagagaggtcatgtgacttctaaaaagtcactcaatataaaatcagattcaaacacttcaattttttcccagttaactgttaagcagccatttctagggtggcctcctccccaaatctgtgttactgggcccagaggaggagctttaggttgaaatggttaaacaaagagagggtggtagtggggagaccctggttgtggaattgtgggaggcaggtggccagaggcctaagtgccggggcaggtgggatgaggtggaaggatgtactgctgggattccctcactcccagacctgccccttgctgccctggccatgctgggtccccgccttcgtatacagccctcccatatattcagtggcgttcccagtgggcaactggggcccaactccggctctctggagcaaagtggaagttgccagtctcactcaggcccaacccaatccagcctccacttggggctccctgggcaggcccccacgaaggctagtgcaagggagctccccagaaagggtcagattttttagctgggagggcgctgtcttgactgcccgctgacagcgcactcaggacagaagttcacgcaaaggttgatggaatggaagagtgagtagagattattttcgaaagttgatgggattgaaaatacccagcaagggaactgcaagggagactgttcaggaaatgggctggagtgcaagctgggtgggaagaccgctgaaagtggttactggggtggaatttgcacgggaattagcggggtggtgggggcggaggtaggcaccgaccgtaggggagctccaggaagattgcgctgggagcaggagctcgggagcacgcagcagccactatgaggtgctaagcagtccccgcgctgtggctccgcccaggctggtccgcgcggcagctgatgcccagtcttggtgcccagtaatggtggggaggagtgtgtgagtgggcggggtgggagggggggagagtccatccaatcgttctccctctgtcccaaactggagatctatctgcatcgctgccctgacccccaatcccggagagctctgtgcccctcgatggctccactgctctcccgagggcgcccactccatgcagcctgcctctggggaatatggaggtcttcgtccggagaaaactcgggctcccttggctttcctctccccaacggcatggttaggaccctgtgactcctaccgacagagggtgaccccggccagatggggtcgaccagggcttggggttgaggtcttcagattgagggtggacctgccatgtcaccctggagcagtagagatgcagtaccagctccccctcctgatccggtgccttctgtgatctgtgaccaaggcaggacacatttggaggcccagctgacatccactttttgacaccagccacagtgcaatcagtttttgacaatcaatttttgacaatcaggtcgcaatgcacgcgcatgacctacagggtgctggggctattccgcctgcctcgtgacttctgagcaggctctcatttcgccttttccctttcttgggaaaatggaatggggagcaaccaggagcccttgctcctgccactttctagctgagtgagcctgggcaagttacttgctgcctccgcgccgcggtttcctcttgcgagctcgcggggcgattgtgaggcactttgcacccaggaagcacacgagcgccctgacttcacagagcgcgccactcaggagactagctcgcggaggtgggggaggggtgctgctcgctggcttctttggttctagactgaccttaggggcctcggggtgggggtgggggaagcctgaagtcgcgacacaggctccctctaccgaaggcctctttccttcatccttcccagccccagacaaacaggcagagtaagcagtattcgtcttaggtgccatatggaagatcttatttgtagactcgtgaatttcgccacccattcctccccttcagctgatggcgcgatctccaccctctgctcgcacctctggctctcgtccaggtcacatcaacctgccagcagaaacctcggtgttaggcgctaagactgtccccagggggcgctggtcgtttggggagcgggcgcagggacaagggtgctgtggtgtctggtaggttggaaatgcctttgctaaaaaggaaaagcctccctttaagctagacccggtgggcactcacccccttcctttcgtgggactttcattctcccacgaaagggctgcggtattttcttctttttttgctaaggaactttctgctcagagtaaatctttttttcctttctttttttttaagacagggtcttgctctcttgcccaggctggagtgcagtggcgaagtcacagctcactgcagcctcgactcctgggcttaagcgatcctccgacctcagcctcctgagtagctgatactacaagcgcaaggcaccacatctggctaatttttaaattttttgtagagacagtgtctcattatgttgcccaggatggtcttgaactcctggcctcaagcagtcttcctgcctcgacctcccaaggtgctgggattacaggcgtgagccaccatgcctagcctgttcagagtaaatcttatttgaggcatgaatcaatcaaacataaatagagagttgaattgatcttagagggaatgggatgcagcaaagccctacttgaccatctcccccctcccacatttggaaatccttaaacccacttatgtaggcctctgactgtgagattcagagccacagcagtttccacctctgctaaggccttcaggcagtgagatggctcacttcagtgcccctccttccacacatctcctagctgtatcctgagacgcctcaacctagtcactacccttctgtatgatgttggtctaaggcttccccctctctggacatgaaggcggagcctcccagcactaccagccacacaccactcaagactccagatcctgaaccctgactctggggcccagctctgggcctggcttggggcttgcatctcacctagcctggcagtgttgttgtcacacccaccttgtatggatgccacataggcatttcaagtgatgcggagcagaagcgggtgcagcggcgcttgacccaacgcagggtggaggatctgcacatcaccctgggcgccgggaggtggattcgtgtgggcagcccctcaaaccagatccactggtcggctacatccagctgcttcatgtgccccatgggagttctattgcggtagggcttaatgaagatgactcgggggccctcggtgagtggttgcctcccctggactccagggttcaagctatcatccctcgatgtccttggaacctcaggctctatatgcttttctttccgtggcattgccgccaatgacgttttctccttgttcctcatccctgactgcacctgggacttccactccttgtactcttttttcttagggtcccctgtggactctaatttcttggacttgagttccttctcggagcacccgatctcctggaactcttcattattttgttttgttttattgcaggcactgttttccctggcagggagaggaaaggcagtcagcacagcaggaccgaggccctggttcccgagacagttgctatgtagccagctcaggggagcctgttaagaaaggctagaggggcctgcaaagaaacttctctactgcccagaggccttgtgctggtgtgaggaggtgtgatgagcactagcagagggatgtgagagattgggaaggtgaaagccatgactagtagttaaggcccctaagaatgaatattgtctacatcatctgccactagattagggttctgtctctctggacttcagctgggagggtgaacagtccagtagtttttctaaattgtgctccaagaaccttagggttctgaggaggtgtctcaatgtcacctcccctgacccactggggcaggatacctctccccagctcataacaacacaattggggcttggaaatagatatttgaacagaggtttcactgctttaataaagttggaaaactgttcaagaccagcctgggcaacatggtgagactctgtctccatacaaaaaaaaaatttttaagttggaaaatgatggggctagatgatcctgatccttctagctctatgtttcctgattgcctgcgactagaggccaaatcagaaagaggagcccagaaaggtggccttgacagaaatattaaatgctgagactttcccaaagggtgtctgtaacagactgggccccctgcaaacccccagtggcaacaccatcctagccaagggcgtggagagagatgaggccttgggctgcagataatggcaatactgtgatgataataatggctcccgctgattgagtcctcgctctatgccagactcgggacccttacaacttgggatccttactatttctgtgaagtagaaggcagtgaaacagagtggcttacagagcacaggtgttggattcagacaaacgggctcagattctgcttctgcctcttaccacctgtgtgatttgggcaagatatttaacctctcagagccttagcttccttatctgtaaaactaggataattctgtctacctaacaggattgttgtgaagaataaactaaatgggaaaattcttaagtgcttaacactgtaggatggtacttagcaggcaccaatcaatgttagctttcttaatactgtcatgtgacttatgaggaaacggtttgaacttgtctcggaggcatggtaaaaaaaaaataaaaataaaaataaattaataaagaaaccaagcctcagcaagattaatcttcagatttcaggggtcagtctgcaggtgactctctgggttatattgacttgcaggggaggaggaggaggagtaacctgtctgtctcagtgccccagggtgaagtgagcgccacaactggatgattacaaccattgttatggccacagctctaatatcagacaggaatggcttcacatcctagctctgccacttatcagttgagttaactgaatgagacaagtcacttcacctcttcagcctcagctctccagcagtaaaatagagttaataaatacctctctcacagaggctttgtgaaaattagacttgttctctaaatgccttagcacaatgcctgttcccagaaagacggcatttgggtccattatgggggccaggccccagcttacccagaggagatgcggagaatctttggaacactgagcagtgaatgccaacaccttttggccagcttatgcagttcttggatccggcggtttgagctcttgagtagcttcaagagcgacaagttttttaacacctgccagggtcaagaaaccaggtaaatagaagcttcagctttcctggacagcctccctctcccctgcctgcctctggctccgctcagccaagggccggcctgctggctcccctgggccactcagcctggcaaccaggggcagtactgcatgagtatatgagcttccccaagctggggccaaaacagggcgtctcaccgttctcagacggttccgctcaattactttgctcacaggctgctctgtctcgtcccgcagtttctcatcttgcatctgagggacagaggataagagagacataaacccagaggaatcagccaggtgtggtgcctcatgtctgtaatcccagcactttgggaggccgaggtgggtggctcatttgaggtcaggagtttgagatgcctggccaacatggtgaaaccctgactctaccaaaaaaaaaaatacaaaaattagcgaggtgtggtggcatgcgcctgtagtcccagctactcaagagggtgaggcaggagaatcacttgaacccaggaggtgaaggctgcagtcagctgagatctcgccactgcactccagcctgggcgacagagtgaggcactggaggaatcctcctgaactcctccatgtgcctcttcatttggctgagcatggtttgaccaatcctaggctgggagttttgtcatcttggtctggggacagaactgggagaccattttaactctcctgacctcccttcacccttcaccttttccttttctcccatgctggaaagcccctttccttggcatggtggattctttgttaaggtcccctctagggactcacccccagggtctagtcccaagtctgaccttggaaaccctgctgttcttgggcctcttctttgctgatggactcatgctggggctgtgagacctcagagatgaatggagcaacaccagtgccaggcaccaaccctgttcctctcagttcagccagcactcaggctgggcatcagatggtggtgctggctctgtaccacctgcagctgtgacatcactgaaatgtgacagtagcagggctgggtctccaaggagtgtatgtggcagaggtgaggggtagagggtgagaaagaaatatagacaataggcgacagacagctgtgtgcattgtcacaacctccctgtggggtaagaggattatcccctctttttaaatgaggaagccagggttcaaagaggttgaataatctactcaaggccacactagatctagcccagctagatcatagtgggctggaaacctaaccaaggtctgatagtcaacccatgaaaccagggattcccaaaccatgctcatccattcagtcatgtcgcctgttttgactgggcgcctgctacatgccaggtgctttttcttttctt

SEQ ID NO: 754 - DNA, 1431 bp, Homo sapiens
cagttcgctatccggctgcttgtacctggttcaggaggttcaggcagaggttgcacccactacgcctgcgcaacctcagccccgcccctccgctgctttccccggaaacgtttctttcctacgcagccgctcctgccgccgtggtcgctggagctttgcctctctaggccggcagcgcctctcctccatggtcctgtctgtcagcgctgttttgggagcccgccggtgaggccgggccacgctcagacacttcgatcgtcgagtctgtcactgggcatggcgggtcagttccgcagctacgtgtgggacccgctgctgatcctgtcgcagatcgtcctcatgcagaccgtgtattacggctcgctgggcctgtggctggcgctggtggacgggctagtgcgaagcagcccctcgctggaccagatgttcgacgccgagatcctgggcttttccacccctccaggccggctctccatgatgtccttcatcctcaacgccctcacctgtgccctgggcttgctgtacttcatccggcgaggaaagcagtgtctggatttcactgtcactgtccatttctttcacctcctgggctgctggttctacagctcccgtttcccctcggcgctgacctggtggctggtccaagccgtgtgcattgcactcatggctgtcatcggggagtacctgtgcatgcggacggagctcaaggagataggaatttgctgctaagatttttctttggggtggagtttcctctgtgaggggcttgcagctatccttcctgtgtatacaaatacagtattttccatggttctgcctgcacttactttgtaatgccacggttgagattgagagagatcagtgcagccaggcaagggaactttaaagaattattaggccaccttctccctttcctggaccccagagtcattcctccatttggttaaaatactcagtgcagggaactcttacatcctgtctccttcacttgcagcgtcccctgctatgcctcaggtgaaccacataattcttgggtttccgttcctacttgctagtgatttctgaacatgttcaatggagcggcacacagtctagacccacttccgcattgaaaccttcactgttcctctttggtttcttcagagctttcccaagagagctgtcagttttcagctgtcagtaacacaaatgagtttatggtaacacaaatgagttttgctatctctctgagaagctcatctgacctcctgactctcagccctacagagtagggagttgatgctgacaggatgaaggtttaggaataaatatgcctgggaagagactgggaaggttctagggtgaggcacctcagtaactcatggtaccttggccaagttggaaggaagcagtttgttaatgaggcacagtaatcctggctgcagggtctag

SEQ ID NO: 755 - protein, 150 aa, Homo sapiens
MAGQFRSYVWDPLLILSQIVLMQTVYYGSLGLWLALVDGLVRSSPSLDQMFDAEILGFSTPPGRLSMMSFILNALTCALGLLYFIRRGKQCLDFTVTVHFFHLLGCWFYSSRFPSALTWWLVQAVCIALMAVIGEYLCMRTELKEIGICC

SEQ ID NO: 756 - DNA, 32807 bp, Mus musculus
cctaagagtaaataaggtgacactgatgttcatgttaactgctgatggtccctcctttattttaaccgtagcatcggtgtgtggctatttttaaagacaaacagaacaagccgactgggtttgctctgggcagcattgaggggagagttgccattcactacatcaaccctccaaatccgtaagtgactcggggcctgggatgctccttccaactggttctgaaagcaaactgagacgcctttgcttttcagggccaaagataacttcaccttcaaatgccatcgatccaacggtaccaacacttcggctcctcaagacatctatgcagtacgttctagcagcacttcatcctaaagggaaacccccagaaccagacttggagctggctctccaagtgcactggaaccaggagtcatgggagagcctgtgtctgtgtgctcggactgcgaggttgccgcgtgtctgtgggtgtccatagacactttccacacagagtgatagtctgctaaaagaaatgcacacttttccctgaggttgctgcttatgtgtgttcctcggggagctcctgagcttgggttaggtctaagctgctgcacctcagacagcatgcctggggagtgaaatgtgcctgggtgtttgttttcctttcttagtgggaacctgtttctgcctctcactgtccatgttcaccttcacaggtgaatgggattgccttccatcctgtccatggtacccttgccactgtgggctccgatggtaggttcagcttctgggacaaagatgccaggaccaaactaaagacttcggaacagttagatcagcccatcgcagcttgctgcttcaatcacaatggaaacatatttgcctatgcttccagctacgactggtccaaggtgagtactttcaagccagttctggtctccctctcagactctggagccaaaagtctgagtttgagttgtccctatggacatgtgtgcccttagccaggctgttgccacctccctgtgggcagggacctgactcttggtgtggggtttacccttgcatgggggaaggagggtgctatgtcagggagagccatcatgagctcctccctgttcttggacacaacacatgaacatggatggaggaggtctgggccaccaaggtactggaggcagtgcagacagagtgggcctggggttgtaactcgaacctccctggggaatgtgtcctggagaagcagctccacttcattcgtggttttcacttccttttcccacccagccttgctccccatatggcttctccatccgcctcaacctttgctgccctctcctaccccacgtttctcactccattcccctacactgttttctcactgccatcggcagagtatacatgcccgcctgctcagccccatctcagcttcgccttcccgtgtgcacatgcgtactcactgttgcctggccggagtgctgagatgcacccggtctcctccctgtctgcttcccaccactgcttaaagcgtcggtcagaggccacttacaccactgcttgccagtcgttgtcctccagttaaggggagactgggcttctttagctgtttctgtcctgaggtgccagtcctggtgcacagctgctgcctcctggtggctctactcattcccagccatcccactcctggtgccaacttctgtatatacagtcagggttctctatagagtcacagaactaatgggtagtctctgtgtagtaagggaatttgttgatgacttaaacatctgtagtccaactcaccaaacagtggtcagcagcagctgtgaatggaagttcaaggatctagcagttgctcggtcccacaaggcaagcaggtgaagacgagagcaaatcttcctactttcaatgtccttaagtaggtctccagtaaaaggtgtggcccagattaaaggtgtgtgccaccacctctggatctgggacttgctttgtcccagatgactagaagctctccctgccttagtcttaggggattcatagccactgtgcctcaagatctccatgccaagatccatgtcagaaacttgtatctcctggcctccagattaggatcacaggtgagtcttccagttctgaattgtagttcattccagatatagccaagtcgacaaccaggaatacagctggaatagcaccctcgtggcaactaataactgtagctccagttgtagggtctgatgccctcttctccgcctccccccatggagttcacaggcacataaacagctgtaaacacctgcacttttctgggagtgttggctgagactgaggtggacggatcacaaagccaagactcccctcaaacttgaagtgcctgtatgtatagctcagtagccgagtgcttgcctggcattgtgacaaggcccttggttcagtccccagcaccaccaaagacaaatgtttaggagggaaaaattcctgcatcctccctggagccacgtagcacttatgctcttgtgtgctgcccaaagccagaagtcaaacagctgagcacacctttaatcccagcgctggggaagcagaagcaggtgtattctactgcgttcaagaccagcctggtcttcatagtgggaccctgtctcaaaaaaccaaaactgaaaaaccagttgaagttgtaatttgttgaagcttgtgggctcacagtgttgtgtggataagtagaaacaggctcaggaatcctctgatcggaacaggagcatctgtctccagtgtgcagcctggacatagccattccctaaagctggacttcacatcctgtgataagctaccattgaccactgacacactctagagctttgtaatgctgctggggtgagactaaaaatagcaagagtgtgcttcagctgtgtcacttctcctggccacaccttcccaagtctcacctcacctgctcaggatggtgctgcgttcctcctcactctgggatcctaatggaaggggggcccagcattcagagcctgggcaggctggctgtgtctcttggccccgcccactgatgcccacagccgctgctcttctgggagctgttccttctgtggactaggtccttcccctgaagcagcatggatgagttcagccctttgtgaaacctctggtcagggctgatgctaatcctgagaccctcagctgttgccttggcagtgaagtcattgacggaataccacaggcgcctctgagggtagaggctctgataacacagaactgttaacttccctccattcttactctgccttctcagcggtggctccagttctcagagcaggacttggtgtgtgtgtggctattgcttttaatactaaggtcatttctttgtttttccttctttagggacatgagttttataatccccaaaagaaaaattacattttcttgcgtaatgcagctgaagagctaaagccaaggaataagaaatagtggcctgaagctgggactattggagtttcatctcctctctgcccaaacttgggctcaagccctcggtggcccacagccctggccatgggtgtccactcctggagggactgttcttgttgagcatcagcacagcatcctggcgacttgccgtctctccattcagctccctgctgcggttttcctgaaactgagattctcaactggagtcagatcttgggggcactgtgtccagcagtgtgtatttgacagtgttgggtgggaactgttggtgagccctgtgttgtgttttataataaaatattttgaagatggcctgccccttcatccctttccccaactcctcaggaaatagccatcaatctcagaataatgctatgttccaagtttctcatcattttgtcagctcctgagaagctgtgtgagccacatgccacccctgcctcagtgttgagggaaggtgctgctatgatgtcctgagagaggccacggggggtggggggtgtcttccttccacagctcatttatcccacagaaattgtagacagtggatcccaggtgactggcctggggtgcccttggaatcccagctactcatcttgaggcagaacttggagtctggcagacaacttggtttagatgggcagggaatgagggctctctttccagaggtgtctcagctcctctcacggagactcttggcctccatgacggtgagaggagtaagcggtaatgcccaagcccttgagtgtgtggcagttggtaacgagccacaggagcggaatataggagcttcttgcgctcagacccatgggtgtggtgggagaagggccttgtcttccccaaccagagttcaagggacccagaatcattgtgtgtatggtacacacacacacacacacacaccagcactctcagctgcaccggtgccttggaggacaagaagcgagaggctgcatgccagtatgcagctgtcaccaacatggtgacatggtgtttgcctccatgctgtgatacaatgcacccaccagttgtctccataataacgcactagtatgacagcacacacgtgcctacatcatacatgtaatgaagttaatattcatttttatgaactaggaatagtaacatgaaataatacaatgtgagattaatattaatgtagcaactgaatttaattttttgagacaaggtctcacgtagccaaagctcatcttgagcttgacgtgcaggggcatgcagggatcagaagaggatgctggtcccctggaggagcaccacacttgagatgcagtgctggggcttgaactcaggacttcatggatgctaggcaagtgttctacccactcactgaaccagtcccagtcctcaacagctgtggtttaaatatgattgttccctttgcatgcaaaaacatttgtctgagtctttaagccatgactctgagaaagttcctccagtctctgcggatggctacaggctccagggcctaggaggacctgtgagggtacactagttggcaggatacaaattcacaagttgttgctcctaatgcggatgagaataagttagatgctctctcagagcaaccccaaaccatctgcaaaatcctagagacattagcgcctagagacagtccagtggttagtgggaaatgccaccaacagaagatgagttaccctgctatgactggaggggacaggagggacagatagggtcaggctttgcctcctcctgaaagtctaagctctgaagctcaagggcaccacatggtagtttgctattttactccaggactctggcaggcaggttggctgagtttgggacaggtaggtggcgtgcagctaggactattctgactgtcctctggggaggagattgtaaactggtgtcccacgccatgggcctgaatactcaaacttcacacctgttcacgtacttcgatccccccaaccccagagcagaagacagcactgcaaccaaccaatctatccaccagtcactggaggcttgacagcgcaagaaacggggctgagatccaagtccaggctgaccccagtccgtgccacagccgctgaggggctgtggggagaagggctggaaccagtcccaggggccctgacttccatacccaggacagagcaccacccctgacctccatcccacgatgcagtaacacccctgacctctgcccgcaggtacagcagcatatcctacccgactcccacccctaccaagctgtgactataaagggtgtctctgtgtttagttaaatcagaacaattgtatcttgccctttgcctcatggtcacaagatgtcttcagagctccagacatctgctacaaactcaggacagaaagaatgctatggtttggctgaggaatagctcagttgacagagagcttgcctcatatgctcagagaacttggtccccagtaccatgtaaatcaagtgtgatgatgcaactcctgcaaacccagtaaaaggatgggagttcaaggtcacccttagctactagcaaagttgagggtagcctgggctacacaagatcctgtcttaacaaaaaaagtatagaaaaagaaaaaatgattgccaaggtctagtattgcctggtactcgatctcaccagtcaggaagtggagagctccacaggggccctgacagacttcactggggactccctggccacagacggttggaaaagtaactgcatcctccaacctcgcctgtcacagggctccggagaggaagaaggttgtgggacagggtgttatctgtcgactccagggtagcaaggtttcacaacaggttttcatgtccactgtcttggcacctgatgccacccacatcctgcctgaggtgcctgaaaagcagcagcagagattcacagtcaggctgtctctagaacagtgtgtgacgggtttttcctctttgtttgtttgtttgttttacagttttgttgttggtggtggtggtgatgaaacagagctgtgtgtgtgtgtacacatttgaatgcaggtcagaggacaactttgtccagtcagttctcttctatctttatctctattctggggattgaacttgggtgtctaggcttccagttaagcacatttgactccctgagtcaccttgcagactcctagctccagaaaggttttcaaaaaaccggcttgctccaagatgctctcacttccttatggtgtaatctctggttcctcggtccccttgctgggtctctggcatttatttagcttttgctggctcccggggcaggatttcccgcactaaaacgggatcctccacagcacgggccagcgttgagagcatcacaggggtggtaagagctgatggtagtttcaggcttgtgccaagagctccgcccagaggtgctgaccctgtgagagttataattatcccctagtggcaggagggttccagggactggccagccccagtcccgccccttgtccttctcagagccagctagctaggcagcctgtctatgcccacaccatcaaggttcctgacgactggccttgccagctggggagtggggcagcccaagcctgaagcctgatgggttctgagcttgagagaagtttctttttgtcaggtgaggttggcccagcacaaacaggtttagacaaagtttaatcaactgatagtcagaacagctgggttatagccagcagcaccccactctagcccagaggatgaggtgtcaagggtttccccccaactcctgagttcaaatcctgactctgcccaatctggctgttttgtcctggaccgtgcacctacctctctgggattctgtcttcccagacctcacagcaggggaccagggcagcttctgaacgagactgggaggatgaagtggggtctcagagttggattggctcaggatcctctgtggatgagcctccgtccaccccacctgagaaccaggctgacgagaatggtataaggctgcctctggttaagtcatctatctagggaactcctcagtgagccagcaccgcaaaggccggatgaagttcatgtttagtgatgctagaggcagttgccagcactcaagaaataccactgagccaagctcagggggcaatagcagcacgtgggaggctgaggcaggaggacaggaagttagaggttggcctgggctgtataaagagaccctgagtgagaggtggcagggaggcggggattcgttagtaactgcagctgtcacttctgggccttttgcagtcacccttccctctccccactggccgcgcttgctttcttgccctctttgtcccctcctaagtgcccacctgggcaactgtgcctagcgggcgtgctttttatgcagacttctgcaactgcacggttcgggaatgaaagcttggcgagtgattgcttcccattcatagcaaccctggcccggagtcgcggccgttagggcataagtgttcagagcaaggcgaatccacacgcatgggagggaggtggagagcctggacaggtgcaaaagtgggtgatacggaaaacccaaagagtcagggggaagctacgaacagggacggccatcccacagccatagtttcaaactcgcaggtttagccagccccccggggtcacgcccgtgcgccgcgttctcgcatgttcggaggtcccctccccctcctcccgcccagcacgtgcctgcagcgtccgcccagcgagcttcttggggcggggccctagggaagcggaggggcgtggctgggcggtggcaggggcggtgctgggacttgtaggcgaggagccctgaagctaaaacagtctttgccaccagctgcgctatgccacactggggaaactgaggccccaggaaggaatcgaggtggctcaagacttcagggccaggaagtctcgacgctttaggaataagtaaaaaaaaaaaacaaaaacaaaaacaaaacacacttcaacgagttttcaaaaggcgcttctttaaggggtctttggtctggagccccctcctctttacgttccaccagggattcactcaacagacgcctctcttgctaatccctacgctacgccttgagcaacacttgctagagagctccgtcagcagcagaagaccttagaccagaaagaagccccggttgggtagggtctggggagaacaagccttacagcaaaggaaacttgaagcgaggaaggtaaagccaagagagtgaggcgctgggcaggggtatccccagcaggctcggagttctgctctgtgtgaaggggactagactgactggggctgaacctgcccagaggctgcctgccttactgtccgccttgaccagtggggccaggccagttttagccccactaaaagctgtaggtcttcaggtcccagtgtgataaccaggaatggggacatgagggacgcaggatcagggctgcttcctggcccggaggctaaagcatcgtgcctgcttctgtgctgaaattcccattttcttctttctattttatggtttcccatcatacaggctagcttctgactttctgtgtagcagggtatggacccggaaccctcccaccctcccaactcctcagtattaggatcaccggtgtattccactcggctgtttgaaatttctgtctctaacaagggccccacgtttgcatttgcgctggtggggaagagttctgcagactggcatcatggtcccagccttggcccacgttctacacaggccatgtcatgccttctgcttgttctcctgctaagggtgaccccacaggcggtcccatgtcagtgacatgggagcccagccgcctttgttcttcctcacagtagaaagtagaaagtagaaagctcttagctttctacaagactgtaaaaggtgtattcactatcgattagccctcattttcacagactacctagtgtcccggggtatgccattgttgaagtcccagcagagaatccctgacaccacaggaccgccaaagtacgtgtgatgtattatggtgtgcgtgtgaattatttttataaacatggcaaattcactttgccctttatttttattttttattttttggagacagggtatgatttagtccagctggcctcaaacttagtatatagccaagggtggccttgaactgactctctttcttgagtgttgggtttacaggtgtgtgtcaccagccaggtttttgtgatggggagatcaaaccacaagggttcgcgaatgagtagctgaggcactccttcggaccttttttttttttttttcggaccttttaacaagtacgtttgcacccctagtcgctcgggtgtaaaccactgaatcaagcaacgcttggaatataccggaccgtgcgccccgcgagacagacaagctgataccggcgagcacctaggggctaagtcacctcattcgccggacccgcgtcctggcacgcgggacgtacttagaactacaattcccggcggcccccgcttccaaaggcgtgtcttaaacgagaggggcgtgaccgcggggcgtggccggctacaaaggcggccggcagctcgcagggcgcggagtagacgcttcgcggcggacggagaagcggcgcgggacagcgtggggaactcggattcggcctgggacacccccgcatgcgccggccggctcggtagcggcggccccgatgctgctgcagcccgcgtgctccccgagtgtgtttccgcggccgtccgccgcccccagcgccatgcacggctcacagaaggacaccacgttcaccaagatcttcgtgggcggcctgccctaccacaccaccgacgcatcgctcagaaagtacttcgagggcttcggagacatcgaggaggccgtggtcatcaccgaccgccagaccggcaagtcccgcggctacggcttcgtgagtgcccgcggcgcgcgcacctgccgccgcccctcccccaccgcctcccagacccgccgcgcgcagccgggactccggggcttcccggggccgtcggcccttcccccacactttccagctgccccaaagaagcgtaagctgttagcgccagcgacttgaagacggtttcccacttccttccactctagtgtccccaaactaattctctgagaaagttaacggtacttactgatggcctggacagcggggggtggggaggactccccttgaggttccctttactccacttcctaggggattgtcgctgtccttgaaggcactccgcacttgaactttggggaaggagctgcagccctggaggcagagaagacagtgccccaagggtcctaaataccagatactcttctgggaggaaagacccagagatggcccgatgcccgggcaaaacccccttcccttctctgccttgttttcctcagccagccaccaaagcccctgaccctctgtgttcctgcaggtgaccatggcagatcgggcagcggctgatagggcttgcaaagaccctaaccctatcatcgatggtcgcaaggccaatgtgaacctggcctacctgggtgccaagcctaggagcttacagacgggtaagagctttgagttttctttccagccctccttgtttctatattcagctttggtatctgtctgatggaaaaacgctgcccccgctccccctttgtccccgagtggcagccagcaatcatgtgcctgcagaggcagcccagggcaaccacccctggcttgggagcttgctcctctttctcggcagtttatggtcccagggataatgattttttttttccaaagtctcctactcttggggagggaagaagtcagatgccgaccaggcaggggatcatcccgaaaagctggtacagcctgtggacttaatgtgctttgaccaggagagtggcgcgtgttatttgccctccctgtgtgtggccctgggaccttacccatgcagtgtgctgttcctaactgctctcttgttttaggctttgctgttggtgtgcagcaactacaccccaccttgatccagcgcacctacgggtgagtggctgtagctggctgtgggtgggaaggaaggccttgaggtgggacagctgtggacctctcagctcttctcagggctggggaatggctgttttcagaaattagattgtgtattgggggtgtggagggagagataagacccactgcatttctctaacccagaggggagcacatgtcttcgagcctggtgtgtaccttgcccccagttatgcgacacctcctcagccaggtgtcacatgggcatccacttcctcacctgtgcagtgaatgaatgtggggacagcttttctaactctctcgagttggggagtttggcacacacctagtgcgggcagctcttctgaagtgtatgttaaggctggacctggtgggctgggctcttcctggagtgctctctgatgtgggcagatgccacgaaggtcgctactgtgggtctgtaccagctgaggtttgatgtttgtgaatggcatagtaggtgactgccactggttggctttttgtgtgagtcacttgctctgtatccccctccttctatcttgaaaagactgataggcctggtagctacttagggaaggacttgcacagttaaagagacacaaaagttggaccctggtacttggtctgtttgttcagtgtagactagctgtgaatgagccggtgggtggggactctgacacggaccctaccttctgcagtggcaatcttgtcaaatcctggctgctgggttttgtgtcccaggttggggggtgggtagagtggggtgtctgttggggctggagctgaacttggccagcacagtgggtcagatgactggagagggtgctgcttgctgtctctaaatgtgcttgtcccgtagggtggcaccaggattcttcacagtcatccttggggactgatgggagttgagcaggagctgtcgatggggaactatggtttaggccccagcctgtgtttcctgccatggggttctcctggggaagttcttggggtgctactgtgacagattgttccagatcgcatttcccctgggatctgtttcctatgtgtaatggctgcctggacagagtgtgggaacatcccagccttggaagcttcgtattagcttctccctgctggctgtgaggagagtgcttgctctccagtagcttgctcgtctcctgctcgctcttctcctggggctgagcttcaggctggtgctgggctgcgctgagctatgtacagacggactggaacagggcctcccactggctcagacgcatagttactgcctcagggacactagtgcttggcctctgtgacccctcagatctgggttcacaggtctaatctgttactctgactagaccctctttaacttgccttttcttacctggaaaatgggggacagcatgctctagtctccagggaaaggctctcctcagagagctagtgacttaggagtgaggtttgaactcacagccacacatgttgtctttggggttggaaagtttccagaagccctggtactcgggcgaatctgacattggtccacagtgatttgtaactagattagggggctggtcatctaacactgattacacagtggccttacagtgttggttgggttgccaaggagtgtagtcacatatggacagacaggtgggcacgagggactggccagcctacattgccagtgaaccttgggttcctctgaggaacatcccacctcctgagcttgccaggctctggggagcccgggtggtgtggtcaggccttgctgcctgggccagttgctattaatggccagctgggaggcagagctgagctgtcagcaggcaagccccctttgtttttataaacaatctggcctgcccggctggcctgactcagcggttggttttgtcagtcagcctggggctgccctggctgagggcctggtgggagctggaaccctggcagctcagagcctgcaggcacctggctgtacattttcctaggcctttgacatgctgaagaccccacagcccacctgtaggccaaaccactgggcctcctctgtctgtcaagaccacccctcagcttagaaagacgctgaaagaatagccagctttgtgcttgcccgagtcctcacctgcttgcggaatgcctgcttgtggaataggccctgttggttgtacagcctgtgcttgtccgtcatgtaactgtgtctggtgaagtctcagccatggcaatagcttttcccagcctccaggcccatctggtaatctctcatggggataggtgacccggggccttctggcaagggggtctctgccagccctggggcacagtgatgcgggtgagaagggaggactgcacagtggagatgggtaagcgttgattgggtttgtcctggcctcccagggtcaagggtgtttatccactctcagcctaagactcatgggagctgaggtttgtctccagcctggcagccattggagtctctcctggccttttactccagaaggctgctctctgctcttagggagaaccttgctgtggcaagatgcctgcttactcccatctcactttctcctcatgttggagtcaggtcctgaggtctgagctcaggtcatggtccccaggtgctgggtaacaggctacacctctgcagagtagagatgtgaccgggccacattaaggactaattgatcgtggagtatggaacatgttgatcccaaggccgtggaaagttgtgtgtggggtttgtgctgggtgttcctatgacaggcccagcagcaagctttgctggcctaagcttggagccacatagatgagtggcctgccctctaccgagggccactcaggcctatccctctcttcctagaccctcatggggacacttcttggatgactgtgttgtctctgagaccaacactatccagggatcctctccttggcttgggctttcctgcaggcattgttttagagagtgtgttctctgtgggatggacctggtacacacatggaggtgtctgtcctgatgccacatcatgaggaggcctatgcctatgcatgaggattgaggagaggagttggggaggagtctgtcccccagagactggaggcggggtggtggtggtgagaatgtgtgtgttgcctcagatgctctgggtgaaatggccattcccaccccagggcccagtgtggcaaggactacatggttaaacagggtgcctctgggctgctcctcggggaagtggccagagctttgttgaatctgaccggctaggctagttgtgccacacacaggcaccggtataagcaagtgccatagtgtctaggtcccataagggccccacactgtaccagacatttcctgcacaggcacatggagtggggtgaggctgggggaagggcattgtttctgtgccttcagagggggaaggttgggggagggacattgctcctgtgccttcagagagagttactagtttcactgagcacagtgaaaagtgaggcctctgtggggcaggtgtgtgacacactgtctcaggaggcctgtctagggctgctggcaggcacatggccagacccagagcagcaggtgtgagcactctcaccccagcacctgaggggtgtcttaggggtggccctgcttgctcccccatcatagcttcctgtttggcaggctgtctgaaggcaagcgtgggctgtgtcttgtctgaccctcccagagggcgtgtagcttatgctgctgcacctgttgtttgtccctgtctgctgtgatagaagctagcctctggcgcccttaggttcctctcagagttcagttatggccaggtgcctgaggggcctattctgaagcctcaggctgaggggccatggctcgtatgttttagtccatggcatggactggcctttggtggatcttggcccaggagtttagacatcccttgggacagtggccttgctccctgcccagccctcctttggctccatgtcagctgggaatgcacagggaatctgcagagtcaggccagagaccccagctctgctgctgtgaccacagtgccccccctcccccaccaggaggcttgcagcaaggtgcaacaggactcaggatggtaaagagctgttggaaggactgtgggtgatgtgagggcagggaccaaagcccagtgacagacagccatcccactctggaggagctgagctaaggtgaaaactggtctgtcttgattttctttctttctgagacagatcttggtatgtagcccaggttggtcttgagcctgcactgagcctccttcagcctctttaagtgctgggatcaaaggcgtgtgtgcgccatcactttctgtttcctttctaagatggtcttagagcccagcagaccctccactccctggttctcctgcctccgctctcgctttctctggaggtggttcttgaacacagccttttgcacgctggacagacgagcttctccatccctggctacagagcaatccccctgcttcctgagggctagactttggacttgtttgagggtgtccctctagtgctgagttgagccagaaggccttttcttgggacagcagccatccagcctgagacagtggaactgcctggacccctagccctggggaggagggctgagatgccagagtagataatggatggccttggccttggaggaggccatcatagaggacaactttgaaagtagcggtggagtttaggcaggttcaggtgggtgggcctgctgctcccagctgcctcccacagtagcctgtcctcaccctgtcttcattcacctgccaacactcaccagctgtcaccagagaacctggtgcccccatcacaggacattcccaggaggcctgccaggctagctcactctctgtctctgtctctctctctctcacacacacaacccacacactaccacttcaccccaaggccagggctgctggtaggctgccaggttgcctccagcatcgtggtataaggcccccagggagaagaaaaagtgaaatgggctcatttgcctttttcatttttattttcagcagtggctttgtgttcgggaagtggccccctgggctgcagccaatgaattttttttttttcctgagtttggctactcacagggccagggcctctactgactgctcactgtcagttccagtagtagccatggtggggagacagatgtctcaagtgtcactgcagagttcccacccctcttctgggcagccaggagcccaggggatgtgcctgtggtatcttagtttactggttgagaaactgagaccagggaaagctcaaatgggcggtggaatctggaccccaaatctcttggaggctgagtgagccaggagctcttggctgctcatttgccaccctgatctggacttggtgtaaggagaggccacctattccaccactcccagtgggttagatctcacggcacagctgtcagccctggccagcacccatagcaaaccactgtgggtacatcccttcaggctgtggtggcttgggtgctacccagaaccgaggaccagtgggaaatggaacctcagtcacccttccctggtctcacatgagtctccctggcagaagggaactctaggatttagactcctttggtggtctctggcctgggaactctgttctgttgctgctacagagccctgggcttattgtcctggggccaccctggcttgagaaagggcaaaaggttccctgaatagagtgaggaaatggaaccctggttgtgatgaggagacactggcttctgctctcatccgaggcctgggtgggactgagcctgacaaggctgatggcagagccccctgagctgggagtggcagctaccctggagtttgtgggtcacccagcctttatattctagcccccaagacttgggtgtggaaggtgtccacttggccttcgccaggccccaatgctgctaagggtttgggttcccacagggccatgataaggatattctagggctgaaccaggcagctgttagtggactaaggacagcaggtcagattacctgttgggatcttgacaagcagaatccagccttctgtctcatcacactgactggtgtctaagcctgctgccctctctgctctctcatggctgggccttctggcttgccccgggtgctcaggtatccacaaaggcttgtgctggacccttggagatcccacatacaagcaagctctgcaccgttggtcatataggtatacacagagtaaaagatggggtagttttgtatggaaaagaaaagcagggtcaagaggcccctcaggatggtgttagggggagaaacctttaggctgtgtgccacaggtgccaacacttgggagtgggtatagtctagggtaacaggcattcaggttgagagtcaagtggagaggtaggtgtgggctgccatgtagggaagcacaggagcaatgtggatttgctgccaggtccagtaggaaggtgctagaaagttctggtacctggattgatgcagtcttgaaatctacagagatgcttcgaagcagtctgtgagaggctcagtgagctaggcgagtgagtcagggggcccagaaggctggaaggagggagaacaaggcagcattggagcattttcaggtgggtgggcacactgagacacagggacattgagtcctgcagagccctgtgtcgctgatgtgtggtgggtcaagaggctgaagcccttgctgggctgggcatgatgaaggtcaaatgtcaagtggtggctggcattcttacctctctgagtctgaatgagcagcactaggaaagtctctgaacattgtgcgcacgggcacatgcacacagcagttccaggtttcttcaggcaggtagagttggggcttgcagtagtgtgcagcctgggaccagggccagctttggacagggcacagggctaggactcaggtgggttttgaagtgcaggctgtgactgtacagagtgttctctggtgtgcaggcccctttcccagctgctgctgccaccattggcctgaggacctgtggtagccatagtgtgtggtctttgctgcccctcaagtagtagtgtagcctttcagggagcgtgctctgcactgcactgcatgtggcactggaagctggatattctgtgttctgttctctgctggttccgttctgcaaaagtgtccgtacgtgacggtttagagccacgttccattgcagcgtgccataggtgggggatttagtgggccactcaagactctgagccttcctgcctgtcctatgtcttgggatgacacctggccaggacctcagagatggtacatgtgattaggcaggcgtgggtgacactcagcgttcagggcatacaggaagccaggctctgcttgcatgggactgtgagctggccttgcaaggagcctcagtgttagcaaactccacccctagaggtattgggtaaaggtgtgtctccctccctcttactcatgtttagggaagttcagggcatggcactcccaaagtctcgaactgctgaatgcttctgggtcttagggctgcgggtggggggacccctccccctcacacacacacaggcacacacgtacactcactcacacccaggtaggggcaccaagatagtctgcgctgctctgggaaggcctccaacccagcgaggcccgtgttgtgactgtgggcagggcgtaggcagcagcagcactctagcacagctctgctttcaggagggtcaggcttgtgaggagagcagggagtggccctggccccagacgtaggcaggggggtcttgggtgctgtggagtctgctgctgtgcaggttttggggatctcgtgggccagtggtgctggagaggaggagtctgtcacagtcctgcctgggctcctccctgtagttccctcagaccctactttcctacagtgtcccctgagctctggtttctgtccttcagagcccagccatgtgtctgttgatggctgtgtgctggcctgaatgtgagaaggtaccatgcagctcagagatagtgcttgcatccacatcagtgccgtttcaatgaagggagtaccacagccagccaaggagggcgcgcacctactggggctcctgctgcaagctgtttgacctgcaagttgcagtcagtgcccatggatgtataggatgctaatcactgctgttgcagtgtccgggcaacacctggccagctgcctgtgcactttgaaaatggagaggggagttgtgagggtgatggacacagccgtgtcaggggtgcctccttgcctgcagcccagccttgcctctgtacctttggtaaatgtgctgtcagaggctgccattggggctagggaggtggctcaataggtaacatggttgccgcacaagtgtgagaaccacagttcagatccccagaacctaggaagtactgggtaggtatggaagctcacctgtaatcccaccatgcgaaaggcaagaggccgggtccccaaagctagactatagaatctgtgagggctgggctcaagtgagagaccccacctcagtacatataatatggagaaggtccaggaagaccccaggcccctgtgtggcctccctgcacacacactgctccagcgctcctgtgtgccacttgttcttgccatgctgccctgccacacacacaggccacaggtcacttgtctggatgctgctctgggcgttctctgcaccataccttcctaggatggccttgggctgcccttgtcgctccacctgtgtgtaaggtgtacttggccctggctctgcactgatctcacccgtcccatgtttctctttaggcctggcttggggtgtggcacctgtactttggagggtgtaggatgccactgcattggtcccctgagtgaccttgattacttctgctctcacacgagctgctgggactcacctcaccacatctctgggaaatgatctctccacagagatgtgcacatcctgctgcagataagggctgtggagccgctgactttttcttttataacacagcctccctggagtttgactggattctaggcctatcctaagatattaagggcagctgaggccccagtggctcagaggcagagctcagacaaagcatgagagaaacctgtgtgctgacgctttgtggcattttgctctgacagtggcactctgctgctgtcggtactgcctactgtatcgataccgttgatacacacacggggtacatagggtggggatgctgctgcagacaggtctgaggcccagcgaggctcagccctttacccaggcctgctcagcaggaggcttgccattcaagcagagccagcagtaggtccagtgccctctatgtcagtgtcaggcagtcagtcccctttgcctgtttcctcctgcagcagtgctgggcttcctggggggaggctacagccaagggcagcaagtggcacccgatgcatttccacagtggctggggtgtggggaggagctccagtctacaggtgccttccagtataagctgcaggacctgtgtggtcacctggcagagggcgcttggccttcctgacttgtgaatggatgtgctggcagggcagtggatgaggcctctagagcactttgtgcccagtagggcacaagcataccaggagccctgactgtagtgggtgggcctgccctcctgctgtcttgtctgtaggggaggtagtggatggctaaggagtataggtgtctgggaggggtgggaggtacctggcatgtgcgctgtaccattccccaagtgctttttccacaggccttgagctctgtaggctaccctgtcctcagtctcccagtttaaacaaaggccatgtgttatacattgggcaataggtcctctgggagatatatgggagagtgggagtcaagtctaggaggagggtaccatgagagctggcgctaagtggcctgtggagtgatggcactgtctgtgcaaaggccctggggttggtgcccacctgaggtgttgctgcatctgttttgtagatgggtacacaggcttggacagggcagggcacagacctatgctctctgcacccctggccttccccactctgccaacagccactgacactctgcttggcccacaggctgactcctcactacatctacccaccagccattgtgcagcccagcgtggtgatccctgccacccctgtcccgtcactgtcctcgccctaccttgagtatacaccagccagcccagcctacgcccagtacccgccagccacttacgaccagtacccatatgctgcctcacctgctgcagccaccagcttcgtgggctacggctaccctgctgccgtgccccaagccttgtctgctgctgcacctgcaggcaccaccttcgtgcagtaccaggcacctcagctacagcctgacaggatgcagtgatgcgcgtcctgcccagggccacagctgccacctgccagcctctggagccaccaccatttgggtctcctcaggcccccgggcccacctgccctgaaggcagcagcaagtttcttctgcagccctgccgtgcttgaggaagggcctgaggaggaagggacactcactctggaagctctgcagccactccgtgccaggtgccttaactctgggacgtgtacagacgtcctccctcctctttgggaactgtcctcttggtggatccgggttcctgaccccacctccccccagttgcccctcagtcgaagcactgtgccatgtcctgctgggaattttctgccatgcaggcaagaccatcagcaccgagaaccccaaacctgttttgtacttagagactggctttggtcagtagttcactgtggagacaatgacagtattctctgtgccagtgtcgctgatggagctccccctccccacagggctgccattaccagaccacggccctgcagggccctgggctcctgtctgctgatgctgcccgcctcacctgcagaggtgcccatcagggcgagttctcaggtgtctgttgctgtgccatgggggccttcttcctggccctgtgcccctcaagcaggctctgcccacccaccctcccgttgtcacctgtgccagtctgacctagctgcacagagagaaggtccagcccacgtctaggaggggaggagtgggtatctctggcagcatgggctgcccgcaggctgggcagtgggtccctccacacctacctcagggagccagtgtgcgggcgggaactccacagcatgcctgttagtcaaggcctggaggacagagggagtaatgttataataatatttttattagaatgttctgattataaaaaataaaacttgttttctttaaagaaaaaggtggtttgaggtttttctcaatggcaaggtggtcctgtgtccagggtttttggcagctgtccatggaacccttaccctgcttcagcctctgctgatcactagcttcagtgaccagcagggcttgctccagtgtgccccttctgaacggaagggctccagccccataaggtaggtatctgcagcagcagactggggacggtcactgttgacctgatgctcgtctttagacgggggcctgggtctgctctcttgcactgtccctggtttccctctgatttgacttagagatgtgccttctccctgctcctgtggcccatgcccgtttgggctgacaggcctgggtttggtttcatcccaggcctctacctcttaagtgtcagtttgcaaacactgaagggtcaggaggtcactgtggggctctcagcccacagctgacatttgctgctgaagataagagtgtggggccagggaggggtggcgggcactgccagggttatcaggaaggccattcgaagccagtatacttcctgtctcttatcagctggtggcagcacaagaacaggcccgcaggaagccccctggtctggacagtgccctcctgggtcttgacagagcaagcctaagagactttaaagttggaggtgcctttttgagccaggggcacaccacattaccatcagtgagggtgatgacacctgctgttcttgctacaggacagtttcccagcagagtcaccattggccctggtacagcttggtgaaagatctggtgtaggagaggccacgtcccagaacagggatttttcccaaggacaggacttctctcattcgtgtctccaggtgccagcacagacctggtgcacagtgtaacccaggggacacacacgcccatgcatgtgcatgcttacagactgatgctccaccatggacatgtgcatttgtacatggcctggggacacacaggatacacacaaaaactccacacacaactgtgtggatacagatatctggctcggctcaggtatacacttgcagttatctgcaaagcaacacatgcgcacgcataccccatggccaggtatcccggataatatgaacaggacccatgcgtgccatctgtgttgtgtggtaggtaaggactctggcagctgcagtttgagttggagtcacttggggaggggccagatctggttgggaggaacaggaagggaggacccagggccctgggctggacttctctctgcagggacagtacttgctactccctgctggagctttttcttctagctaagtgcaggtgggcagcaggcaagagaggtgagctgagccctactgctatcctatatggaaagttcagttgggtgtcattcgcagtgtttgtccagagcccagagcttaactaaggtccagttgccacattggtcggccacgcagtctccacctttctctggggacctacctctgttcacccggatctccatccctgggcacccacccctgtgaatctctcagggctcaagatgtgcgagtcactgtcagatcctatttgttgttcaagcatgaagactgcctctagccagtgtctcaagctgaggactctcaggagtggccttctgcagcctgaagactggcaggggtgggaacatgcaggcccagagagtcctgagacctgaatttggagcctgtggccctaggtactttccttagccccaactcattagtgtcctgcactccaatgcagtcatggcccctaaggaggggagccatacagtggttgtaaaatcacctccagaggcctcaccgggctcactctgtcccctgggctcttgcatgtgtgtgttcccaggtccttcctgggctcagtttcctctgcacaagctaggctgactccactctgcctagcagtagcttcagtcttcctgggcccagtggttgggtggggtcaaggggccccctcctgccacctagtgtccccagctgagcagtcattcacgctccataccccagcaattgggtcaggaatggatgtgggccctgtctgggtcacaggagccacaggagctttctggaggaaggggggcttttctggaggaagcaggctaggaacagataaccctgagttttgtcagggaggcggggcagggcttgttgattgatggacaggctgatgagggtgagctgggagccaaacggggtcttggtaacatctgtgaggctcttaggatcagttgtaagctggtcctcaagtgtgtgtgtgtgtctgtctgtcgtgtctgtctgtcttttgtggctttttttttttggtttttttggttttgttttgtttttccgagacagggtttctctgtatagccctggccgttctggaactcactctgtagaccaggctagcctcgaactcagaaatccgcctgcctctgcctcccaagtgctgggattaaaggtgtgtgccaccaccgcccttgtctgtctgttttaaacaagagccaattgcttccccttgcactagaggttggtcctcagatataaatctcccttgtctcagagggcagagtcccagtgtaggcatttgtgatcctgggcagggttggggctgtagctgcccatgcttctgctcccactgcctcggctcctcactgagctcccgcccagggagtgtgatggacagctctctgttgaagggagctgggttggggcagagttgacctgcctatacatctatgttgtggtccactggccagctggcacccaagagtgcccggtgggacatggtgaccatccttcctcatgtctccatttctctatcaagtatacagacctactgcagtcaggctacagtgggaggggccaatgtgcaggccgtctctggctctaccactctagagcttggacatgagggctggagccccagcagctgtcctgatgcttggtgattgacccagccatagttctatctcctgtaaactgactagttaccacgtcccacctccctggatcatcacagaaatgaaaggagatggcttaggtaagctgcccagtagaatctgaggtgaggtcggtactcatctcacagagccccgagaaagactgggcagtcagcagaagtgagatttacacccgattcccatgaaaccatttgagcttaaggcctctgctcccctgagagagtagccatagttccagatatccacagcaacaccaccagttccaacctcctgtctccagaactcaggctgtccttggagtctgaggactggtgagctcatctggcatgtccctgagaccctggcaccccacgggaggttggccattcctgtgccagataggcatccaaggcacagaagatccagcagtgcccagatgctgccagagtgctggagagtggctgggcccgttgtagcccaagcaccttgaatctagccatgtgagaccttaggtcctggttcaggccaccaccctgtgtcttccacctcacccacagccagctgggtgttgcccccactcacaggcctccctgcctgctgagtcacactggtgtttttcctcagacatgtaaacactgagccaggaccccaggaaacaggttggtgtgtctagatacagcttcggagagctctgtgttctgggtgtctcctcgggctgggggaggggctggcacctgccctcccagtacctcctggggctgctgataaagagtcgggctttgcctatcagcctggtattctacctctggctgctcacaggggttgagaacagagatggggagcttataccaccccacccccagctcctgcatgacccacggctcagaaagccctgggtgccacctgctggcccctgcctggtgatgggggcattcttagaggaattttaagaatagagattgggttttgcaatttaagcctataaataatctcagtactcaggagactgaggcaggaggattaccttgagtttggagccagcctctgtttcacagtgagaccctgtctcaaagggaatgtaagtaaatcaacaaatacttgtcacttgcaatacagataaacatactctgatagagaatcagtggggtggttttgtgcatgcgtgtctgtgtgcgcacagagagaagtgatgggggctggagagatggctcagcggttaagagcactgactgttcttccagaggtcttgagttcaaatcccagcaaccacatggtggctcacaaccacacgtaataggatctgatgccctcttctgacgacagctacagtgtacttatatataataaataaatctttaaacgagagagagagagtagagagagaagcgctggaatgatttgtgtgcgcacagaagatattggctgttttcttagttaagtttttgagacagggcttcactctatatcccaggttatagcctggaacttgagatcctcctgcctcagcttccaaccacacaggatgcaggattggcacttggggccaggccctgtgcagagacaaaggagcgtataacaggaagccacaaagtttgggggagttccttatataacaactgaagccgaggggcagaaaagcacctttcagaattgaggaaactgtacacaaaagtattttagaacccctccttggagggctgggaatgcacctcagtgttagagttggggtggacaaagcccaggagtccatccccagcaacacacacatacacacacacacacacacacacacacacacacacacatctcctgcagccaggtttacataactgttcaaggaaggtgggtcataccctgtcttttacagccacactgaccccctgtgaggctgagggctggctcagtgcaaaggtggacccccttaccactgactgcagatgatgagccccagaacaccccaggttctgcagagaggacttcacactcgccatcaggagcagagggcagcggatgccacctctgagcaaacagtgcgccagtgtgtcccaggtccccaacaaatgcatcatttctacctggacatgaactgcactttcctgagcacatgacttggacccttgtcaagagtggcaggaaggatggaagagggagcgatgcgatggtgaactcgcctctgggtcttatcaggcaggcctccgtgaagagccacggagaagtgcatgctaagagcatgcatggggcagaaggaagcacacaccacacacacaggtcctggtgggatggggtttgatgtattggagggatgtgtccacagtggctggaggggaggccaactggaagtgaagaggtcatttgggggctggggagatgacttagtatttaagagcactagctgctcttccagaggccccaggttcaattcccagcacctgcatggtatctcacaactgtaactataactccagttccagaagatctggcaccctcagatacacatgcaggctgaacaccaatacacgtgaaacaaaaatagacattcatgaaggaggaactgaggggctaggctgatgggtcacttggggtccaggaacaacaaaaagtgatggggtggcaccatctagccctgagtcgcaggaatctagctagggtgggggcgtggggcctgggcatggcagacaggtgacatgtcacacccacactcacctttgtctgggaagcaggcacagcctactgtgtgtctgggagcactgtggcggggggagcacctcagaatctcccatacataagtgccactatctggggccatgcagagtacctgcagagagatcctggctcagggtgggtggacggagctttgtagaaagtgtcaggcttaaggaggggctgaggaaggcctcagccagcacttctttactgagtcttggagggccttactggccttggagggccaggagtgtgactcagctggaccctgtgatcccaatgcagaacagggttttgtcattccagaacccaaataccatgtctagaacacacttggtgcttaataatgtctgtggagagagcagtcaggagggatgtgctcctggccagagcacctctcaaccacaggacctttgcacatgcactttcttctgccctcagtgcccttccctgacaatccctgccaccccaccaggcactcccttgccgccttctcactgctcagcaagcctctgggtttgacccctggtttaggtcatgagacccattagttgctctctctccccatcctgaacattgagctcagaggaggtagagtgtttctgtttctggcccaccatgacagtgccagcttcacttcctctatgaatgagtcctgaagaactttataggctggggccgtggcataaggaagagcctgtacaaccaggttcaatccccagccctgtataaactgggcgtggtggtacacttctgtaatcctagcacccaggaggcaggagcttaagaagttcaagattattcttggctacagtttgagttcagggctagcctgggctaagtaagaacccgtcacaaacaaacaaaatttaacttaaacaattctccagccatagaagccccccgaagcaggaacatctgctccagaactcctgcatgaagactgatacttcacaagcctaggcaagggcgatgcagctcagctgtggcccatagaaccagagtgcaaagtgcctctgctcccgggagtgtcctgagagaggtcagaggtgacccctgggaggtggagtgggccccctgggcctggctgtctgtggacttgagttttgaccatatttgtccagtgacatgtggccaccccaggctgtggcataaataccagtttatcaggcttatttgctttgtccccgcagagcacacagggagccagcagcctccctgggtggtgtccttcactcagatcgcagccctggactggaggctgggagccatcctttggggccctgggacaaaggagacctggcccagtctgctgagcattctgtcagtctccagaaggcaaaagagggtgtgctcttcccccagcagattctgtttgtttgtttgtttgtttgtttgtttgtttttccagacagggtttctccttgaggccctggctgtcttgggactcactctggagaccaggctagactctactcatctttccgtctcacctcccaggcactagtgttccaggattgcttttctttttcctttgttctttgtcttcctttttagtatttttggttttagttatagagacagtcttatgtagcccaggctggccttcaactgtaccagaggatgacccatgatcttgaacatctctgctcctcctgtctccacctccctggggctaggattgcaggtataaagcactgctctgggttgatacagctctgagcctgctagataagctctcagccaatttaccagcgtaccctgcttgctttccctctgcagcaatgtagatgatacccagggccttctgctccctaggcaagtgttctgctacaggccatgacacaagtatagtccaggatggtttctagttttatttttattatttgtggtgtgtgtatatggtgtgtgtatgtgtagtatgtgggtatggtgtgtgttgtgtttgtttatggtatgtgtgtatggtgtatgtgtgtgtgtgttgcgtgtgtatgtgttgtgtgtgtgtgtgcgtgtgcatgcacgcgcacgcacgcaagcacacatatacgtatgtgcggatgtccacagtggccagcagcaggcatcaggtcccccagagctggagttttaggtagtagtgagcccctccgagtgagtgctgggatctcaaccccagtcctcaccacagagcacagctcttagcctctgagctctctccagcccatccattggcctgttgttacaaattgccaccaactgggcttaaagcatctctcatttgatgtcatggttcagtgaggagaactccaacacagtatgactcaacttgggctgcagcctgggctcccacgaggacaaatcaacaaggctgtgtcccttgcagagggctccaggctggaccccatcctctgtcttgtggaccagggtctaggcccggtcagctgtggatgcagcaagcatctgcccgaggtagccaccctcctcctgtctcctaggtaacctttccagagaaagtgaccggaggccctcaagcttccaatcagcatcttccctctctcgctcagtgcagaccatatcagtgcctccttcgcagtcagggctgggactcccaggccctgcaggcttcgttaccatcctggaatgcagacagagtttgtactgtggataggaccatggggcaggtctgtgtggccctgccctttatcttagcagcacttacagtgtggtgtctgttgatggagcatgtgggcacgcaggagcggtggtgccgggggtggggggtgggggggcacatggaagcatggaacacaggcactgggctgtgctgacttcatgctcaccccgttcaagttgaacacaactctgggtcttggaaacctcctgttgttatttttcaggttgcagacacacatgatggggctcatggggtgcccctcccctcccctgctccctcatgcctgcggctcctggcccaggacacctgtgcccacaccagcgtctggcctgcaggtgcccgaagaatctggcccgcttcatgaccagttcctaaccctcccatacccaactcactgatccttccagagagctgcttctccctaccctgagggtacacaggctgtgcccactgtgggcaggaatgcatctggggcctcacacgagacacgggtgttgtcagttccaggcggctacgcactggggattcattaccttcaaaacttgcctacaacttagtgaacagtaagtacatggtcctagtggggaggcaagagtgtgtcactcctgggaccacagattaattttagtcccatagatgccacggtgaggtggtcctcccccaccagcagatgtctctgccccaggactttggcaccgctgttctcatctctggaatgttcttccctccatcctgccttctggtggccagaagctcttcttcttacttcctctttggtgctgaccatatccagactgccatgtcccttaccttacctgctagctgactgctcagcaagtgcccctgaggggggatgggtcacttcgggggtctaggatgtgcccctgcccagttctcctggagcctagcatttagactcttttggtcaaaagaatagtgagaaccaaaaccaaaaccaaaccaaaccaaacaaacaaacaaaaaagccaggcatggtggcacacgcctttaatcccagcacttgggaggcagaggcaggtggatttctgagttcgaggccaacctggtctacaaagtgacttccaggacagccagggctatacagagaaaacaaacaaacaaaaaaaagaacactgagtcacatatacacaccaggggccagggtttgccctaagcagccgcaagcatgcgtggggaacagagcccggctcccaaagggaacagcattccaggcaagggctcagcaatgagggagttctgggatgcaggggcatcgagagggagagtggggagggggaggggtgtgtcctctgtggctgaagcttggtaagaggagccaggcagactgaagagtcagtggggccctgccggaagtgatacatgtgacatacatgtgacatacggtagctctggtttgccagggactcaggaagaaagcccatgacagttcccaaaggactctgcccttgacagccagagtctccccacttgtgcctggtctcctttcagctgctgggaatgtatcgcctaaccctggggtccctgctcaccctggccctccaagagcctctcctggctggtgagaaaaggctccttccttcccaagctttattcggactaaaagcaccgaagacctggctggggaccttcccttccacaagaggccactgctcacaagagtctgcgtcacaggccagactgggacgagc

SEQ ID NO: 757 - DNA, 1754 bp, Mus musculus
gcagggcgcggagtagacgcttcgcggcggacggagaagcggcgcgggacagcgtggggaactcggattcggcctgggacacccccgcatgcgccggccggctcggtagcggcggccccgatgctgctgcagcccgcgtgctccccgagtgtgtttccgcggccgtccgccgcccccagcgccatgcacggctcacagaaggacaccacgttcaccaagatcttcgtgggcggcctgccctaccacaccaccgacgcatcgctcagaaagtacttcgagggcttcggagacatcgaggaggccgtggtcatcaccgaccgccagaccggcaagtcccgcggctacggcttcgtgaccatggcagatcgggcagcggctgatagggcttgcaaagaccctaaccctatcatcgatggtcgcaaggccaatgtgaacctggcctacctgggtgccaagcctaggagcttacagacgggctttgctgttggtgtgcagcaactacaccccaccttgatccagcgcacctacgggctgactcctcactacatctacccaccagccattgtgcagcccagcgtggtgatccctgccacccctgtcccgtcactgtcctcgccctaccttgagtatacaccagccagcccagcctacgcccagtacccgccagccacttacgaccagtacccatatgctgcctcacctgctgcagccaccagcttcgtgggctacggctaccctgctgccgtgccccaagccttgtctgctgctgcacctgcaggcaccaccttcgtgcagtaccaggcacctcagctacagcctgacaggatgcagtgatgcgcgtcctgcccagggccacagctgccacctgccagcctctggagccaccaccatttgggtctcctcaggcccccgggcccacctgccctgaaggcagcagcaagtttcttctgcagccctgccgtgcttgaggaagggcctgaggaggaagggacactcactctggaagctctgcagccactccgtgccaggtgccttaactctgggacgtgtacagacgtcctccctcctctttgggaactgtcctcttggtggatccgggttcctgaccccacctccccccagttgcccctcagtcgaagcactgtgccatgtcctgctgggaattttctgccatgcaggcaagaccatcagcaccgagaaccccaaacctgttttgtacttagagactggctttggtcagtagttcactgtggagacaatgacagtattctctgtgccagtgtcgctgatggagctccccctccccacagggctgccattaccagaccacggccctgcagggccctgggctcctgtctgctgatgctgcccgcctcacctgcagaggtgcccatcagggcgagttctcaggtgtctgttgctgtgccatgggggccttcttcctggccctgtgcccctcaagcaggctctgcccacccaccctcccgttgtcacctgtgccagtctgacctagctgcacagagagaaggtccagcccacgtctaggaggggaggagtgggtatctctggcagcatgggctgcccgcaggctgggcagtgggtccctccacacctacctcagggagccagtgtgcgggcgggaactccacagcatgcctgttagtcaaggcctggaggacagagggagtaatgttataataatatttttattagaatgttctgattataaaaaataaaacttgttttctttaaag

SEQ ID NO: 758 - protein, 273 aa, Mus musculus
AGRGVDASRRTEKRRGTAWGTRIRPGTPPHAPAGSVAAAPMLLQPACSPSVFPRPSAAPSAMHGSQKDTTFTKIFVGGLPYHTTDASLRKYFEGFGDIEEAVVITDRQTGKSRGYGFVTMADRAAADRACKDPNPIIDGRKANVNLAYLGAKPRSLQTGFAVGVQQLHPTLIQRTYGLTPHYIYPPAIVQPSVVIPATPVPSLSSPYLEYTPDAYAQYPPATYDQYPYADAAATSFVGYGYPAAVPQALSAAAPAGTTFVQYQAPQLQPDRMQ

SEQ ID NO: 759 - DNA, 37898 bp, Homo sapiens
tgctgggcacggtggcacctgcctgtaatcccggctactggggaggctgaggcgtgagaattgctcaagtgcttgagcccaggaggtggagattgcagtgagcctagatcacgacagagtgagaccccgtctcaaaaaacaaaaaaacatgtacttgaaattggactgcccaccttcaattccaactctgtcaccaactttgctaacatgtgatttaccctttgtttaagcctgtgatttaaccctctgagcctcagtgacctcatctgtaaaatgggagacattaaaagtagctatcataatggttgtgtgagtagtcaaagagttaaagcgtaaaagtgcccctgtggctggcccgtgatgtggagtttgaatgtagctgctactacgagtgccagtgaggatgacatccatgagaagtctcctgctcaatggggctgtgctgtcggtatacaggcgggacaaaaaggtccagagaccaagtgactggagatcttgcttgtctctaagattctttccccaggagccgggtgttgtgcttaggtctggccagcagatggcgcgaatggccccaatgccaacattggagcatgtgtttctgtgttcagtttcacagacttgagttcattaaaagaaatgaagtgttggccacccccttccattttttgttgtgttgctaagcttttaggatatttgggaagtagaatcaaaacattgcttatgctgtcagaagaatcgtcttaaaaataacacacttagattgaaggcctccttggaaaatgctaaaggagataatttgtcagaggtgggaccctgatttttctgtttcaaacttaatgtccgcgatggtttcctcgtggaacactgaagccttggcgcccgcggtgtgggggcctctgagcactcccgtgccccatagcatcatccctgccgtgatatgggaaacacaaatccctggtggtggcaaacaggtcactttaagactcgtgttagtaactttgaggctctgtggcccgttggaattgagatgtaaacctaaaacagcagatttcaaaggcttagcgccaaaaaaaatgaactaaacacatgctcttgaaattaatgtaaatgccattaattttcataccaattacacattcaaatgatactattttggataatttaactttcccctgcttatatttgttaaaatgtggctactggaaattgtagattccattcgtggctcatgttgtattcatctttctctgggacatcactgcactaggtcatctgacttttggaggtgtcacccaccactccacaccaaatattaaaatgcacccacatcctgctttaaatacacattgttttgaaggcaaattctttgaaaaactttcctattttacttctgaaatgatttggccgtaagcgtacactccatgttgatttcttaatcatgacctcgaataatagggaatttctcacaaagtgcagcgtttcctacaaagctacaaattgttttcaaattgattggatattagaacactaaatagtttgtgaggtctccagtattacatttgtaggcctttacttaaacggattaatttggggatttttcttgtttgtttttggtttttttggggggaggatagcatcttgctgtatctcccaggttggagtgcagtggtgcaatctcggctcactgcagcctctgcctttcgggctcaagtatcctcccacctcagcctcctgagtagctgagactacaagtgtgcaccaccacaccaggctctgttttttatttattttttatttttttgtatttttggtggatacagggttttaccgtgtgtgcccaggctgatctcaaactcctgcgctcaagcagtcctcccgccttggcctcccaaagtgctggtattacaggtgtaagccaccacacccaggctggggttgttgtttttaaatatcttcaagccagttctctttttctttctttctacctctctgcccttcaacatttttgtaggctcttaaaaagctgtataagccccagaccccagggcctggctatagtgtttaggaaaggcagtctcaacacaagcattgtatttccttgcaaggtactggcttgttaatcagagcctggcaatgtttcacagctctgcgaggtcttcctgctcactgcggttcccctatctcacggcctacatttatcccacggagatgggagaagccaggagaggttgtggctgcacctttgagggttttattatgacaggtgttaggtcactgtaaggcaaatatgggcagtgtaaacagtttcgtagccgactgtgtgagtttttacactttattgaagtgtgacatataaaaggctgtacatatttaacttatacaacttgatgagtttggagataaacatacacccatgaaaccatcaccacagtctaagagcctattgtgaattttgcatcaatctattgaaaaatattttttcaggtgagggctgtttcgaaagccaatgagaaacacctgttgcatacttgcttaaaatgtaaatcggctcccgaaaaagaactgacctgcattcttaatcttttattctttttccctcctgactgtggtgcagaggaggcagtatgggaggagacaaagctcaaagaaggcactgacaatccccagcatcctacgggcccgaatccacactgcggattccgtcagctcactggcggcagcactctctggtgtctttttttttttttttttttttgagactgagtctcgccctgtcgtccaggctgcactgcagtggcgtgatctcagctcagtgcgccctctgcctcccgggttcaggcgattctcctgtctcagcctcccaggtagctgggattacaggagtgaaccactgcacctggccttctcttgtgtcttttgtctttcatttctcttcttcactacccgtcagcatgataggtttcttcctcctcttatgaatcccagtgtcaagatacagcctgatcgccccttaatacggtgccgccattactccagacccctctgcaagcattggtcattcatcagctttcacgaggtgaactggggacgaggcaggggcttggaccggcttcctggccaggactcactgccttcctcagctgagaagactgcatttccaggttgaaccctgacccccactgactttgggcatctccatgtgtcctgtgtttgccagcctttccactcccttgtaaatctttctgcctccaggactggctgctaaaacaggtgcactggaggccgctccctgtgttacttgaagcatggcacttgccactgtcttcggtgagggggcgtttccctctggtgctggggagccagggcatccatttggggcttcatgtcatctcttgggacttcacgtacctcgaatccaacctgtgggccccttcggtggggctttgctgtgagagtaccttgactggtgtggaaggcccaagcatggttctgcttagcacctgacggttgcctacaaaaggaaaatcagtattaatatttgttatgggctgagctgtcgtcctccagattcatatgttgaagtcctcactcctagtacctcagattaggactgtattttggagacatggtctttaaacagtcaattcagataaaatgaggtcactaggctgggccctggtccaataggtctggtatcctagaccaggaaatctggacacagacaaggacagaggaagggccgcatgaagacacaggaagagggcgaggtccgcacaccacagagaaggccttgcaaggagccagccctgcagacatccagatctcagacttgtgccctcagaactctaagagaataaacttctgtcgctcggtctcccggcctgtggtagtttgtgacagcagctcaaggtgaccactacagtcttccgcagtggccacttgcatttgggctgcatgacctggtgtctgcaggatccacagcaccagccaccgcgcaccgggctcccagggcaggcagtgttgagcgtcttgtagcggcgctggtgggggcaggatctccggcctgtgccaccctcacagccactgcagaaacaaactcagccttccccagcgccacgtgcagctcacagctcggggattcgctgccccagcgccacgtgcagctcacagctcggggattcgctgcaggcttcccttcacctgctaacctgcaaggtgccagaaaaccagaagcagtagcgtccctgagagagttggggcgtttgtgccccacgtttcctgccagcagtggctgctttccttggcttgatcaaggcgctgcctgcagctgtccagcttcttacctgacgtctcggccgcccagctcagctcgcaagaattcttgttcttcgtggcacttccttttcctagagctttcatcaccaccattttgtttgtttgtttgtttttgagatggagtctccctctgtcacccaggctggagtgcggtggtgtgatctcgtgatctcagtggcgtgatctcagctcactgcaacctccacctcttgggttcaagtgatgcttctgcctcagcctcctgagtagctgggattacaggcaccacgcccaacaatttttgtagagatggaggccaggctggtcttgaactcctgacctcaagggatccacccgccttggcttcccaaagtgttgggattacccaccagcacccagcctctcatcaccatcttgaagccaaaggatgaggggacaccgagcccaggggcaagtgccatcatgcaggctggcgccagcacctgcctaggccccctatgcagcccctgccctcgcagacacacctgtccacactgtatagcaaggccacctccctcttcatgagaaagatcctggggcaacgaacaacttttggcacaggagaccaatcaggtcatttggttattgacagggagtagcaggctcttccccactttctcattcttctgcacccccagtttgccacttggactacactcctttccctaggggatgagggctcagctttcaatgtgagctgtgttgtttcccgaggttgcagtaacaaatggccacatgcttagtggctcagaaccacaaaagtgaatcctcttatagttctggaagcctgacatccaaaatgactattaggggactaaaatcaaggtggcagcaaggctggttccttctggaggcctgaagggaggatccatttcttgcttctcctggcctctggtggctgccagcaacccttggcttgtgaccgcatcactccagcctcctgttctgggctcacatctattcccgttccttagtcaaatctggagccgtcctcagatggagactcttgtgatttcaatgggtccctctggatgaccctcgatactctcctcacctccagatccttagtcacatctgcagagtccctgtcaccaagtagggtgccatgttacaggttccagggattaggatgcagaggccaggattcggccatgcacacaggccagtgtctttctgtctttgcagctgaaactgaggcatgtgcactctgctgctccaggagctgtccaccaatgctgctggggcggcctgtgacagcatcgactgagcctgtcattgccacctggagaggggctgaacctttcctctccccagtaccagtgcctgctggtgcattttggcctctgtgcccagtagtatggggaaactttttttttttttgagatggagtctcactctgtcacccaggctggagtgcagtggtgcaatctcggctcactgcaacaacctctgcctcccaggttcaagtgattctcctgcctcagcctcccgagtaactgggattacaggcacgcaccaccacacccagctaattttgtatttttagtggagacggggtttcaccatgtcggccaggctggtctcgaactcctgaccttaggtgatccacctgcttcggcctcccaaagtgctgggattcccaggctcactgctctgcacctggcagatgaaaatggcaacctggggctcccatggattcaaaggagctgggctgcaggctgggggtgtacaggccacctgcaccaagctcagcccaaagctgagtccccgaagagccttgatataaacaccaacacgacaaacaaaaagaggaggcccaagagcgcggggcctgaagactcaaaccagagccctgcctggatggggctgtgctgtttcagatcgcagtggccggcctcacctgctcctctctgcacatcctcatcagggtaaactcactctccctcctctgcagggcagctggagccacagctgggagcagagagcaggcctaggccaggcagttctgcatttgtgccctgcacacatcacacatttgcgagggaggcaggagaggacctctctgagcatcagtttcctcagctatataatgggcatcatcgtagtcatctcttcctagggcttttgtgagatgaactaagataacacacagaaagtgctgggctcatcctcacactgagcaggaattctgcgttccaagctcctgcaatttccattttctcacccagcacacacagttgccagtcctccctcccgctccccagtgaggcctgagggacccaagtcacctctgcccagcctggctcccagcctagtctcacaaaactgtgttccctttccaggggccctttgtgggccatggaacccttggcagtcagctgatacctaaggtaatagtattaaacacttaaaatgcttaccagccaggcacggtggctcacacttgtaatcccggtgctttgggaggcggaggtgggagggttgcttgaggctaggagtttgagaccagcctagacaataaagggagaccttgactctacaaaaaaaaatttaaaaaatcagctgggcgcatgcctgtggttccagctactcgggaggctgagactgcagggagctatgatcacaccactgcactccagcccggacaacacagcaagaccctgtctttataaaaaataataataacaaataaaatgcttagattagcaaaggaaaacaatcacattaaaatataggctgggtgtgttggcatgcacctgaagtcccagctactcaggaggctgaggcaagaggatcaactgagcccaggagttctgtatcagcctgggcgacatagagagaccccatctctaattaaaacaaataaaaacggctatgaaaatatttaaaaaacaaatacgtgatgtagcaatgtagacaagcaatgtcttcttcatcaatgcgttcaacaacaaggtcaagtagtggcgctgatgagactgtagtttttttttttttttgagacggagtcttgctctgtcgcccaggctggagtgcagtggtgcacataaatgtgtgtttgaggctgggtgcagtggctcagcctgtaatcccagcaatttgggaggccaagtcaggaggattgcctaatcccaagagttcgagaccagcctctacacaaaatataaaattatcccggcatcgtagtacgcaccggtaatcccagttacttgggaggctgaggtaggaggatggcttggagcccgagaggtcgaggctgcaatgagctatgatcgctacactccagcgacagggagagaccttgtctcaaaaaaaaaaaaaaaaaaagtgtgtgtttgggtgaatgactgattgtcaggcagaagctggtgacccgtggagacatggggccgccggagggggggagggattggtgatccagatacccaagggggcccgggggcggggggcgaaggagtgcgactggacccgcacctgggcaaccgcgtctccagcctccacggccctgtcccgcccccttccgggcaggcagaggccccggggctgccctgccgcctgggcccggcccccgcggcagcagccgagcggccgcacccctttgtggggctgtcgtgccgggaggggcgcgggcgaggcgggcccgggcggcgctgggacttgtaggccgggagcccgggcgcctccgggctgaagcccgtggccacgccaccgacgcggctccagcctgcccaggcaacgcgacggctggggacagccttggaaaaactgaaggggaaaccgaggcctggtgaagggatccagctggcgcaaaagcacgcggccgcgcagtggccgcctcccccggcctctagggggcaagtgaaggtcacacttaaatgaaagttttcaaagtcgcttcgaagggcctccggctgggccagagctttcccccaccccaccttgttccatcgtggatacactcaacaaacatatcccagagccctctccttgccaggccctccagcttgggcaaaacatcccaggtccctgttctcgcagcgcccaaatagcaggggaggggctccaggcaggcgaacacacagggccggggaggtgggaaactccgcgaaggaaggagaggaaaccacgcgggatgaagggcaacgggggccgcaagcgggggcaggagcgccaggaacgaggaacgaagggggaagggaggaaaggacgcccaggcttccggaagactcgggggtcccatccccactgtgcagagggctagagcgggagctgggggagggagaggtcagaggtcaaggctgccgcgtggagcgtgggccgtggagtgggggagggggcgggcagactcctccccgccggcagccagggcagagggctggaggaaacgcggagaactcctcggtgctggaggaaacgaggggaactcctcgccggccttgcggtcccccacagcccacggagtgccactcccagtccccacagaccccacctgcgtcgccctgtgctgagaggaggccgcagggctggggccgggagtgaccccaattagagctgctgtttcccagctgcataggtcccaaccgcgggggctggagatgaggcgggcttgaggcccctagtcccggcttcagaggtggagggtgtgacccgcaggtccgggatcccggggtctgtgcagtcacacggcccttcccttcgctcaggaaagcccggggctgagtttcatgctcaaccgctgccaacttgaaattcctagcttttgaataaggggccccgcgtttgcattttgcactgggccccgaaaattctgtggctggccctgcctggtgtgaagctcacagagccccactatgcgccgcctttctatggctgggggccggatgagggacccgggtctgctcttactcgccccaagggtccctgacaccagcccagaacggggtggagctggaaagagcccacacctgcttcctctgcccacctcatctcccgcggggcctctgagaccgcccgggacccgcttctatcgcggcaccgtggtgtagctccctccggggtcgtatgctgtatgtttactagccgaattctcagtcctggacgctccgtggggccagggaatatgatctgtgctccgctgcagcctcgcgcccagagtaaatatcggtcggatgaactaatcttacatataaaacagaaatcatttcccttttttaatatggcacgtggctcttccctaagtcgccctgggttaaataccgactcaattaacaagatgctaaaaaccgtttacgtttttttacgttttttacgtttaattcaccagacggtgcgctccacgagggaaggggcctggcctccctagttcagggttgtgcttagtgcctgcaaccggccgggcccgcgggggcagccaggagagaaaggcgcgcccagcgcccccaggcccggatccgccctcagcccgcgtgcgctcccctcccccctccccccaatcgccgcgcgcccgggtgcggctgggcggggttagaactacgcttcccggcggtccccgcgcgcccggggcggggcggggccggctgggggcggggctgagctggcgggggcggcaggctacaaagcccgggggcggtgccggggcgcagagtccccgcagcgccggtcgggagcgcagcgcggcgcacgtcggcgcgcacggcgggacgggcgccggagtggtcgggcctggcggctggacgggcgcccctcgctgccccgcgcgctccccgccgccccccatgagcgcagccccgcgcggcccgggtccgtaggcggcggggcgccccccatgctgctgcagcccgcgccgtgcgccccgagcgcgggcttcccgcggcccctggcgcccccggcgccatgcacggctcgcagaaggacaccacgttcaccaagatcttcgtgggcggcctgccgtaccacactaccgacgcctcgctcaggaagtacttcgagggcttcggcgacatcgaggaggccgtggtcatcaccgaccgccagacgggcaagtcccgcggctacggcttcgtaagtggcccccgcgcccgggcccgcaccccgccgcacaccttatcgcggcccgggcgccgagtccactccggggcacacgcccagacggcccgctgccgcccccgccccaggcgcctccagccggcgcccgcacctgccgcctctcccgggcgcgctcctgccggtcccgcccccaccaccccaggccccggcccccacccccacccccacccccacccccacccccggtttaaaaggaagagccgctgtgttcaattaggactcctaagttggtggggaggttttggagccagagggcactcgggatttcctggagcagcggggggtgaggagcaatggctccaccccggggtgttaggagctcttcggcctcccccatatttttaacagccctctcagccgccccaaataaacatcagcttaagtaaaaacgtcttgaagacactttcctgcttaccttccaagcatagcgtcgcaaactccttctcagaggaaagtctcggccctcactggtgggcaagtccaggcggccccccaagctcccttcggggttcatttttgccctatccccgcaggggattatttttgtccttgaaggccacatttcccaggccttgaactttgacgggaggagctggaatccaggaggcatctttgtgggagagccccaggtagggttcagaggagctttggctcaaggaccctgggtcacaggcaccctcagaggaagggaagagaggggtggcagcatccggtgccagggcggagccgtctgcccctttcgcccctggttccccccacggcagcccctgatgtgtctctgctccaccaggtgaccatggccgaccgggcggcagctgagagggcttgcaaagacccgaaccccatcatcgacggccgcaaggccaacgtgaacctggcatatctgggcgccaagccgcggagcctccagacgggtgagagcttgtgttttcctgcctggctcttctcggtttctatattgggtgtcggtatctgtcgggtggaaagaggccccccctcctcgccccagcagtggcagtcggctatcatgtgcctgcagagccggcacagggcagccatccccccctcgaggatctagaccccttctcacagcgtgtggcccaaagaagggggcggggggcagggagggtactgcaccccagttgccagctgtcctcgcaggagggaggaagtggccatggggcctggaggttaggagtgccgacaccagtggctgctgacacctgcgtcactcactgccacacttcagcggtgtgccttggggttcacaagggggaggcctgggaggggagaggaagcggatgatcccttttgactagaggtgtgtggcttgtgggattctgccaccctgtgtgcagcccttgagacgtggctcgtgcagcaaggccaagtccctgattgttctctcgttttaggctttgccattggggtgcagcagctgcaccccaccttgatccagcggacttacgggtgagtggacatggctggcttggggtgggtagtccgtggagatgaagtggagagggccttgggcttcctgggtctggaaggctggggaaatgacagttttcagacatttgattgcgtttaagccaagggagtgaagagaaggcagattgcacttctccatccctggcagaggccataccacctaggggatggtgagccttggagcctgcctgccttggtacacaccccagctcccttcgctaggtgtgtggcctcagtttcctcacccgtaaaatgggagtggtcacagcacatctgagttctctgaatggagggcctagggtgggcctggtgcaggtaacgccctcttgaagtgtttgctgatgactcttagggactggcaggctgagttcttccccaggcactcctctcacctgttctagtgctggggcaggtggtggcagtaggtcattgctaccaaggtctgatgtttgtgaacgttgctgtagatacgatgtgtttggggtggaggccacctgcctgagtggcctggcctatgggcttctagtctgactcatttacaagcagcgcagcccactcttctccatcctaaaacgcctcccacctccctgcccttttttaaaacatctagtaagtcctggcagctgcttggggagggacacacacacttaagggatacaaagagtcctgccttgcggcctgcctccccacccccatgatggatggaagctgtctgccctagcgccgtggcatattgatggggttggagttggaggggaaggcagctcagagaccaccacccctttcagggcattggcacttcatgaactttctgaatccaaatccctaatgccagttgatcacgtgtgtgtgctcacgcatgtgcgcaccacgtagattccattgagagagacacagcttgaggagtaacctgcctgactggggcagtgtggacaaggatcctgtggaacccggctgagcctggctcccaggtgaatgggtcagaggccccagcagaagttgctgtgcccactttttgggaacgcttggggtgactcgggggctccctgctggcttccgtgtgtattggtggatgtgtgcaagtgtagcagtgggaggagccgctggctgaggggtgctggagggtggccggggcccttctagcctgtgcgagtggccgggcagctcaggttcctgccggggtgcctctgtcctcctgggaagggagcgtgtagggtggtgggagcaggcggccctgtccgtctcgtcctggaatgtgttttgtagatgtctagagtcgtcttagagggtgtttggggacactgtagccttcatgccttcaccgagattcttcctatggggttcaggccacatgaagagggtgttccttgttttccagaaccttggctccattccccaggcccacagcaggcgcctgggggcatggactgggcgggagcagctgcccagaggtgagggtgtgtgcctccagtgcctgcagctcttttctgcttacagtgggataaggccttcccacgtgcgtctgggctcgctctgatccacacagctacctctgggactccatacccatcagtgcttggcctctggggcctgcagaggtgggttcgaatcctgactttgccccttaccagctgggtctgtcttggcagtggcatcctcatccggaaaacaggaacattaactgcttaaaacagtgcgcaggcatgtgggctgggtgctctggcctcctcagaagtcctctcctgtcctcatagcaggcctctgaggatgggactgaaaccattcttactttatagatggggaaactgaggcagagaaaggctaaccacctgtctgggcctgggggcgggtggcagggccagggtggggaggcgtgaggtaatagacgtccaggaggagattggaacacaggtggtgggtgcctgaacgcatgctttcttggtgggggacggtgggaagggccctggcccgacctttcccttgctgtcctggagtcctgtgaacaccacccatccagaagcagttgggatcggtcacagagtttgccactgtgtgcccccgacttcaggcgacggtgttttgtaactaaatctgctggctggccatttaatacttgtgacgatgaagaggccgcagactctatttgttggttgccaaagggtggagacccaaacagggacggtgtcagaggggccatccgctcttggcttcctgggagatctgaactcaagcctctgagaatcgcgccgcctcctgcccctgcctgggccttactgaggtgggtagggggaggctcccgggtgcagctccagggaggcagcggggcaggctgcctgggtcagctgtctgcccccagcccccgcccgctgacggagctggagagctgggccggagctggagagctgggccgtcagcgtcccttttgtctttgtgaacaatcaggccccgggagcacagccgggcctgactcagcggccagttttgtcggccttgggctggcagcgacttgctgttggctgagggcatggagggaggtgggagccaggagcccaggcagctgagggttgtccaccagttaaccccttccgtgcctggctgaactcttcctcgactttctgaccccgaccttttataccttgccctggacaactctgaagatcccacagctctgcttttaggcaagaccctgtggaatcttcttcgcctggctgggtcttaaatgttagtttagaatgatttaccaaagaactttacactttatgctatttgccggagtttccttgcctcttttcctttttttaagttgaacaagctctgtgagacctaactcacctgtgcatttctgacctaactgtatgtggccactgtccgcggtttggaggagccttcctcggcagtggcaagcacgtggtagtcacagcaggagccggtggccgtggcccaccaagggtgtctgccagctgagtgtgtctgtcacctgccggtgggaggggaggtgcagcagtctggagagggtctgtgtccaggcagagcttagtctggcctggaagggtgccctgagtcaaggggtgtctgtccattcttgggctgagggcaccgggagcagaggtttgtcctgggactagctgcacccagagcctctccttgggttatttttgaagggccagctgcttccctgggtgcgggtctccctgcctgttaagggggcctggctgtggccttgactcccgttcacagagtgcctcatatgtacattatagaacgtttgaagggggtggaatatccctggcctccacccctagaagccagtagcattgcctcgcccaagtcatgactaccaaaaatgtctccagacattgccaaatgtcccctggatttagtggcatgaggaccagtatctgtgagtctcttggaccttgcctcatggtcacaagatgactgccacggctccagacatcccacccacgttcagggcagaaaggacaataagggccagtacgaactgcctctgtcttttttagcagaaaaatggaagttttcacagaggccacaacaggcttccacttaagtctcactggccacaactgggtgacaggacacggccaccacaggggctctgagatgagaagacaggctcctcggactccggagtgtcaggtacaggctgtatccaggagcaagagccctgggggtctgcctgggcttaaggccaggcccagcctgtctctgcaggctcctccccatctgtgagtgagaacggtcacactgccttccctacagggccaacttgactgtgtgtggagggcctggccctgggaagtcacggtttgtcagtgacgcatctcttgccggccctgcttcagggtctgttgattgattacctgtgcaaaaccgaggcttagagcaactgagagacttgctgagttcacacatcccaggatggtggggcctgagctgtgggctgcgagactcttgtccctcccacaaggactcaacgcctccctctggctagatggcagctcttggatgattcagagcacaaggcctcgagactgatgatgaccgtgagaccctctcccaggcatgtgcctgccccactgcatgtatagtttcagggacccctacgtcctttgtgtgaaggtctctggtgcccactgggtagtagatggctgcccttaccatcacggggccttggtgtgtgcacaccacggggcctggacagagcacctgggtccccagagcaagaggacgtactggggaggcagtgatgggaagatgtctgtctccttgagagcatgggatgcacaagctggggagaatgtcaacagctactcccagcatcattcattcatcaggtgtttattgagtgcttgctgtatgccagacctggtgccagggatcctttgaataagaaagacacggtccccgatctcgtgctcacattctgtttgtgcactcgtgggcccacatggtgatgcgtgcagttaaacaggaagctggcggaatgagtgcctgcgtggggacggaacagttccgcgtctcgagtacagtggtggggagatgtgtctgtgtgtgtgataaagcttcacagtttgtgtgtaactacacatgacatgtaagaatgttggtgtgtgtagaagatgatgcagcgtgctgaaggcctgcagtccaggtcatagcagtgtgcctgggttagtgtcctggttttgctcatgtccttagttactctgatgtgcccttgggggatggaggaggtagggtacacaggatctctctgtactgtttttgcaacttcttgggagtcttttattattttataatacaaagtgaaacaaagccagaggagctgtttgcaggtgatggcgtgtgtgtgtgtgtgtgtgtgtgtgtacgcacgcacacgtgtgcgggcgtgctggggaaggctccactgaggatggcggaaatgggccctgttggcttctggggaagagcgagcagcccaggcccagggtgacaggccagctgcaggtcgccgtggcgggcacagggtgagcaccgcagggcaggggcagaagctgaggtcagagccaggcggcatgggggctgggaggaagtgactccccccaacactgtggcgtcacgttttcaccctcagggtgtctcgtggtggccccgccgcccccctgcccccccacaaggcttcctgtttggcagctcatctggagccaggcgtgggctgcaccgtggccctcctgggcgggcgcccgtgccgcacctgttgtttgtcctgtctgctgaaacagaaagcagcctttgggtggcgggggctcttctccgagcatgagttctcaccctggctccctgctgggcttggggagcctcttctggaagccttgggccaaggggcacagctttgtctcagggtagaagcctgatcacagactgagtggaggcccaagctcgagctttcctcgtttagcctcagtttcaccttgtgtccagggtggacaggctgataactctgcagtgtgcttgcgggcatcaggaccttcctgctgatctcatttggatagagtagggagctggacactgggtcagcttgtctgacagatctttgcttgctttgtgccaggctggggatgcctgccatgggggtgaggggagacccggtcccagctcctaatcacagtgctttctgcagcgaggtgctgagaggaggacagagacaaaggaggtcagcatgcctcagaaggcgacaggagctggggaggggaagggagcagccggggaggctcagggcccgacagggtagcctcagctcctagaggactttgatgacccagggaggcactgctacattcctccaagtgacaccggaccacgcaggctccgagcggaggagggatgggtcagtctgcatttttgttttcagagtgtttttgcttctggctgctgggttgagcctggactgccgagggtattgtggtggttggaggcccttagaggatgcccagtaatccaggcatgagacgagggtgctgcctgcaccagcggccctggtgagatacagtgagattctgggtgtctattttaaagaacctgggaaagaaagaggagtccaagaagattctggagctttgggcctttgaaatgggagatgggcttggccctgactggggtggaggcagctgtgcagtacagttttggggagaaggtcaggagttggagtttgggccggttcaggtggagatgctgttccgggcctggcattgccccacagagagggcgttcgacctgtgtcctgtggctggctgccccacagaacttgaatgtccctagacctcccggccctccccctcacaagtcactggggattcccgggaggcagggccatggcctggcttcctgcctgccaggcgcctcggggaccttcccacacccagccaggcgggagtcagaaccctaagagctgcggtccgtctctgccgaggtggggcaaggcccctggagagcagggaaagtgaaatgggctcatttgcctttttcgtttttattttcagaggcgactttatgttcagaaaatgagtcctcctgggccgtggtcagttcttttcgctgcgagttctgctttgagtgtgggcagcatgtgtccccagcaccatctgtacttctctctcccgcccaccacggggttctcagactctgccggaggcccaagccctctgtcttgggggcaatctgttggactctgcagcatccttagtttacagatggggaaacagaggccggaggggctgagtgatggtccatgcgacttggacaggcatggccaggatccgggcttggggctcttcctgcccttggacccctgagtctctgtggacagagtcagctggggtgctcttgactgtgtgctgaccctgggtgtgttggggtgcaaatgctgcctgggccacgtgtgaacgggaagggaggcaggcacctcagatttccagtctggaccaggctcggggtccccctgtcctctcctgggctgtggcagagccagctcctcctgcatgcccaaccctcccggcatggcctggcctttccagccctaatggtggcccgtttcagtggctccgtgatttgggggtttggtgttgcccaggctccggcactagagggaagcagagaacccctgagtcatccttccgcagacaccccggaccccagctaggtgcctgtgcccagtgtccagcgttgcagtggggcttgggtggcatgtggggggtctgtcccacccattcctgtggtttcttccttggctctgcctggactttgcacacgtggtgggattaattctctggtaaacagatccgcctctgattggtgcaagacccttctctggggtcttggtgggaggatagaagttttctgcagaggatgaggaggcacagacgcccggttgttctgaggccggaacttggaaggaaactggaagggaaggaggctcctgccctctcctttgaggttacagctgggctgtggctctgcaaccctggggagcgcgtgggactccagcagcggccgtacagagggccgattccaaagtggcttctagaggagggagcaagtgccgtgtgcccaaagaggccggtgggccctggccaaacaggagcagccctgatgagcattgggtcccccgacctttgggctcctacctgactgcgcctggccgctggtctgttttgctcaccaagggttcttggctgctgccccctgacctggggctgaaagtcctaggagagggagggcctctgtccctcccagcattcctcaggcccaaggaggcgtcgatgctgctgaagtctctggggtgcacagaagcaatagatcctcacagcagccccctggggcgtgtggttccccagaggcagtgatgaggtcacccggggccgccaggcacctggtcggggagcagaggctggcgggctgtgcctgtctagctgtgacttgctgggtggagccgtgcctgcctgtccctccagcctgcccagccctggctgctcaaggctgaactgctttctctgccttcttggggcagggactcttggcctgggaagcagaggccattccacgggggggctcttttgcctcccagctacctgcaaagccggggcctgcctcagatgctcagcactgggcacctgctgtgctggggcacttgggacgcagcagctgagaccctgctcttgtggggaagacattgtgcaaggtagatgatgaaggggcttccgatcataaggaaacagagccgcctgggtggacccctgaggggtgagctttgagctgtgggaagaagcaagtgcataggtgcgaaggtcctgtggtgggaaggagtcgaatctgggaacagaaggagcccagggcagtgggagtgtggccagggagggcgcagtgcaagtggagatgagttagaagaggtaggttgaggcctaataacgcaggaagccacaagggagcagtttgggttttcttctgggtacagtgggaggcagctggagggttctgcttctggaggtgatggggtgttgatgttttcgtttgtttgttttttgaaacggagtctcgctctgtctccaggctggagtgcagtatcttgatctcagctcactgcagcctccgcctcccgggttcaagccattctcctgcctcggcctcctgagtagctgggattacaggcacgcaccaccacgcccagctatttttgtatttttagtagagacggggtttcaccgtgttggccaggatggtctcaatctcctgacctcatgatccgcccgcctcggcctccctaagtgctgggattccaggcgtgggtcttgatgtttttaagacagctccaactgctgctgggtgaaggattcagggatggaggcaggtctccaccaccaccaaggcagggccacgccactgcgcccgcctggagagtcggtgatgaaggagagggaggatcggagaattgagggatggaagcagggagctccctgttggatggtgtgggcataggctgcagtgggggtgagtgggcagggcagtgcctgggtggcctggtgggctcttcactgaggtggagagtgcaggagagtcccaccagggccaggcagacacgtgccctggcaggcgagcctgtgcaggggacacacttggtgggtggggcggcgtgcagctaccaggctgtgcccttgtgtgcagaggctgtggcacctgagctttctgagcatggcgtgtgagtggggatgctgaggaacctgcctggtgcgtgcacccgctccccattgccaggcagtgaagccttgggcctgcggccggggcggggccgcccttggacagtgcagggccggtggtttggctgcatttttctttctcacctgaccactcagtgggttcgcccatgcgtgcgtggctgcatgagcccctctgtctctctttgctcccacctgccttctttgtggccgcccggcgtgggcacctgtggtcagagcagcagtgaggatcccttgtctttgcccttccccttccccatgtggtttctgatggtccacagtcgggcgtctcagccttggcactgcggacctttaggacggcatcgttctttgttgtgggggcaccctgagcattgtaggaagcggtcagcacccctggcctcgacccctaatgtcagcagcacccccacccgcacctcatattcctggttgtcagttgtgacaactaggaccgtccctaggcattttccagtgtcccctgggggcacagttgtcctggttgggaatcgctgttctagtggcacctctaggcctcacagcaagcttttgaggtcagcctctgtaggacccaacttacagatgaggaaactgcgccttggaagttttgaaacctgtttggtaactcagacaagtgcaggggcgaggcgcaaccctaggagggagagaagctgctggaacccagctcctgcctggcggggcttcgtggctgcttctaccttaacttcagccggtgttctcactcccccttggggcttgaggtgtggcccgtgctgtgccttccttttattttgagctgaacctggggccccagccagtccttgcaggcacagctaccagcagcaggccccactgtaccagtcccttgctctgcgatggggcaagtcgcttggggcctctctgaacctcggatttcctctctgggagatgggctaacactagcatcttttctatggcttttttttttgagacagagttttgctctttcgcccaggctggagtgcagtggcatgatctcagctcaccacaacctccaccttctggtttcaagcgattctcctgcctcagcctcccgagtaactgggattacaggctcccgccaccacacctggctaatttttgtatttttagtagaaatagggcttcgccatgttggctaggctggtcctgaactcttgacctcatgatctgcccgccccagccttccaaagtgctgggattacaggcgtgagccactgcgcccagccttccgtggctttgaaaatgcttcgtaagttatcccaggccctttacgtacagaaagatgagtagataccgacatgcagtgtctgcaagggtcaggaaacaggagagccccgccttcctccccagcctaaacattgctcacccacgcttgtgtttgagtgtccctgagtagggcagctccttggtggccaaggcagcgctctggccccgatgatgtggggcatcagaacccgatagaaatgacgcagccctcgaggtgagtgtggccggaacccagctgccccacagccccaggcacttgtgttctgtgtccctggtctgggcagcggttcttgaatgcagctgtggatcaggaccccggggcctgttcttgcacattcctgggccccatctgcctttgcagtctgcatgggatccacatttttagcaaaaccttgcggggagatgtctgaggcaggggcatcactgcccatgtttggagaaggtgtgtgggttcaaagcttccatagcctccaactaaggaatgttttcgaggttctgagagctgggtcgggggggcactgatgatgccagggacagcctgctgggcacagccccaagacagtccttgctgtgtctccactcgcccccttcccaagggaggcctccgagacccttctggggccccctgcctccgctggccagagctcctcatccttctcagtggggtctgtgccacccaccgggcctttgttccgtcagcaccatgtgcccagtgcctcctacaggcctggtcctggcagagagctgggagtccagacagagccatctccctgacagaacgccatccagtggggcatcgggcagcgtagcgaggtgaggggctggcctccatgtggggttgggcctcgccaggttaagggctccaggcagaggcattggcaggtgccaggcccaggtggggaggatgcgagggattgaggcgctgtggggcatgggccggcaccagggtggacctgggtgtgcagtggaagccaggggtcagcagacccggccgcccccatggtggaggtgccacgagagggttgtgcacagaggctgccggctgccctcatccactcttcagacactcagactggcgcctgcctccgcccttgtgccgccatgctgctcccctgtggccagctctgcctcatcattaggtctctgcaggcatcccctccttcaagaagccaccctggcctttcccccatcgctgtccacacatcacagccctctgctgtcttgacttcccctgagccccccactctggtttatgggttggtgcattttggtgcctctcccatcctagaagctaagcccctcgagggcaggggctctgtggtctgctcctctctgcatcctggcagatatgtgagaaaggcgtcacagctcgagagtcagaattcaaacccaggcctggctccgcgcgaggcccttgttcccatggaggatgcagggtggacagcagaggcttctaacctggggagagggacaggaggcgccactgcggggttcctggcaggagctgcctgggcctctggacagatgctgtggagggttggccgtgtgggctgcaggtgtggccacagcagccactaggatggctcaaccttggaaggtaaacagtagtagagagggtgacgcagtgtagaaacttcccacacacttcccagatggggtggggggagcaagaggccctgtcgtccaggttttcctggttcccaccgttgctgtagggctgcaggatccactgagtgcacctgcctttgtgctggaagccagggctcctctctgaccctgagggtccctggctctggggagggagctcgcagggctcctctctgaccctgagggtccctggctctggggagggagctcgcagggctcctctctgacactgagggtccctggctctggggagggagcactgtgttttcagtgcccacatgttgccaaaccgcgctccagaaagctgcccagtttctgtccctgccgaacgcaggagaatgcagggaaggatgttgtactttttctccagagctgcttcccttgaggggggcccctgcctacaggtcagaaggaagctgaggttccaagtcaccccccaggcgggcctggcctgtgtaacacgcaggcgtgcaaggcagaggagatactgatgcccagggcacagtgccgtgccctggaagaccactccgtgcctcggactctgcagcagcttctgatgccgcggaggtggctgttctgttgcagacgggaaactgaggcttagcggcttgccccaggccaccgagcagctggttggcagagcaggcacacgccaggagagctgcctccctgagcctcatttccccctgtgctgagggctgggcatgctgttgtatggccagcccacagcaggcaggaagtgttggcctcaatgcgtttccacagtggcctgcccaggtagggttaagagcacagctctgaggccggctgactcctggcccctccacctcatcagctgtaggaccttgggcaactcacctggccccgtgtgtgaaatgggcctcatgatgggaagaccaagccgacggggtgacgcacccagtcacagtacgggtctccccccagcgtgggcgctggcgagtatggcagctgttggcgccatcatctctgtggtcaccgccattgcactcctttgctccagcattcacgcagtcactctcacatcctcacggagctgctgcaggccagagtccatgctggcagggacagaaagaaaccctgtgagggctgggcacggtggctcacgcctgtaatcccagcactttgggaggccgaggtgggcggatcatgaggtcaggagatcgggaccatcctggctaacacggtgaaacctcatctctactaaaaatacaaaaaaattagccgagcgtggtggcgggcacctgtagtcccagctactcaggaggctgaggcaggagaatggcgtgaacccgggtggcggagcttgcagtgagcggagatcccgccactgcactccagcctggggaacagagcgagactctgtctcaaaaaaaaaaaaaaaaacaaaccctgtgaggagcaggtgttggctgggagagcaggcgtgtacatgagccaagtgtgcagtgtcacttggtgggtgttgagtgtcagggagatgagcagggaagggggacagggctggcctcccagacatgcaaccaggacattcgtaccgggccctgctcttgatcgcatgctccgccgtcgtggcttcaaactctcaatcatttgaaaacaaccattcaagatttttatttttgcaccagctccggggatgtggggtgtagggctgggatgcgggggtgcagtctgggaaggccttgctgagaaggagacatggagtggaggagggagcctggtggttagtgcagacagtcagtgcgaaggccttgaggcggcagcatctggccaggtgctgtttctgtgcccatctgaccgatgaggaaagtcggggctcggggtggggggcggcacgcatcgtgtaccccactgttctcccagctgtattccccaactccgttctggccctaacctgctctgcttggccccacaggctgaccccgcactacatctacccaccagccatcgtgcagcccagcgtggtgatcccagccgcccctgtcccgtcgctgtcctcgccctacattgagtacacgccggccagcccggcctacgcccagtacccaccggccacctatgaccagtacccatacgccgcctcgcctgccacggctgccagcttcgtgggctacagctaccctgccgccgtgccccaggccctctcagccgcagcacccgcgggcaccactttcgtgcagtaccaggcgccgcagctgcagcctgacaggatgcagtgaggggcgttcctgccccgaggactgtggcattgtcaccttcacagcagacagagctgccaggccatgatgggctggcgacagcccggctgagcttcagtgaggtgccaccagcacccgtgcctccgaagaccgctcgggcattccgcctgcgccctgggacagcggagagacggcttctctttaatctaggtcccattgtgtcttgagggaggactttaagaatgactgagaactatttaaagacgcaatcccaggttccttgcacaccatggcagcctctccttgcaccttctcctgcctctccacactccaggttccctcaggcttgtgtccccactgctgcatcgtggcggggtgtcacagaccctctgcagcccctggctgccctggactgtgcagagatgcctgactccagggaaacctgaaagcaagaagttaatggactgtttattgtaacttgatcctcccgagctgtgagcgcagtctgaggtgtgaggacacggcctcctgttggagtcccattttctccatcagggcacgtgggcggcttcctcaagcccggaggagctcccaggcgcacaggggccgccggtaacaggggccgccggccaaaggcccctttccagtcatagcactgaagttgcaacttttttcttgtaattgttttgctactaagataatttcagaagttcagtctattttttcagcggatactgccgccaccaagaatccaaaacctatttttgacttggagagacttgcttttgttggttccgcccgtggagacgacgatagtgtttctgtataataaagtgtctgccggctcgcgggccaggatcctctcggtgggatgggcaccacagacaggaggcccctcaggcccgtgcgggccactgtctgctgccgcctgccggggtggcagagtgagttgtctcaggaccccgtcactgcgacgttgacactcctctcccttcccttcctccccaactccccaaacactgtggaaggggagaaggaagtgatccacagcattcaggccacttggggtctagaccatggtggtgccagcctggggggggcagtggccctcagctctgcccgctggagcggttgagtgcagaagggtgcgcctcttccctctacccccgcaccacctgctgtgtgccagcctgagacggttcctgcctgtcttgggggttggtggagggtggaggcagttctgccagccgtggcagggctgctatggggcatccagggctgtgggggtctggaggaggggacatgaggtgagaggtatcctggccgagggcggggggcagcggggggtctccctccggacctacctcagggagctgagcgtgcaggcgctccagggcaggcctgggacagagtcaaggctcagagaataaaggtagctaatctcatcataatatttttattagaatgttctgatgataaaaataaaacttgttttctttaaagaaaaagttgatctaatttttctcaaaacgcagagctcccctcgtgcctgtgggcatcacccatgccccgccctcctggctcaggaacccaggatttcactggcagccgtgcatagagcgcctggcctgcaccggccgctgagcctcagtagcagaacagacgcagcccctcttcacacccgctaatgcaggggaggcctggcgtcccagccgccgtgcatcatccagcatcagcttcagacccggagaggactgcgcttgggttacttcttggcgctgtggctggggaggggcctggacgtggattgtgattggcagccccaccagatccctgtggaataggaggacagttcccccagagaaggggggttgccaccagaagaccctgaatgtgggttcctgagaggacgttggcaggtgtccaggacagctgcccttagggtagagttgggagggaagccttggtctggggctggatagtcccagcatctggaactcagagctggggaaatcacaaggccttcatagaggaggtgtcagggctggagaatccatcaactccttccttgaattgctcactcactgtgtcatcccgagacgtgtgctgggtcacacgcaaagcgctggggatagagcagacagggctgccctttgggtttatcatctgctgggggagacacaacaatgccccagggtgatggagactgacaggtttacggcagggaggggatagggattctgtgggggtctgcgcttcttcccaggccctgccggctggcccctccctcccactgtctcagtttgcaaacgcttgtgaggggtcagggagggcagcatggggctttcagcccggaggaggagacttgctgcagctgataagaacttggggatccacggaggggggctacgggtactgccagggttatcgtgaaggccactcgcagcctgcaagtttcctgtcactatcagctggtgacagcctctgggacaggccttcgggaaggccctgaggccttgaaaacatctcctgggtcccaggattgaaggctctggatagtgacaaacccaggagagggaatttctaagtcaccgagttgggtggggagaggggccggctgagggcagcagggatgcagagcgcggccaccagccccagcaacaagggtcataaaccccagcactgcagcaccaacatctgccgccactgactcaggtccccacgctgtgccacgcactttcatggatggtctcagttaccctccaggtatctccattatcagaccggtgaactaagatgcttaggagtggagcccacattgcctgggcccccaagagatgcggtgagaggggcttgcctggagctgaagggcgtgggcctgattgaggtggccggggtgtgcccagacatgcaggctgagcccagccaggtcctccccggccttgagcctcactgtgcaagacggtcgcaagtgtcctcccaaggcagggactttctgtcctacccactgtgttcctagcagccggcacaggcctgtgcccagagggccagatgtcatacacacatgcatgcagatgtatgtttgtgtatgtatacacgttaacacacattatcccagacccccatatgcacagacacatagacacacacacacacactgatacaggcatacctgtgcatagatacacatatccacatggacatgcatccacagacacattagcacaaacatgtatgtgctacacacacactcccactcgatattcagagatacatgcacacagagaaacagacacacactcagacacaccatcacacatacacacgtacacaccctggctcccacacagtacatgcacatgcacacggagatacgcttgcacacaaaattaccttcaaggcacacacagatgtgcacacacatatatacatgtggagatagacgtgcacacaccccatgtacctacacaaagatacacacatatgtgcacccagacacacatgtgcacacacgtgttgagtgacagtacaagacccacccccatcgtttggctccacaacaagtgagggtgttgcggggggcagcagccatggttttgagggttcattggcttgggagagagggaagtggagcaggtccaggccggaggactcggggggagaagagacgggcacagtgagggagttgccgtacctggccgctcacttggctgggcggcagatgttggctgccagtgtcctttggcgcgggggaagaccgctcattgccagccccctagtcctcgaaaaggtttctgtctggacattggcccaggctcggccagtgcacaggcaggcaggaagggccggggagctaacaccccagggcagccctcagcaggccagagggcagttaggggatagacgcccctcccttgccaccctcggcagtcactctggggtgtgtgccctgcgctggtgccctgagtccatgactcccccttctcttcactgcctcacgtcctcgatcccctgctgtgcttccagggatcccctcctgaagcagctgcctgtggggtttgcacacccagctgagacggccgtgagagacctcaacgacggcagcgtgggccaggcactcaacgtccccgggagtggggtgcccaagtcctgtggggcctggagaagcgcctgcttccccttcttcaaggagctgacaaagcccagagagcctcagcagtgcagccagggccatcccactaggcgggctttgcccacaggttgatccacctctgagctgtcaccctccaagcaggcaagaggaccaggcctgggagcagaggctgagcgcaacttccggggcacgtggctgctgtgtgagccagctgggggctgggagaggcacgcaggatccagaggggcctgagaccccaccccgccccatggcattgatttggagacttcttgctggggaggggcagtggtgagtgagaggtgcttcccttagagccccattttcatgccactttccagttgagcaaactgaggcccagagaggaaaaaggggctctccaaggccattgggctgtcactccccttctgggggtgtaatcacagagggactgggctgggacaaggtgtgggaaccacagccaccgcagcccacgagaagaagccacacaatggtgaggtcacctccgtgtcacagccctggcttgctctgctctgccctggtggggagcttgcctggttgccatcctccttgaacctcaccttcttccctgcatgcattgagctgacccctgggtagccccgcaggtcctgccggcccagcatccactcccttcctggtgacagcacctgcttttccttagggagctgcccccgcaccaccctcaggccaggtggttcaatggagccacctctacccctggctctgcagctcaaatagtcagcatattctactcccctggaccctcagaatggttcagggatagacgtgtgacccagtgtgggtccatgcgagtcagtcctcctgggggaggaaagctgtccctctgctgaggaagccaagctgggagcagataagcctgaagcagctgggggcagagaggagtttgtgcttatggagaggctgcctgagaaggaagccagcccaggagaaaggagagctgaggaggagagaggagcagagatagggtcttggggacatctctgggggcttttgatccagctatgcctgaagttagatcctggacctttttaatttgagagctaatactttcccccttttacttaagcctatttgatttgatttttttgtccctggcaaccaagactctggacatatacaacctcaaagggctggcattacttagaattaggttcagcaactgcaatagaaagtccaaaattagggtggttcttagctacctgtaatgcatttatttttctcatgtaaaataagtctgaagcaggcagtccaggacttggatgacagctccacagtcatcaggagcttaggccccttccatcatcccagtgaaccatttcaatgcatggcttccttccttaagaccatcttggggaccaagatggctgctggagctccagccatcatgttcaagtgccaggcagcagaagaaagaaaggggaaggctagagtatctcaagccgagacttctcgaggagacttcccagaagttgcacacaacattcctcttccatttcgttggccagaacttagtcacatggccatacttaactgcaagggatggtggggaatgtcggtgtttagctggggatatagctacctggaacacagaaagccttctgctaccaaggaagacacgggaatgtccttatgcagacaacttgcagtttctgcctcaggtccttccagcagtaagctttgagtccatgagagtcatgtcccattcatacgtgctttatggagactgttactgaccaagcctgttacctctttaccttcacaccagtggggtgcgctgggtctatccttatgcccatttcacccagggggagatcgcggctcagagcgctcactgcacatggcctgaggtcacctggttccttaggggcagttccaggaggacagctcgagcttctgcctcagtgaggtgttggaagtttggcaaacagttctcatcggacatggctgcccacgttcctacaggaccggcggcccaaggtgccttcgcattcatggtccttgagtgggagctgggcctggggccaccaggaggtgccctctgatgtgctccagtgtgctggcttggttccttctccttagcatcctcccacgaggagtggagtcatggtcccattttacagaggggaagacaggctcagagcggggaggtggcctggtgaggaatagctgacccatccaggcttcgggcccgggtcggtctgcctccaaagcctgtgttgttggtctttggctatgtggcctctggggagcttgcgtggaacaccttgaccagggctcagtcctgtctcctaagccccacccatgcctccttcaggggtgcagacccccagcctgggccagctgcaggcagggccaacaaggggcagcaggaggggctggatgcttgggccacctcaggcgattgactgagcccggatgttccggccacctcaggtgactgactgagccacggttacatcacctagaaatgggttaataaccaaggtcctgcctcccagggctgtggccgggattacaggggatgagttaggtaaggtgccccgtgcagccctggtgtggagtaggcgcccctcagggagccctcagcccccactgctagcagggtaagcgaagcgatggagggtgggtttgagaagacccctgattcctggaaggccacccgctgtttttcagggtgctgcctgaggatgacggacccatgctgccaatccaacaagacaaaccctcctgcttcagtctccccacctctggaaccgaggttgtcctcaaagccccagaatgcatgaaaactggcatttattggagacctgccatggctttacacctgtcatttccctaaactctcccagcagcctgtgagaagttgactgtgcccatttcacagatgggaaaaccaaagctgagcagatttggccgcctgctccaggccagagagctggacagtggcagggccagggcagagctgggggttggacccatgcatcctgaacctggagccacacgccgctgcaccctgaggactgggttctggccaccgcacccatcctccaccttcctcagccaaagtcagccgggcgtcctccccacccctgccctggctgctgagtcacacttgtgtttgttccccagagacgtaaacatccaaccaggagccccctgggcaggaggttgggagccctccagatgctgagcgaataacaggggcagctctccagcgtgccccgaggctgggtgttgcatagggcacagcctggggtgggcacctgggcttccagatacctcctgggcctcccgcaggggccgataagtgcctggctctgcttatcagccccgttgccctgcctgctcccgcctcaagtcctggtgtacacattggggtgcacggtggcctggagatcatgatggggtgaaccaccctccgcccacagcccggcccaccagacagctgagcctggtgcagcagaaacaactcagagggttcccgggtgcctcctgctggctccctgctccagtgatgggggcgtttttagagaaattaaaataaagatctttttttctaaactataaaattaagactgttggggggaaaatgtgactatttcctttaatttattaaaataatctgcatatgtgtataaaaaggagtggaaggaaagagaccaggtgttaatggtcgtaggaggacaggaggcttttattttttcttaacacggctctctatttttcacagctgagaaatgaaagccagcgaatgaggcttggcgtttggtcatttgctcttgcatctgtgtgtgcgcactccagacgctccagaggttccagtgggtggtgtctgtgcccctctcttctgctgactttctgggtttctctgataggcctgagcctgcagcggggtggggttggggtccaggcgcttgtctatgggaacccgctctgtcttcaaccgtgtgactcagaacccagtttcccggcacacacacaatcacacaatacaagccctctgtgactctccactaaatcccacttccttgcacagcctccacggccagggcgaactggccctgccacctgtctgatcctgagagagagagagagagatggagggagtcactctctccttgttgtccctgaaccctaactcaaatgtcagccttggagatgccttctgggacctccctatctaagctatcacctccaaccccatccttgttctctcatttgtttttctttccaagcagctgtctctgggataagggcctggcctcagagcgtcctaggcatgagtctgggctgcctcttcttcctcctccctgggcctgacaacctcgctcctgggaaatgggctgagcctggggttcctaccctcccacgcagtggcaggaccgtgctccccagcagccagcgtgccctgggatggctcgccctgcgcaggtgtggacagcctctgcccagcttgcaagcacaagccctcctgaaccacgggagagcggaacgtcaccaaaggctgcttggctcccacaggcctaggtggaggtgtggcccatgaaggccacagtcctgaatctcaagctgaggtttagcaaaagcctgcaaggtaaccgggggcgtggggagctgtagtcctcatcctcagggtgggcagggcagagaagcctgaacttatccagcactgggcttgtgccaggccctgtgcccaccactcagcagcatgggctcatcaaatccacacaacaacccactttatagatgcagacactgaggctcaggctagtcagggagttttcccagggtcacacagtgagtagctggcagagctgggctccaaaccccgggggatctgatgccaaagctgccctcctaacctgcagctggggtctccatgggaggagacaatgacctgtattctggtgtggccacagggagaaaggccacagagccactaagaatgatactgtggaagtctatttcccgacacggagagatggccacagagtacggtggaaggaaaaaagccaccatgaacagaagcttctcacaatgctgggcccagagttcctcacagcagcagtgacacccgtgctctccagtttgctccagtccccaccaatctttactgtgcctctcattgaaccctggcaggcattttaacttgtcggttaggagtcacaggagagccaagtagaggaggaagcaggaaccgtgtacacacgtgctttatcccccttgacgtctttctagaggacagttatgcaattatgtgacagatggagggagggagggactgaagaaagggaaaaagaatgggtggaggaatggatagagatgtatggatggagggtgaatgggaggatagatggatatatgcatggagaaatggttggggaatggatggagggagggagggtgaatgggaggatagatggatacatgaatggagaaacggatagagggaaggagtgtgaatgggaggattgatggatatatgcatggagaaatggttggggaatggatggagggagggagggtgaatgggaggatagatggatacatgaatggagaaatggatggggaatggatggagggagggagggtgaatgggaggattgatgggcagatgaatggagaaacggatagagggaaggagtgtgaatgggaggattgatggatacatgaatggagaaatggatggggaatggatggagggagggagggtgattgggaggattgatggaagatgaaatggagggagggagggagtgatggataaaggaagggatggatggggggatgaatggaaagatagagatatcttcaaccttggtccctactccagcagagttagctttgcctcaggggatggtctggtacaagggttaatcattcaagtgtttggaatcagacctgaatgtgaatctgagtttctttcctgacaagctgtgtgaccttaggtaagtcactcaccttctctgatcttcagtttcctcattattagaaaggaaataataatactagataacaataataatagaataataatccacattctatggatttgcctattctggacatttcttaagaatgtccatgcaatatgtgatcttgggggtttggcttcttttattttgcatcaggttttcaaagttcatccatgttgtggcatgtgccagcccttctactccagcagagttagctttgcctcaggggatgatctagcacaagggttaataattcaagtgtttggaatcagacctgaatgtgaatctaagtttctctcctgacaagctgtgtgaccttaggtaagtcactcaccttctctgatcctcagtttcctcattaatagaaaggaaataataatactttgtagtgcctcctagaacacgaagtagaacaagcacttagggccaggtttgagggagaagttgaaggtgggcccgcctttattaggatccgtgctgctgctacggtcctatcaaccctgccctgagaaagtgccctctctgcttccgggccctttgtgttgagctggttaatcgctcgggagactcgatgggttccccacctccccacccccagctctgaggatcttgggatctcgctggactggtgttaataccaatagcatccccttgctcactgcctccaacctcgaccggactctcagaccccgcccaaagccacagccgcatcttcgtgaccatgacctgagaaggctccttgcagccctgccgcagagcaatcctgttatcagggcttccagccctggctgcacctgagaactgagctgcaggagctgctaaaagcaatgctgcctgtgccccacccggaacccagtctttgggagaagcgcctggcatgagtatttttttaagcgcttctgactgatactaaggcaaagcctggcctgagaataaaagaagctctgtgtttagtttcttttctttttaaaatgtttctattttttctttacttttctgtttagtttcttcggcagtgaaaacagactctgctgtctgtagttggatgaagaattcacgtttgttttcctttcagggttttgatgggtcagtgtaaaatatgttttttgttaatccccttgggttacagctggttagagtagggggttgggagccccttcctcttactttacagggctccaaaatcctccgcagagtacaatgtggggctgaattttattataaggtaaactggtttaaaagaataacactaaacacaaatcaaaggaaagagatgagctaccacttcgcattcactaggatgggatgaaaaagtcagaga

SEQ ID NO: 760 - DNA, 2383 bp, Homo sapiens
cgcagcgccggtcgggagcgcagcgcggcgcacgtcggcgcgcacggcgggacgggcgccggagtggtcgggcctggcggctggacgggcgcccctcgctgccccgcgcgctccccgccgccccccatgagcgcagccccgcgcggcccgggtccgtaggcggcggggcgccccccatgctgctgcagcccgcgccgtgcgccccgagcgcgggcttcccgcggcccctggcgcccccggcgccatgcacggctcgcagaaggacaccacgttcaccaagatcttcgtgggcggcctgccgtaccacactaccgacgcctcgctcaggaagtacttcgagggcttcggcgacatcgaggaggccgtggtcatcaccgaccgccagacgggcaagtcccgcggctacggcttcgtgaccatggccgaccgggcggcagctgagagggcttgcaaagacccgaaccccatcatcgacggccgcaaggccaacgtgaacctggcatatctgggcgccaagccgcggagcctccagacgggctttgccattggggtgcagcagctgcaccccaccttgatccagcggacttacgggctgaccccgcactacatctacccaccagccatcgtgcagcccagcgtggtgatcccagccgcccctgtcccgtcgctgtcctcgccctacattgagtacacgccggccagcccggcctacgcccagtacccaccggccacctatgaccagtacccatacgccgcctcgcctgccacggctgccagcttcgtgggctacagctaccctgccgccgtgccccaggccctctcagccgcagcacccgcgggcaccactttcgtgcagtaccaggcgccgcagctgcagcctgacaggatgcagtgaggggcgttcctgccccgaggactgtggcattgtcaccttcacagcagacagagctgccaggccatgatgggctggcgacagcccggctgagcttcagtgaggtgccaccagcacccgtgcctccgaagaccgctcgggcattccgcctgcgccctgggacagcggagagacggcttctctttaatctaggtcccattgtgtcttgagggaggactttaagaatgactgagaactatttaaagacgcaatcccaggttccttgcacaccatggcagcctctccttgcaccttctcctgcctctccacactccaggttccctcaggcttgtgtccccactgctgcatcgtggcggggtgtcacagaccctctgcagcccctggctgccctggactgtgcagagatgcctgactccagggaaacctgaaagcaagaagttaatggactgtttattgtaacttgatcctcccgagctgtgagcgcagtctgaggtgtgaggacacggcctcctgttggagtcccattttctccatcagggcacgtgggcggcttcctcaagcccggaggagctcccaggcgcacaggggccgccggtaacaggggccgccggccaaaggcccctttccagtcatagcactgaagttgcaacttttttcttgtaattgttttgctactaagataatttcagaagttcagtctattttttcagcggatactgccgccaccaagaatccaaaacctatttttgacttggagagacttgcttttgttggttccgcccgtggagacgacgatagtgtttctgtataataaagtgtctgccggctcgcgggccaggatcctctcggtgggatgggcaccacagacaggaggcccctcaggcccgtgcgggccactgtctgctgccgcctgccggggtggcagagtgagttgtctcaggaccccgtcactgcgacgttgacactcctctcccttcccttcctccccaactccccaaacactgtggaaggggagaaggaagtgatccacagcattcaggccacttggggtctagaccatggtggtgccagcctggggggggcagtggccctcagctctgcccgctggagcggttgagtgcagaagggtgcgcctcttccctctacccccgcaccacctgctgtgtgccagcctgagacggttcctgcctgtcttgggggttggtggagggtggaggcagttctgccagccgtggcagggctgctatggggcatccagggctgtgggggtctggaggaggggacatgaggtgagaggtatcctggccgagggcggggggcagcggggggtctccctccggacctacctcagggagctgagcgtgcaggcgctccagggcaggcctgggacagagtcaaggctcagagaataaaggtagctaatctcatcataatatttttattagaatgttctgatgataaaaataaaacttgttttctttaaagaaaaag

SEQ ID NO: 761 - protein, 212 aa, Homo sapiens
MHGSQKDTTFTKIFVGGLPYHTTDASLRKYFEGFGDIEEAVVITDRQTGKSRGYGFVTMADRAAAERACKDPNPIIDGRKANVNLAYLGAKPRSLQTGFAIGVQQLHPTLIQRTYGLTPHYIYPPAIVQPSVVIPAAPVPSLSSPYIEYTPDAYAQYPPATYDQYPYADATAASFVGYSYPAAVPQALSAAAPAGTTFVQYQAPQLQPDRMQ

SEQ ID NO: 762 - DNA, 2460 bp, Homo sapiens
cgcagcgccggtcgggagcgcagcgcggcgcacgtcggcgcgcacggcgggacgggcgccggagtggtcgggcctggcggctggacgggcgcccctcgctgccccgcgcgctccccgccgccccccatgagcgcagccccgcgcggcccgggtccgtaggcggcggggcgccccccatgctgctgcagcccgcgccgtgcgccccgagcgcgggcttcccgcggcccctggcgcccccggcgccatgcacggctcgcagaaggacaccacgttcaccaagatcttcgtgggcggcctgccgtaccacactaccgacgcctcgctcaggaagtacttcgagggcttcggcgacatcgaggaggccgtggtcatcaccgaccgccagacgggcaagggattatttttgtccttgaaggccacatttcccaggccttgaactttgacgggaggagctggaatccaggaggcatctttgtgggagagccccaggtgaccatggccgaccgggcggcagctgagagggcttgcaaagacccgaaccccatcatcgacggccgcaaggccaacgtgaacctggcatatctgggcgccaagccgcggagcctccagacgggctttgccattggggtgcagcagctgcaccccaccttgatccagcggacttacgggctgaccccgcactacatctacccaccagccatcgtgcagcccagcgtggtgatcccagccgcccctgtcccgtcgctgtcctcgccctacattgagtacacgccggccagcccggcctacgcccagtacccaccggccacctatgaccagtacccatacgccgcctcgcctgccacggctgccagcttcgtgggctacagctaccctgccgccgtgccccaggccctctcagccgcagcacccgcgggcaccactttcgtgcagtaccaggcgccgcagctgcagcctgacaggatgcagtgaggggcgttcctgccccgaggactgtggcattgtcaccttcacagcagacagagctgccaggccatgatgggctggcgacagcccggctgagcttcagtgaggtgccaccagcacccgtgcctccgaagaccgctcgggcattccgcctgcgccctgggacagcggagagacggcttctctttaatctaggtcccattgtgtcttgagggaggactttaagaatgactgagaactatttaaagacgcaatcccaggttccttgcacaccatggcagcctctccttgcaccttctcctgcctctccacactccaggttccctcaggcttgtgtccccactgctgcatcgtggcggggtgtcacagaccctctgcagcccctggctgccctggactgtgcagagatgcctgactccagggaaacctgaaagcaagaagttaatggactgtttattgtaacttgatcctcccgagctgtgagcgcagtctgaggtgtgaggacacggcctcctgttggagtcccattttctccatcagggcacgtgggcggcttcctcaagcccggaggagctcccaggcgcacaggggccgccggtaacaggggccgccggccaaaggcccctttccagtcatagcactgaagttgcaacttttttcttgtaattgttttgctactaagataatttcagaagttcagtctattttttcagcggatactgccgccaccaagaatccaaaacctatttttgacttggagagacttgcttttgttggttccgcccgtggagacgacgatagtgtttctgtataataaagtgtctgccggctcgcgggccaggatcctctcggtgggatgggcaccacagacaggaggcccctcaggcccgtgcgggccactgtctgctgccgcctgccggggtggcagagtgagttgtctcaggaccccgtcactgcgacgttgacactcctctcccttcccttcctccccaactccccaaacactgtggaaggggagaaggaagtgatccacagcattcaggccacttggggtctagaccatggtggtgccagcctggggggggcagtggccctcagctctgcccgctggagcggttgagtgcagaagggtgcgcctcttccctctacccccgcaccacctgctgtgtgccagcctgagacggttcctgcctgtcttgggggttggtggagggtggaggcagttctgccagccgtggcagggctgctatggggcatccagggctgtgggggtctggaggaggggacatgaggtgagaggtatcctggccgagggcggggggcagcggggggtctccctccggacctacctcagggagctgagcgtgcaggcgctccagggcaggcctgggacagagtcaaggctcagagaataaaggtagctaatctcatcataatatttttattagaatgttctgatgataaaaataaaacttgttttctttaaagaaaaag

SEQ ID NO: 763 - protein, 154 aa, Homo sapiens
MADRAAAERACKDPNPIIDGRKANVNLAYLGAKPRSLQTGFAIGVQQLHPTLIQRTYGLTPHYIYPPAIVQPSVVIPAAPVPSLSSPYIEYTPDAYAQYPPATYDQYPYADATAASFVGYSYPAAVPQALSAAAPAGTTFVQYQAPQLQPDRMQ

SEQ ID NO: 764 - DNA, 2385 bp, Homo sapiens
taggactcctaagttggtggggaggttttggagccagagggcactcgggatttcctggagcagcggggggtgaggagcaatggctccaccccggggtgttaggagctcttcggcctcccccatatttttaacagccctctcagccgccccaaataaacatcagcttaagtaaaaacgtcttgaagacactttcctgcttaccttccaagcatagcgtcgcaaactccttctcagaggaaagtctcggccctcactggtgggcaagtccaggcggccccccaagctcccttcggggttcatttttgccctatccccgcaggggattatttttgtccttgaaggccacatttcccaggccttgaactttgacgggaggagctggaatccaggaggcatctttgtgggagagccccaggtgaccatggccgaccgggcggcagctgagagggcttgcaaagacccgaaccccatcatcgacggccgcaaggccaacgtgaacctggcatatctgggcgccaagccgcggagcctccagacgggctttgccattggggtgcagcagctgcaccccaccttgatccagcggacttacgggctgaccccgcactacatctacccaccagccatcgtgcagcccagcgtggtgatcccagccgcccctgtcccgtcgctgtcctcgccctacattgagtacacgccggccagcccggcctacgcccagtacccaccggccacctatgaccagtacccatacgccgcctcgcctgccacggctgccagcttcgtgggctacagctaccctgccgccgtgccccaggccctctcagccgcagcacccgcgggcaccactttcgtgcagtaccaggcgccgcagctgcagcctgacaggatgcagtgaggggcgttcctgccccgaggactgtggcattgtcaccttcacagcagacagagctgccaggccatgatgggctggcgacagcccggctgagcttcagtgaggtgccaccagcacccgtgcctccgaagaccgctcgggcattccgcctgcgccctgggacagcggagagacggcttctctttaatctaggtcccattgtgtcttgagggaggactttaagaatgactgagaactatttaaagacgcaatcccaggttccttgcacaccatggcagcctctccttgcaccttctcctgcctctccacactccaggttccctcaggcttgtgtccccactgctgcatcgtggcggggtgtcacagaccctctgcagcccctggctgccctggactgtgcagagatgcctgactccagggaaacctgaaagcaagaagttaatggactgtttattgtaacttgatcctcccgagctgtgagcgcagtctgaggtgtgaggacacggcctcctgttggagtcccattttctccatcagggcacgtgggcggcttcctcaagcccggaggagctcccaggcgcacaggggccgccggtaacaggggccgccggccaaaggcccctttccagtcatagcactgaagttgcaacttttttcttgtaattgttttgctactaagataatttcagaagttcagtctattttttcagcggatactgccgccaccaagaatccaaaacctatttttgacttggagagacttgcttttgttggttccgcccgtggagacgacgatagtgtttctgtataataaagtgtctgccggctcgcgggccaggatcctctcggtgggatgggcaccacagacaggaggcccctcaggcccgtgcgggccactgtctgctgccgcctgccggggtggcagagtgagttgtctcaggaccccgtcactgcgacgttgacactcctctcccttcccttcctccccaactccccaaacactgtggaaggggagaaggaagtgatccacagcattcaggccacttggggtctagaccatggtggtgccagcctggggggggcagtggccctcagctctgcccgctggagcggttgagtgcagaagggtgcgcctcttccctctacccccgcaccacctgctgtgtgccagcctgagacggttcctgcctgtcttgggggttggtggagggtggaggcagttctgccagccgtggcagggctgctatggggcatccagggctgtgggggtctggaggaggggacatgaggtgagaggtatcctggccgagggcggggggcagcggggggtctccctccggacctacctcagggagctgagcgtgcaggcgctccagggcaggcctgggacagagtcaaggctcagagaataaaggtagctaatctcatcataatatttttattagaatgttctgatgataaaaataaaacttgttttctttaaagaaaaa

SEQ ID NO: 765 - protein, 154 aa, Homo sapiens; identical to SEQ ID NO: 763

SEQ ID NO: 766 - DNA, 2328 bp, Homo sapiens
ccgcagcgccggtcgggagcgcagcgcggcgcacgtcggcgcgcacggcgggacgggcgccggagtggtcgggcctggcggctggacgggcgcccctcgctgccccgcgcgctccccgccgccccccatgagcgcagccccgcgcggcccgggtccgtaggcggcggggcgccccccatgctgctgcagcccgcgccgtgcgccccgagcgcgggcttcccgcggcccctggcgcccccggcgccatgcacggctcgcagaaggacaccacgttcaccaagatcttcgtgggcggcctgccgtaccacactaccgacgcctcgctcaggaagtacttcgagggcttcggcgacatcgaggaggccgtggtcatcaccgaccgccagacgggcaagtcccgcggctacggcttcgtgaccatggccgaccgggcggcagctgagagggcttgcaaagacccgaaccccatcatcgacggccgcaaggccaacgtgaacctggcatatctgggcgccaagccgcggagcctccagacgggctgaccccgcactacatctacccaccagccatcgtgcagcccagcgtggtgatcccagccgcccctgtcccgtcgctgtcctcgccctacattgagtacacgccggccagcccggcctacgcccagtacccaccggccacctatgaccagtacccatacgccgcctcgcctgccacggctgccagcttcgtgggctacagctaccctgccgccgtgccccaggccctctcagccgcagcacccgcgggcaccactttcgtgcagtaccaggcgccgcagctgcagcctgacaggatgcagtgaggggcgttcctgccccgaggactgtggcattgtcaccttcacagcagacagagctgccaggccatgatgggctggcgacagcccggctgagcttcagtgaggtgccaccagcacccgtgcctccgaagaccgctcgggcattccgcctgcgccctgggacagcggagagacggcttctctttaatctaggtcccattgtgtcttgagggaggactttaagaatgactgagaactatttaaagacgcaatcccaggttccttgcacaccatggcagcctctccttgcaccttctcctgcctctccacactccaggttccctcaggcttgtgtccccactgctgcatcgtggcggggtgtcacagaccctctgcagcccctggctgccctggactgtgcagagatgcctgactccagggaaacctgaaagcaagaagttaatggactgtttattgtaacttgatcctcccgagctgtgagcgcagtctgaggtgtgaggacacggcctcctgttggagtcccattttctccatcagggcacgtgggcggcttcctcaagcccggaggagctcccaggcgcacaggggccgccggtaacaggggccgccggccaaaggcccctttccagtcatagcactgaagttgcaacttttttcttgtaattgttttgctactaagataatttcagaagttcagtctattttttcagcggatactgccgccaccaagaatccaaaacctatttttgacttggagagacttgcttttgttggttccgcccgtggagacgacgatagtgtttctgtataataaagtgtctgccggctcgcgggccaggatcctctcggtgggatgggcaccacagacaggaggcccctcaggcccgtgcgggccactgtctgctgccgcctgccggggtggcagagtgagttgtctcaggaccccgtcactgcgacgttgacactcctctcccttcccttcctccccaactccccaaacactgtggaaggggagaaggaagtgatccacagcattcaggccacttggggtctagaccatggtggtgccagcctggggggggcagtggccctcagctctgcccgctggagcggttgagtgcagaagggtgcgcctcttccctctacccccgcaccacctgctgtgtgccagcctgagacggttcctgcctgtcttgggggttggtggagggtggaggcagttctgccagccgtggcagggctgctatggggcatccagggctgtgggggtctggaggaggggacatgaggtgagaggtatcctggccgagggcggggggcagcggggggtctccctccggacctacctcagggagctgagcgtgcaggcgctccagggcaggcctgggacagagtcaaggctcagagaataaaggtagctaatctcatcataatatttttattagaatgttctgatgataaaaataaaacttgttttctttaaagaaaaa

SEQ ID NO: 767 - protein, 98 aa, Homo sapiens
MHGSQKDTTFTKIFVGGLPYHTTDASLRKYFEGFGDIEEAVVITDRQTGKSRGYGFVTMADRAAAERACKDPNPIIDGRKANVNLAYLGAKPRSLQTG

SEQ ID NO: 768 - DNA, 2330 bp, Homo sapiens
taggactcctaagttggtggggaggttttggagccagagggcactcgggatttcctggagcagcggggggtgaggagcaatggctccaccccggggtgttaggagctcttcggcctcccccatatttttaacagccctctcagccgccccaaataaacatcagcttaagtaaaaacgtcttgaagacactttcctgcttaccttccaagcatagcgtcgcaaactccttctcagaggaaagtctcggccctcactggtgggcaagtccaggcggccccccaagctcccttcggggttcatttttgccctatccccgcaggggattatttttgtccttgaaggccacatttcccaggccttgaactttgacgggaggagctggaatccaggaggcatctttgtgggagagccccaggtgaccatggccgaccgggcggcagctgagagggcttgcaaagacccgaaccccatcatcgacggccgcaaggccaacgtgaacctggcatatctgggcgccaagccgcggagcctccagacgggctgaccccgcactacatctacccaccagccatcgtgcagcccagcgtggtgatcccagccgcccctgtcccgtcgctgtcctcgccctacattgagtacacgccggccagcccggcctacgcccagtacccaccggccacctatgaccagtacccatacgccgcctcgcctgccacggctgccagcttcgtgggctacagctaccctgccgccgtgccccaggccctctcagccgcagcacccgcgggcaccactttcgtgcagtaccaggcgccgcagctgcagcctgacaggatgcagtgaggggcgttcctgccccgaggactgtggcattgtcaccttcacagcagacagagctgccaggccatgatgggctggcgacagcccggctgagcttcagtgaggtgccaccagcacccgtgcctccgaagaccgctcgggcattccgcctgcgccctgggacagcggagagacggcttctctttaatctaggtcccattgtgtcttgagggaggactttaagaatgactgagaactatttaaagacgcaatcccaggttccttgcacaccatggcagcctctccttgcaccttctcctgcctctccacactccaggttccctcaggcttgtgtccccactgctgcatcgtggcggggtgtcacagaccctctgcagcccctggctgccctggactgtgcagagatgcctgactccagggaaacctgaaagcaagaagttaatggactgtttattgtaacttgatcctcccgagctgtgagcgcagtctgaggtgtgaggacacggcctcctgttggagtcccattttctccatcagggcacgtgggcggcttcctcaagcccggaggagctcccaggcgcacaggggccgccggtaacaggggccgccggccaaaggcccctttccagtcatagcactgaagttgcaacttttttcttgtaattgttttgctactaagataatttcagaagttcagtctattttttcagcggatactgccgccaccaagaatccaaaacctatttttgacttggagagacttgcttttgttggttccgcccgtggagacgacgatagtgtttctgtataataaagtgtctgccggctcgcgggccaggatcctctcggtgggatgggcaccacagacaggaggcccctcaggcccgtgcgggccactgtctgctgccgcctgccggggtggcagagtgagttgtctcaggaccccgtcactgcgacgttgacactcctctcccttcccttcctccccaactccccaaacactgtggaaggggagaaggaagtgatccacagcattcaggccacttggggtctagaccatggtggtgccagcctggggggggcagtggccctcagctctgcccgctggagcggttgagtgcagaagggtgcgcctcttccctctacccccgcaccacctgctgtgtgccagcctgagacggttcctgcctgtcttgggggttggtggagggtggaggcagttctgccagccgtggcagggctgctatggggcatccagggctgtgggggtctggaggaggggacatgaggtgagaggtatcctggccgagggcggggggcagcggggggtctccctccggacctacctcagggagctgagcgtgcaggcgctccagggcaggcctgggacagagtcaaggctcagagaataaaggtagctaatctcatcataatatttttattagaatgttctgatgataaaaataaaacttgttttctttaaagaaaaa

SEQ ID NO: 769 - protein, 40 aa, Homo sapiens
MADRAAAERACKDPNPIIDGRKANVNLAYLGAKPRSLQTG

SEQ ID NO: 770 - DNA, 2479 bp, Homo sapiens
cgcacgtcggcgcgcacggcgggacgggcgccggagtggtcgggcctggcggctggacgggcgcccctcgctgccccgcgcgctccccgccgccccccatgagcgcagccccgcgcggcccgggtccgtaggcggcggggcgccccccatgctgctgcagcccgcgccgtgcgccccgagcgcgggcttcccgcggcccctggcgcccccggcgccatgcacggctcgcagaaggacaccacgttcaccaagatcttcgtgggcggcctgccgtaccacactaccgacgcctcgctcaggaagtacttcgagggcttcggcgacatcgaggaggccgtggtcatcaccgaccgccagacgggcaagtcccgcggctacggcttcgtgaccatggccgaccgggcggcagctgagagggcttgcaaagacccgaaccccatcatcgacggccgcaaggccaacgtgaacctggcatatctgggcgccaagccgcggagcctccagacgggctttgccattggggtgcagcagctgcaccccaccttgatccagcggacttacggctgtaggaccttgggcaactcacctggccccgtgtgtgaaatgggcctcatgatgggaagaccaagccgacggggtgacgcacccagtcacagtacgggtctccccccagcgtgggcgctggcgagctgaccccgcactacatctacccaccagccatcgtgcagcccagcgtggtgatcccagccgcccctgtcccgtcgctgtcctcgccctacattgagtacacgccggccagcccggcctacgcccagtacccaccggccacctatgaccagtacccatacgccgcctcgcctgccacggctgccagcttcgtgggctacagctaccctgccgccgtgccccaggccctctcagccgcagcacccgcgggcaccactttcgtgcagtaccaggcgccgcagctgcagcctgacaggatgcagtgaggggcgttcctgccccgaggactgtggcattgtcaccttcacagcagacagagctgccaggccatgatgggctggcgacagcccggctgagcttcagtgaggtgccaccagcacccgtgcctccgaagaccgctcgggcattccgcctgcgccctgggacagcggagagacggcttctctttaatctaggtcccattgtgtcttgagggaggactttaagaatgactgagaactatttaaagacgcaatcccaggttccttgcacaccatggcagcctctccttgcaccttctcctgcctctccacactccaggttccctcaggcttgtgtccccactgctgcatcgtggcggggtgtcacagaccctctgcagcccctggctgccctggactgtgcagagatgcctgactccagggaaacctgaaagcaagaagttaatggactgtttattgtaacttgatcctcccgagctgtgagcgcagtctgaggtgtgaggacacggcctcctgttggagtcccattttctccatcagggcacgtgggcggcttcctcaagcccggaggagctcccaggcgcacaggggccgccggtaacaggggccgccggccaaaggcccctttccagtcatagcactgaagttgcaacttttttcttgtaattgttttgctactaagataatttcagaagttcagtctattttttcagcggatactgccgccaccaagaatccaaaacctatttttgacttggagagacttgcttttgttggttccgcccgtggagacgacgatagtgtttctgtataataaagtgtctgccggctcgcgggccaggatcctctcggtgggatgggcaccacagacaggaggcccctcaggcccgtgcgggccactgtctgctgccgcctgccggggtggcagagtgagttgtctcaggaccccgtcactgcgacgttgacactcctctcccttcccttcctccccaactccccaaacactgtggaaggggagaaggaagtgatccacagcattcaggccacttggggtctagaccatggtggtgccagcctggggggggcagtggccctcagctctgcccgctggagcggttgagtgcagaagggtgcgcctcttccctctacccccgcaccacctgctgtgtgccagcctgagacggttcctgcctgtcttgggggttggtggagggtggaggcagttctgccagccgtggcagggctgctatggggcatccagggctgtgggggtctggaggaggggacatgaggtgagaggtatcctggccgagggcggggggcagcggggggtctccctccggacctacctcagggagctgagcgtgcaggcgctccagggcaggcctgggacagagtcaaggctcagagaataaaggtagctaatctcatcataatatttttattagaatgttctgatgataaaaataaaacttgttttctttaaagaaaaa

SEQ ID NO: 771 - protein, 156 aa, Homo sapiens
MHGSQKDTTFTKIFVGGLPYHTTDASLRKYFEGFGDIEEAVVITDRQTGKSRGYGFVTMADRAAAERACKDPNPIIDGRKANVNLAYLGAKPRSLQTGFAIGVQQLHPTLIQRTYGCRTLGNSPGPVCEMGLMMGRPSRRGDAPSHSTGLPPAWAS

SEQ ID NO: 772 - DNA, 75782 bp, Mus musculus
  misc_feature (1)...(75782): n = A,T,C or G
gtggtggggatttaattaacttttttaagttccaaaaatgaacactagatggcagacaactcacagggaatcgtggtattgttccagcatgcttatttctgctctgttttatatctcattcaaataataacaagccaacctttgacattaatacagtattcaagccagtagtgctggtgggtatagtgctggtggtatgggtgcctagcaaatgtcaggccctgagtttgatcctccatccctgtaaaattaatttttttttaagatttatttatttattatatgtaagtaagtacactgtatctgtcttcagacactccagaagagggggtcagatcttgttacagatggttgtgagccaccatgtggttgctgggatttgaactctggaccttcggaagaacagtcgggtgctcttacccactgagccatctcaccagcccctaaattaaattttaaaaaataaataacacaagggaaatctttctgaattgtgctcacattcccttaaccagagctggggtacccatatatgtgattcattttttaaggtagttaatttttcatgaacatatgcaaaatacaatagctgtcctttgttatcgtattgagaatagtttccccattaatatattttaatatccctccaaagtaatcgacccactttggaaagatttacagggctagctttcttttcttgggccgtttgtggcagccccagcagtatacagcagagggcgctagtgcaccatgctccaccacttcatggaagaatgaggtggtgaacacaaagaattatactaaagaatactggagtaacatcatcatcacttctctggtctcataacatccaggcaccccaggtcccacaccgccagatggctgcagcttgcagagccaccctagctgtcgtcagggcaggcaggctgtgcagtgcatcgggtagagtgggggtgggggtggggtagcagcagtgggggtggtgcctgtggctcttctacaagcaggggaagagctctccttccgtgtttctttactgtcttctgttttcacatcatacatcaaaatgatctctcatgaggaagggcaaggtcccccgttctcctaaaatacagtctaaacttactaatgtggactgcacggccattgaagatggtacctgcaccagacagaggtgggctggatgcttttaacctcagcaatataccttattttctcttgtaagctgtgtttggacttatttttattttgttaattctaaccttcacttttcattgtgagccccacctgaactcatattctactgacattcccgtgtctaacttctgcttacacattttatcttagtttacctgttacttcttccaggaagcatcacttcttcctctgagaggtctgcctttctctgtcagttgtagactatgtgctgagccctcacaaggccctgggttcaatccccggaagccagaagaacactcaaacatggtgaggtatgtgtgtaattccagctgtgaggaggtatgctacatccactccaatagtgacaagcctgggtgctgtcccgaggcgaaaagttcacagaaacttagtctcctggaaccgtggcatcctgtataacgaatgctccaatgtccttgctttagttggtaaatggatctgtgtgctttcccttaatattgcttaattacaagtgctcctaaggattgatattttgacatatagctaagttagattctaggcagtccttgatccgaccttgggcatgaatagctaagtcactgccctacacagaaatttaccattatctaggaagatggaagtttgtgacctaaagaggaaccagagtagatacttagaactatagatagctgagttacacccatacacaggtatttacaatggcctagggggaaggtggactatacaatagactagagtaggaactatggcaagggcacgaagcccttgcccctggcttctaagattaagctgaccttaggtggggctgcctttgattcccagttnnnnnnnnnnnnnnnnnnnncacccactccccctttttggccctggcgttcccctgtactggggcatataaagtttgcatgtccaatgggcctctctttccagtgatggccgactaggccatcttttgatacatgtgcagctagagtcaagggctccgggatactggttagttcataatgttgatccacctatagggttgcagatccctttagctccttgggtactttctctagctcctccattgggagccctgtgatccatccattagctgactgtgagcatccacttctgtgtttgctaggccccagcatagtctcacaagagacagctacatctgggtcctttcgataaaatcttactagtgtatgcaatggtgtcagcgtttggatgctgatgatggggtggatccctggatatggcagtctctacatggtccatcctttcatctcagctccaaactttgtctctgaaactccttccaagggtgttttgttcccacttctaaggaggggcatagtgtccacacttcagtcttcatttttcttgagtttcatgtgtttaggaaattgtatcttatatcttgggtatcctaggttttgggctaatatccacttatcagtgagtacatattgtgtgagttcctttgtgaatgtgttacctcactcaggatgatgccctccaggtccatccatttgcctaggaatttcataaattcattctttttaatagctgagtagtactccattgtgtagatgtaccacattttctgtatccattcctctgttgaggggcatctgggttctttccagcttctggctattataaataaggctgctatgaacatagtggggcatgtgtccttcttaccaggtggggcatcttctggatatatgcccaggagaggtattgctgggtcctccggtagtactatgtgcaattttctgaggaacccccagactgatttccagagtggttgtacaagcttgcaatcccaccaacaatggaggagtgttcctctttctccacatcctcgccagcatctgctgtcacctgaatttttgatcttagccattctgactggtgtgaggtggaatctcagggttgttttgatttgcatttccctgatgattaaggatgttgaacattttttcaggtgcttctctgccattcggtatttttcaggtgagaattctttgttcagttctgagccccattttttaatggggttatttgattgtctgaagtccaccttcttgagttctttatatnnnnnnnnnnnnnnnnnnnnacagggctagctttcttttcttgggccgtttgtggcagccccagcagtatacagcagagggcgctagtgcaccacgctccaccacttcatgggaagaatgaagtggtgaacacaaagaattatactaaagaatactggagtaacatcatcatcacttctctggtctcataacatccaggcaccccaggtcccacaccgccagatggctgcagcttgcagagccaccctagctgttgtcagggcaggtaggctgtgcagtgcatcgggtagagtgggggtggggtagcagcagtgggggtggtgcctgtggctcttctacaagcaggggaagagctctccttccgtgtttctttactgtcttctgttttcacatcatacaccaaaatgatttctcatgaggaagggcaaggtcccccgttctcctaaaatacagtctaaacttactaatgtggactgcacggccattgaagatggtaactgcaccagacagaggtgggctggatgcttttaacctcagcaatataccttattttctcttgtaagctgtgtttggacttatttttattttgttaattctaaccttcacttttcattgtgagccccacctgaactcatattctactgactttcccgtgtctaacttctgcttacacattttatcttagtatacctgttacttcttccaggaatcatcacttcttcctctgagaggtctgcctttctctgtcagttgtagactgtgctgagccctcacaaggccctgggttcaatccccggaagccagaagaacactcaaacatggtgaggtatgtgtgtaattccagctgtgaggaggtatgctacatccactccagtagtgacaagcctgggtgctgtcccgaggcgaaaagttcacagaaacttagtctcctggaaccatggcatcctgtataacgaatgctccaatgtccttgctttagttggtaagcggatctgtgtgctttcccttaatattgctttattacaagtactcctctggattgatattttgacatatagctaagttagattctaggcattccttgatctgaccttggacatggatagctaagtcactgccctacacagaaatttatcattatctggaaagaaggaagtttgtgaactaaagaggaaccagagtagatacttagaaatatagatagctgagttacacccatacacaggtatttacaatggcctagggggaaggtagactatacaatagactagagtaggaactatggcaagggccttgcccctggcttctaagattaagctgaccttaggtggggctgcctttgattcccagttgttgacattgatttttttttccttttccattttttattaggtatttagctcatttacatttccaatgctataccaaaagtcccccatacccacccnnnnnnnnnnnnnnnnnnnntgtagactatgtgctgagccctcacaaggccctgggttcaatccccggaagccagaagaacactcaaacatggtgaggtatgtgtgtaattccagctgtgaggaggtatgctacatccactccaatagtgacaagcctgggtgctgtcccgaggcgaaaagttcacagaaacttagtctcctggaaccgtggcatcctgtataacgaatgctccaatgtccttgctttagttggtaaatggatctgtgtgctttcccttaatattgcttaattacaagtgctcctaaggattgatattttgacatatagctaagttagattctaggcagtccttgatccgaccttgggcatgaatagctaagtcactgccctacacagaaatttaccattatctaggaagatggaagtttgtgacctaaagaggaaccagagtagatacttagaactatagatagctgagttacacccatacacaggtatttacaatggcctagggggaaggtggactatacaatagactagagtaggaactatggcaagggcacgaagcccttgcccctggcttctaagattaagctgaccttaggtggggctgcctttgattcccagttgttgacattgaattttatcccagttggttcctgccagtccttccctgtttgcattcctctgttttgtgtaagaatccagtaacctctttgtaccttgttggtgtgtcacctaacttccctattttcttctgtataaaaagtttgatgctggatttgacaaattacattcagatccagcacactctctcgttctgtgtctgtctgtcaattcccgccgactctatgcccgtctgtctgaacccctgattcccacgaattgaggggggcctactgggcccggtcggtggcagaggtcgaggcaggaggagcagggagtcagggttattctttatcgtatgtgtatgtagcaagtgtggggtcacctgggatataggaaaccctgtcttagaaaaagaaagagctgggtgtggtgggaggcagaggcaggtggatttctgagtttgaggccagagtgagttccaggacatccaagggtacacagagaaaccctgtctcggaaaaaaaaccaaaaaacaaaaaaaggaaggaaggaagggagaaagaagtacagaagcccatgtatagcgcttctggcactgcaattctgattgtctctgatttgtgactgtttacacattgccacagttgcttatttgcattctcgttatctaaacacagttcttggaaaacaccaaaactctcagtgtttgttgactaggaagggcttcagcctttaatggtatctcttatgccttctaagacttgagatcagaaattttaagcatgccagcaaacttgtttgcttagaattccaaattgtccctctcccagaaacactaagaccatgatgccatttagtgctctatatgtaaaaactccaaagccaacaaagccttatgggaacctccagagccttgcagatcacttcagcttcaaagtgagaggcaggagatgtaaagatgataacaatctctctcttctgctacaaaactgaagcacactatgtgactgtgtaacattcatggatactgagaatttctctacaccagaactttgggtgatcaggaccctaaaacccagtctttgatcctcccagggagcggtttgcataagccccatcccctcctgaccctgattcctccctcagatgcagctcaaggagggaggaagaacacactttgaagataagattaaactggattatgtgcctccaaaacagtcctgagggtgcccagctaatcctccctccgtgctgacaggctctgaagcctggctgctttgttgacctatttaccgagaacctcctcactttctgtttgatataaaggcagctaggtccttcctgtcctagctcaggccaaactgaaagcaagatctggagactattattatggttttgcttcactttcacccaatctcaacaaagcacttaaccgtctgaaagcctgacctgatgtgtgtgtgcgtgtgtgtgtgtgtgtgtgtgtgtgtgtgtgtgtgtgtgtgtgtgtgtggtgtgcttgcagctcttgctgccttgcagggagaaggcgattggacatgtggatgaatagactacttatttattaattatttttaaatttcccatagaaggacaacgttactgactggacatggtgtcaaacccctgtaattctagccttcaggagtctgaggtaggaatagcttgagttcacaggcagcctgggttacatagaaaattctaggctggtctgagtcataggtcaagattctgtctcaaaacactaacccccaagacctatagcagtggtagggggattgtatttccctatttctcttcactgtgctaattgtacatgaagcacctagaatgctttcagaaatagaggtttaaatgtttgggaagagatgtgccctgttttgtgccctttcttaggccacagaccttttcaccttaatccggtattattgttcatcccctggccactagttccacgaaaggcactaattgtgggtgcttcattgtgtagccctcaggttttaatacacttctatgagggaaaatgtactctcccttccatggtgctgcaatcatccagcctttgagaattccagtaaatggacccaaatgagctcaggacagttccagacagtgtctggatctggtgtgtgtgtgtgtgtgtgtgtgtgtgtgtgtgtgtgtgtgtgtgtgtgtgtaaaagacacagatatcaattacttgactactaagaagaagaaaacagggaaagcaagctggaagtagagtgaatgatgcaggagcttggaggctaattctctcaagagactgaaggtgaagtatctagattccaaggtcaacctgggctacatagtgaagccctgcctcaggcacacatgtatataagctagacacattaggtatcatctgtttacacacatgtacagagtggattgtgagagctctgctgtaaaacccattcttgagcctagtcgctttccagagctcctgtgctggtgactctgccataccttcctggtcattttagggcagagctataacctgggcaaacatttgttccagccagaagcactacaaatggcgagatgactccttcagtaaggactaccccaccactggcaaacggggctagaatgtttcaaatacagaaaattgtgagggacacctgccatcctcttgggtcacctgactggtagcaagggataggaataccatgatggggagaaactagcatccatccagcaaggacaatcttgtggacactgccttcacggccctggaataggtttctgggggccaaatgtcaggcaactgaactctgtgcttcccactgtcaccccacagtaccaatgcactatgagggaaaccccaaggaattcaggaacgatggcaaatgaatacatgctaaaagaatttgattttcctaaggaatcaggttgtttcctttacactcatccttcacattctgcaaacaggagtctcgcatctctaaagtgatgtctttcaacagctgacatttcaaagcctgctccttccccccgccccccctgctttccagtacacagcggactttggagtcaaatacaccagcatttagctcggcattgatttactttattctctaaggtcatttggggggacagggggtggagagatgacagtgtgggctttggctgctggtgctgtggggatgacaagcttgcttccccttctcattacacttggagggacacagttgtagaaaaggccatggtgatgctccaagcaggcccccagctcagagtgctgggcagtctccttgaccgagtgactgtggggaaactcctgatggactttttgtctttctctgccctgcatggtcatcttcctcacattcctggctgttttccacctagtgttggtggcttgcttcaacagtaaccaatgacgtcacagtgtggccagtatcaagccaggatgaggtcctctgatgtttcaggctcccgagaacagaatttgaaattgtttttcttcacctgcatctctgaacttcattagaaagacacaacttcattagagacagaagtaagtactttaatgacaaagaactatcttagaaaaaggacaataatgcaagtaaaatcaagtcacagaaaattcacaagctgataggacctcaaaaattaaaagtaaatttttaagaaaatctaatccatgaaacagtcaatgctctgaagttataattctatcctcagaggaggaatcaaatgccgccggctcctcctttctccacgagagggagcatggtattcacatgtcagcttttctcaagtgtttctgagctcctttgaaggatgagagctgggtgtggtggctgactttggaaatgccagcaagggggaaactgaaggagaagtcctgagttccaggccagtctggctctgaaaaccaaacagaatgaccaaagaacattaccgtcccttcatagttttccttagacagtttacatcattggaagcaatagccaaaagaaatgatccacatgtgagtcctatcgttaccaaactttgtaacacaagaatcaaaatccgagcaatggggctggtgagatggctcagtggttaagagcgccgactgctcttccgaaggtcccgagttcaaatcccagcaaccacatggtggcacacaaccatccctaacgaaatctgatgcccttttctggagtatctgaggacagctacagtgtacttacatatagtaaataaataagtcttttttaaaaatctgagcaatgaatttgtttggattttattcaaaaagaataacatatgtcgcaagcatctgtggattttaatccctctgctctcagattatgagatcctggaaatcacatagaagtgttgacactttcctgtcttagacttcagtagccagcggtcactttgcttggtgacattgggtgaagggcactgtgcgtggcggccctgcgtgaggagcaatgtttgctgttcactctggcttacttctctccgtcgcgtacttttctttgtactttgtaagcacacttgttcatagtgaaatctgtgaggcacctgctgagatgatgaggtgacgcagaagcagggcagtaatcctctcacagagcacggaaatcctctaaccccggagccccgggactgcctctgaagcaggagacactgggacccagggtccttcctcagactctcaggtaggagacacttgtgcctaaatgcagattactttgtcatcatgagagtaattgtggaaatgcctgttaagttgattatatagaaacggcaaagtgggtgtggtagcagaagcctgtatccaacactccgaaggctggagcaccaggaactggagcttgaagccagtcggggccacagaacgccaaagctagctctaggccagccggggccacagaacgccatagctagctctagaccagccggggccacagaatgatattctatctcaaaataaaaaataaaaaatagggaaggaaaaaagaaagggagagagagaagagtaagagataaaggagaataaaggcagcaggaggaagaaacgatgaggggcaggaaataaggaagacgtatggagtccagttttccagcttgtttgaaactcagcaatctacagaattcactctatggtttagattgaaggcactcacttcccaagtacccggaatcacatcagatctagacaataactttgaaacaaatagatgctcctccttagtataacatttcagtttgtacatgagcgtctattttcccataattcattgttatcatgtgtactatgcttaagattagcttgagtttgtcacatggacaggaatctaagtttggccaacttaccacatctgttttgacatccttttccttgaacatatggaccaaattttctgagagttgcccttcaccctgacctctgagctctctctgggctttcactctggttgcttggcccctctaatagaatggtttgtaatcccctagttaacacaaggaacacatgtgtttcaagttctgctctgttcaggagacagccactctgaggtttatcagaccaaggatttgctgtatataccacttatcttttggattcttttagctacttagttctccaaaggcttctctttccaccaagcccctttgtaagctttcttctcttacattccactgaagtgtgtgtgtgtatgtgtctgtctgtatggtgtgtgtctgtgtgtgtggtgtgtgtctgtgtgtgtggtatatgtccctgtgtgtgtttctatgtgtggagggggtgtctctgagtgtgtctgtgtgtctgtctgtatatgtgtctctctctctgtgtctctgtgtttgtctttgtgtctatgtgtgggggttgtgtctgtgtgggtgtctctgtgtgtgtgtgatgtatctctgtgtgtgtgtctctgtgtgtatatctgtgtgtgtgtggtgtgtgtctgtgtgtgtggagggagtgtctctgagtgtgtctgtgagtctgtctgtgtatatgtctctctgtgtgtctatgtgtggggtttgtgtctgagtgtgtctatgtggtgtgtgtgtgtgtgtgtgtgtacaagttttaataaacattagatatgccgggcgtggtggcacacgcctttaatcccagcactccggaggcagaggcaggaggatttctgagttcgaggccagcctggtctacaaagtgagttcgaggccagcctgagctatacagagaaaccctgtctcgaaaacccaaaaaaaaaaaaaaaaaaaaaaaaaaaaaaattagataatctgttttagtcacttgtggttcctgtagcaaattctattaaactgtttgagtcaaacagccaaaagttcaatcatgtaattctgaagaccagaaaactcaagtgcattattatcactataatttaaaataccagtctggtggctgtgttctcagtggggcctccatgggaagctggtctcttgcctcctcccacttccaatggcctctgtctgtattctttggctttgggttcagtagcccagcctctgttttcacatggccttcttggttctgtgaaactttccatctgtctctctttttttgtttgttttttgttttgttttgttttgtttttgtttttgttttttcaagacagggtttctctgtagccctggctgtcctgaaactcactttgtagatcaggctggcctcgaactcagaaatccacctgcctctgcctcccaagtgctgggattaaaggcatgtgccaccaccacgtctagctccatctctctcttaaagggagcctgtgataacctttaatgcagctcagaaaacccaagagtgattacctcatttaataacagcttattctcctgaaccctgtggagtgtatgtgtgtgtgcctgtctgtctgtgtctctgtttgttttgtggtgtgtgtgtgtgtggtgtgtgtctgtgtctgtgcctgtagtgaatgtcctgttgattaagtcttgatgtgtttatacagtacagtggctgctaaaccctgtgtgctctgtcccccaccataagcctgttgacatgcccctcaggtctcttcccctgagttgctgtcccctctgtgaccccgatttcaccacgtgtttcgttgttggactaattaacattgcagtgtttgcccaaatacttgacagaaacaacctaaggggggagaggtttagttgaatttcagttttcatccaccaagttgaagaagacgtggtgggcttagtgagggggagaacacggtggaggaaccagggcccaggaagttaccctcagtgacccacacaaagtgacctaattctccagccaaggtctgcctccattgcctccaaaaatagtgacaccagataaggaacagagtttaaaacatgagcctgtggagaggtttttgatcaagcttgtaacagctgcttactctcaaatcggaaaaccaaacaaaaattaatttttgttgtgaaatttccgagtgcagagagatccttccttaccttacagggactgtcaaacaggatttcagtaaccgcattcacaagctgctcatgtgccaagccaggtgacaaggactgaagtgtattacaattgcagaagtagagccactgtgctggggcatgtctataatcctggcactgggaaactgaggcaagacaatcatgacttggagtccacactggcccacaaagtgaaaccttgtttcaaaagtctgtaaaagaaccagtagccaagaactctgcagcatggcttcgggcatatggtgacgataaaagatccaaccttcaccgaaggccactgtgcaatgagtgccaaaacaaacacagttcagcctaaagttcgggttataagtggcctgacctgcacataactcgtgtctgtggtgagcccacacacacctacttctaaagtcccaggtaaggtaaatatgagcaagatatactataccactaagtgcctgagggctgagagaaggtgcgatggggctcagggcccaggacacaggcagatccaagcaactaccttaaggagtgcgtttctgttctcatgaggcttacatgatttctagttgctccaccaactcacacctgacattgtctactttgctgcttggagaggaatggcagctacagcaggaaaatggcagcttcagcaggaaagcagcaggaaagtcatggccttcattccaagctcctcgggacacggacgcttcctttcttccccggttccaaaatgtctacaattttttgtttgtcttgtttccatttttttccaagataaaattatctgtgtagtcttggaactggctctgtaaaccaggctaggcttgaactctgagatcgttatatgtgttaaagtcagttaagagcagtattgtttgtaaagggcagaaatcatgggtatggataggcataagatactctgctttcaggaagtgaaagttcattgtgagccaagcatgactgaccacagcctgtaaacatggatttaaatgacctgtgtggcatgtcccttcatggagaaggtaacacaaactccatatgcacaggacaggaagcaaggactgtgtgtgtgtggatgaatatgcaggtggctcatcacaagtgttcacattaaggcagaaaacctctgggattagaagtcctctctgtcaccttctacagggctggtgaaggctagatgagtcaagtttagggagacgacattgcatcaggtacacaggttagtagcaaatagctatttcaagtattgctattattctgcacaggtaacctaccagctgcatgcataaaagttgtctaagaaattctgtatatagtctaaataaaacacactgagaatagtattacaaactcattgtaaacacaaggaatgcttaagggagaaaacatggaaactttacacatcttctagtcactaaaatcacatatttaaatttttgtaaagttttcttcctaagtccaaccatttgtttatctttggaacataaaagagaaaaatggagccgggcgtggtggcgcacgcctttagtcccagcactcgtgaggcagaggcaggcggatttctgagttcaaggccagcctggtctacagagtgagttccaggacagccagggctatacagagaaaccctgtctcgaaaaaccaaaaaaaaaaaaaaaaaaagagagagagagagaaatgagtttgcttttgaaattgatacttgctctatttctgcctttccagtaagtaaaaagatcaagaggaaaacaaaaaaatcatgaggtctttgttggattccaggtgtggtggtagtgacctgtaatcctagtatgtaggaggcagaggcaggagaatcactatgtccatggcagcctgagcttataggaccttggaaaggtgttatttaaaacttccctggacttcagtgtcttcgtatacaacatacactagaacagtaaagatcgtacaaagttaaagtgcaaatttgagtcacagaggcgcttagtaattcttaataacactttcttttagtttatgacagttttctttgtgttagatgaattgtccttttcatttaattaattaatcaaaaaagaattgagacagtatcttcatgtagcctttctgttgtgcctcccaagtgctgggatgtttgtttcaccaccctcgactcccattaagttcggagctcctcaaggcaattgccacggttcccctgggtctagcgttgcacgtggtagatacttaagaaggatctgtaggggtttttcttctgcgctcagagttgctcccccgagagtgcatgcacgcgcgcgcacacacactcacacacacactttcattgacactccataactttagtttgggtattgttatgaattgtaaagcaaatatatgatatgcaggatatctggtatgtgaccccaaaaggcatcacgcccagcaggttgagaactgttgatttaaggggtttgtcagtttcctctttaaggacctctatcaccttcgtatagctgggtttaaggtcttctttcttgggcttcagctatgttgaaggtcctgcttcaggtagactatctgggctccggtgacatattgctttgttattaacttgtgctcttaagctggtgtctagccatttggcttaggggtgattatgtgtctaggggctaatggctgggtttgtctttgttgggtggctttttgttccttggttcctgtttcctctctggattttcagagggcatgatggctgcgtgttgcctgttttactgactgcttagctggtgtgatcacaagcaattcctgctgatgttggaggcagggatgcagccatgagtgggtgaggccagccagaagggatccacaggacacatgggcaatggggaagggaggctgcggctgatgttctgttgcagcaagcaggaggatcctgagggattgtggaggcatttctttttattgaggttttctcttctcagatgactttagcttgtgtcaagctgacataaaactatccagcacaggactagttactattttcatcactgtgacagaacagctgactgaaacaacttaagggaagaaagactgatttttgtctcgtggcttagaggatacagcccagcatggaggagaaggattgcctggtagtgactttttaacaagtgtattacagctttcctcttacctaagtagcttccaaataattgagactggactgtgttatttacttaacaagtttaaagcacaatgctgagcagttacttctctatcctagtcttctaaaccaatctggccacttcccagtcaaaattcctgagatatttgcattttatgtctttctggagcagttttctcaaggtatctcctggcttctctctggggcggaatcccctactttctctctctcccacccactcccctggctggcaggaagtccatcactattctctcctctgctcagacattggctgttaagctctctttactgacacatcagggaccaaatcgggatctggtgttcacacaagattgagagaaaagattctctgaataaggattgcaaccagatacaggggagagaggaaccagcatttgaatcatcatgcagtgcacacgagcattatgttacacaggcctgtgtgagttgcctgtgcctagccccagcagaggggatgtggaatgactggttactttggattgacagacagtgagcagagggcttggagcaagccctggctctatggcagaatgcctgccagcacagtcccatgtacaaaggttccttcccacacacatgagcctgtgaggacatgaccctgaaaccaaaccgctgcaaaatgcttgttgttacaagattaccctttgtgccagtgatacagcttagaggcagaacactcccttagcatgtctccagaacccaaagcaaaaagagtgagctttgcttagtctgatggctccaaatctaattagaaatcataatcactgaatcatatttgggtataacatgaataaatttcccattggactattgatgaatttagtaaaaataaataatgagagcgaaaggcatctctgatatgagcccttagttgcaacatcccggactgcgattatgatttgacaaaatttaaaaataattagactaagaactaaacccaaaatgtggtgaccactcccagtcccttctccatctcagaggaaatatcaactttatcttccaaagacttctgaaagaatgtgtgtgaacagcaaagatactgaagtggctaacggacaagaacacatgcagaatccatgcagtcaaatcaaaattacacgttactatatgcgatcatgtctcaaagaagcaaaatcaaaccaaacagcaccagattaagtgacctcaacaatcccagtacttgggagacagacatacgggaatcacgagttgatggccagcctgggctacatacagagaccttgactcaatcaacacaaagcaaaattgggcaaatatttagcatcacgtagagatttttttctcccaaaatcaaaacagtgagcagatttttgaaaatccattatgtcagacttgggaattgttaggcgataacaggaagttatcaatactattgtcaatagtcttgggaattgttgggagagagcagggagtaaactttaagtcagggtccttctataaagcctagtacaagttacgcacactgccttgggtttgttaggagtttcatagaatacaaagcaatacttgaagtgaccttgaggttttgctggtatttgcagggagcagagcagcatttagaagagcagagctttggcaccaagcttagcatctgtacatttccagctgtgtgacttttcctctttgaaactaagttgctccaaaaatagggtaggctctttgaagacagtttgtaatggtaaattcaaagactagaactgcccagagagaatctggatagttctgagaggaacaatgggctgtgattttttttttttttaatcaagggctaaaagaacccatctagtttccagaagtctttgcagtaagcattggtggtccactcccgtaagcccagtagctggaaggtggcgacagggggagcaggagttcaagcttatctctgagaggtcagagagttcttgaccctcctgggacacacacaactgcctgccggtaaagaccagatctcccaaatcaagaaaatcccaagggaactcagccttcggagtgagctggtcaggaaaaagcctgcctggttcctcccgccttgctctgcccatacacagatagatggcagcaccattttagtttccttcacaaccaagaagaaatgaaggcccgaactgcccagtcacctgctctctccagaacatggcagagtcacatggctcctactgtgggtgccagctcctgtgcctccaggcttaaagccgaattaacctcaccacttttgaatctggctgcactacagagcctcaccataaaccacagggtgaaaaacctgcttgacaaccatctcaaagctacgcaaagcctctttttaataaatcagcattttaaataccagtacactttagaatctaatctacagtgagtgccaggagagggaaagattcgcttccctttttgtcagtagctctgccaaaactcaagcctaggctagtgcggagctctgatccactttcagagaaagttcagaaagagaaataatcactctgctttagagcttgggaattcagaacaattatgatttgccaaagacaaataatgaaaatagatcggaacttgggaggaaaaaagaaaatctgtcaaactctactaaactttgtggcttgcaatgtctgctgaaagataacagtgttctcagaaaagacagaggttgaggtgaacagccccctgtgatgacgtgtgtgaccatcccctttgccattgtgacccagtgtcactgcaaaggagtttggcttcaccaggccatgtagatggcctggggagttactgttgcaggggacttgttggggtttaacatggactgggatgtcacagtgtcctgctcttggagcccccatgcccttcccagctggggctcctgtggaaactgacctagttgaaatctgagtttctgtaagatggagagaatggttctttgttacattgttgaggctaacccagacaatgaccttgaagcccaggacagggcctcctgtgcagctccaggggtgcaaggaacagataggagtgggaggcagggacaatttggacttgattttttttttttctcaaaatgagaaattgagtcactcaaatggagaaaaaaaatcgactgcggtttggctaggatgagagtggcgggatgaagagatgaacgagcacactatttcccatacactagtgtctgagccttgcattccaacaaccgtcggaactctgcaggactccactgtgctcctcagttattgttgggccatatagcaatgaaattcttcctcctgctgtggcgtttaggagaacccttctccttttcccgtccagggagcaggaacggtggtctcacggggcatcggggactctcaggaaccccgcagccggcgctgtctaagaggatgaactctgagagcaggaaggacttctctgggtcagctcaagtagggctggttaaggccccgccacccacagccactgtacgcagaaatcaaggttcctggcaaaaggagaggagcctcatgggatcatgtgacagagtctgtcctgtcatgttcccctagcctccatccaacccatcctcctagcatcttggctgaaggacagaggcagggcctagatctataagaaaactgagtttggccatgtcaggaaacctgggcacaaaccagcaaatgaacccataaacttgcttcccagggaagaattgctaagtgtcccaagagatatctaataaaactaactttgtttagtttcaatttgtagtatttttttacatggtgggcatgtaaattcaactctgtgtactgaagtagtaaaaactttgcattcctaaagaatccaaagtgcgctcttccagaggcaaaacgtttgggcttgccttttaattccatttatttcagtagaaataaaacatgactagttactgaatatatgtattatatcaacccacttagaaaaagtgtttttaaaatttgttattggcagagggactttgaaacttgaaaaaatgccccccacttgcttccatataaaacaataccaaattactctattacagtattatttcttatgtaaatcgtattacaatatgtaaaaataaagcatggttttaaaaattaattaaaaatatttggggccagaggaggatggaatttgaggtaagaacacaaaagagaatgttaaaggcacaagctatatttgctggcttgtctgctaaggtggaggaagcttcttacatagtaggggttttgttgagtggatggtacaagtttccagccaatgaaatcaccaggacaacagaatcatccttgtactatccaggttcttccatttggaagcgcttttctagctcacacgccccagctacctcagccttgtgatcgctgaggctgtggctaacttgactcagagcaggtacatggcacagggcagctagaggggagagagagaaggcaggcccagcttagagtggaacacacacacacacacacacacacacacacacacacacacacaccaatggcacttcccagagtggcaaacagcacagactcccaagttatcatagcgggaactggcagaactctgaccctaatttctctctaaggtgtgtacaagactccctctgacttatatttctccagtgtgtgagagggttgtgtcctcctgtactttatggcttgggttttgttttaacccaacccccacactctcttctgggaagactctagcatttcccctcgtttcagaacccaagacaccatagaaaggagcctgccatggaaaccaattctccattagccaagaataaaaatgcctgtgcaattcttgtgtccatttggcccagagggaaacttgtgcaacctcatccttctgtgctcccatagctcctgacctaactggcttctcagactccccttaccaatgtgctcctcctgcccatggaggcccaaggccacggggtgcccagggtattcatctgctcgagcctactcaggatttaaagaccaagttaaataattctaggacataactttttacttataataagtgcttcattttctatcttcctgctgattaagaaaaagacttcctatagaaaacaaaatgaaaagctatgatcttatcttttaattagcatatccaaccaagaagagacagaaaccggtggtttaaagcttcctcctgagagcagagcggtaacccgtccttacagcagcactgtactccgtgccttgacttctgtctgcggagctgtttagttcaaatcaagaggaggagacttgtgagaataaccaagagaagaggaagcccagtgatgagaaggaggtttgagtcttaatttccttccatctgggaaaccaaacaagagcccaaatacttgaagtataaacattagctgtcttgaaacatttgcaagacagctagtggtatcttgtccacctcagaaggcacaacaatgtccaataaagggagagtttaaaaaaagatatcagaacacagaatctcctaaacagaagaggcgattaagagaggagtgagttccctatgctcgaagtcctataatcaataaagactgattgcatatataaattagaggcagtatttttagtatagagatattcaagtgaagttgagaaaaggctcaatagccagtggctgagatgttttccggaatctttggctctgaagaggaaagttctattttttcccttggatttttttttaattctaagaatttatgttttttattaattataactcttctggaaaattaagactatttatttcctcttggctttatgagagaaggtgtcactgtgtagcccaaggtggctttgagtacaagatcctcctgccttagtcctccaagtattggggctacaggagggtctcagtcacacctagctttaatcagatactttaaagctaaatttccttttcaaacatctgagcttttgcttcactttctgcatatctgttcactaacctattttaattaaacactaggttgtttggttatttatttattacttcttttgaggctggctctttctctgtagcctaggatgacctggcactggttatgtggctccggctaacttctcactcacagcacccttcctacctcagcttcccagatgagatgacaggtgtgactagccacctgacagtcaggcatgacagtctactgcataaccatgcatttaattacatgtttctcataccttcgttcagctcactggcagagagggcatagagaacaagaaagccacaaagcatttctgctgctttccattcaacacgagtcagttctcatgaaagaggaaggagaattgttaactgcagtgctaaatatacattcaaatgagcatgtgccagtgctcccctcttattgcaactatttccacaactcaaaacttacgttagtgggaactaaaaggggaaggggaaagaggggggagggaggatagcccacatccagccagagttcctcctatgctctgggcaggcagatgcaggagagctgccagacactttccactcagccccgggtgggcatctaagtcactgaccccactcaacagggggtggacaaatggcagccccctaccagggccctgggacaacaccctgaagctctggggttatgagacagaggttcccacacaggagagagtctgcacagcgggacttgaatccagagatagtctatagttttagagctttattgtagaaagtcagggggaagagaaaaggtaagagagagaaagagagagagagagagagagagagagagagagagagagagagagagactagccatggccaagaggagagaagggggaaaaaagcacagagagagaagaaaggctagaaagtgagagggagagggagaggagaggagaggagaggggaggggaggggaggagaggagagggaggagcaaggaaggcaggctcatagatttgaatgcttagtcgccagggagtggcacttttcaaaaggattaagcattgcaggaaatgtgtcactggaagtgttttgaagtttcaaatgatgaagccaggcccagtctctcttcctgctgcctgcagatcagagtgcagaactctcagctccttccatcatgactgcctggatgcccacatgctccctaccatgatgagaatggactgaacctctgaaactgtaagccagccccaactacatgtttttctttataagagttgccctggtcatgatatctgttcacagcgataggacactgactaagacagaaacaaagctttaaaaggtttttttgtttgtttgtttgtttttttaaggacaaatggggttgttggtgtagcannnnnnnnnnnnnnnnnnnnggggagtaagagcaagagagcaagaggagtgagagagtgaggaggggccaaacagcccctcttatagtgggctgctttatcttactgttgctaggtaactggggaggagtttagcttgaagatcagaagcttgggacattgcttatgtgactgttagccatgcttctcctgtgggagctgtgggggctgtgggggctgtgggggctgtggggtctgtaactttgacaggagccagaattccaggagacatgagagaactccttctgtcccacgtaggtgaattatcaccacagggtccaggggttccacctcagctggactggagaccagattgtctttgcctagcccaatgccccatcttacgttatttaaaaacaaacaaacaaaaaaacaaataagcaaacaaacaaacctaagaccatcatctggctcattgctctatttttaatttttctcattgttttatttttttaaattctattaaaatgtgactcaaagatgaaggagatagctcagttgtaaaagtgcttgtgggtagtcatgaggacctgattcaatccttagaactcacattaaaaagttgggtgtgctgacatatagttgtaatcctggcatttggagggtggagaaaaatcctagtctacttggcaagctagtccaaagaaagagcttgtctgcaaaaccaaagtagaccatgcttgaaaaatggcacgcataattgtttggtctccacatgtatactaaatacactgttatggctagtcctgtgtcaacttgatacaaactagagtattctgaaaagaggaaattgtaactgaaaaaatgcctccataatttccaaggacattttctgaattagtgattgacgggggagggcccaacccattgtggtggtgcagtcccgggctggtggttgtagtggtgggtatttcatccacattgagctccgggcaggtctcgaagttctgcactcgcccaggagctctggcttcatgaatgaaacacacacgcatatgcacacgcacagtgatatttttaatatgccttactagctcaacggctgggcatttccacacctccctgcggctagcacacactcccctccagtattcctgagttaacactttctaaatctgcatttttatctttgctgccctgctgctttctgggcagccttcccgtggggtggggccacgttttctttctacctgcatttcagccacttagcctgttccttcacagcatggtcagttctacccccctctcgtgacagaattccttcttcccaccccaacccccaccccaagtttcttgcctggaaattctaaaagttctgcctctttcactctgcccagccactggacattgctctttattgattaatcaaaaatcagttggggacacggaccctcagcatctgcacatgaaaattcccatgtcatttgaggaggtaaattaagataaagttttacaaccagtgccctggttttgggttctataagaaagagcactgagcacgctagtaagcagcacctttccatggcctctgcatcagctcctgcctccaggccaggttcctgttaagttcctgccctgatttcctttgatgaagtgcaagactaataaaacttctctccagcttccttattggccatagtgtctcatcgcagcaatagaaaccctaactaagacacatagacagatgtctaactaagacacaaaatacagaaaaaaattcttttaaggtaaagagtaatagaagagccacattttaactatagaatatgatgttgctctagttggtactaattggcagtatcaagtgtgataacacatgtgtgtgacccaagcactttggagagcagagcacaagggacaagggtcatgaatgtgaggtcagactgagtnnnnnnnnnnnnnnnnnnnnnnnnnnnnnnnnnnnnnnnnnnnnnnnnnnnnnnnnnnnnnnnnnnnnnnnnnnnnnnnnnnnnnnnnnnnnnnnnnnnnnnnnnnnnnnnnnnnnnnnnnnnnnnnnnnnnnnnnnnnnnnnnnnnnnnnnnnnnnnnnnnnnnnnnnnnnnnnnnnnnnnnnnnnnnnnnnnnnnnnnnnnnnnnnnnnnnnnnnnnnnnnnnnnnnnnnnnnnnnnnnnnnnnnnnnnnnnnnnnnnnnnnnnnnnnnnnnnnnnnnnnnnnnnnnnnnnnnnnnnnnnnnnnnnnnnnnnnnnnnnnnnnnnnnnnnnnnnnnnnnnnnnnnnnnnnnnnnnnnnnnnnnnnnnnnnnnnnnnnnnnnnnnnnnnnnnnnnnnnnnnnnnnnnnnnnnnnnnnnnnnnnnnnnnnnnnnnnnnnnnnnnnnnnnnnnnnnnnnnnnnnnnnnnnnnnnnnnnnnnnnnnnnnnnnnnnnnnnnnnnnnnnnnnnnnnnnnnnnnnnnnnnnnnnnnnnnnnnnnnnnnnnnnnnnnnnnnnnnnnnnnnnnnnnntctcccccctccctccctccctctctctctctctctctctctctctcctttatttatctaactattccataagatacctaaaagaagtggctatctaattaatctactctgtgccaggcagtacttgaggcatttatgacaccagggaacaaaatagagtagaaaactcgactgtgctttgtggggtctgactgtagcactagaagccacctggttcacttttctttattgtcaagaccctacttccaatatcatttacttttaactcttccagcaagctaacaagtgtcttccttctcctctgactcgtctgctctgtccagtcgtcccagtaagtgcgttgaggtacaagtctgcagtttaagtctctcccacagcccccctgtgccagaggagtgcatgaactctctaaggcacgcctgtgtgctggccttctcatcctcctgatgacctcttataacacttcccagcttactgaaattcttccaactgccctgagggagctggctcactctctcacctggaactgtgatagtcactttctgattggaatatgcttgcctcattctctgaatagctattgaaatgtcatgttcttgtggaagccttttataaatcccagagattgggcaagggccactgtgttgaccatctctggcatcatgagccagacttcatctagcctttgacacacattactctgatggtgcatttgcctatctgagctttaaatcgaattacaaaagtgctgtgagggggacctgatggccttgttttctgctgtatcatgctctataaaggaaggtacaggaacatgcatacatgggaaaaatgaatgcttggagggacactatccacatgccactgtggaaataggagctacaaagatagtgagaggaaatgcccttttccctctttcttaacaaattaaaaataattatggaactaaagaataaaaatttagttgcatattgtgtttttacctatgcatttcctaggacgtgcatgataaattaatttccttttcattttggaaggagaaaccaacctttcagtagcctttaaatgtttaaattactttttttttttttggtgtgttcatgaaggtatttatgtatacatgcaggtgcacacccatgcacatagaggtcagaggacaacttgtaggagtaacttttctcctttcacataaaggttcctagaattgaactctggtcagtcaggcttggtggcaagtgcctttatctactgacctatcttgctaggcttcttagcaatgttttatcttaagtttccgattcccaaatattggttattcccaagagaacagctagaaaacacactgagtgttatgaagtggattatcttcctcagcactcacaggttgaattcctatgcccaggccgcaaagcgtgatggcattcagaggcaaggccagaataggtaaaggatgctcaacgaggccgttctgtgcacctcaatgacagtatccctataagaggaggaggaggatgccggggatataccgcctggccatgcaagccaagaccatgcaaatttgtctcagaacgtttggcctccagaactgtgagaaagaaatgtcattttgttctttaagctagccaatgtacggagatttgttacataactttagcaaactaatatctaaaatcaaaataggtcagtttatagcttgtaattctccaaactgaactatgggatggggtactggtgcattttgccatgggtgtccttccctgtggcgggtgttagggagtacttgccctgctggttctgagtatgtgttagaaaactgtacttagactcaggtgaatgcacagatgcatcctgagccttccacagggacgacacgtagacttagttattgatcatctctgtgttgccacatgggtcccaggatcttagcaactcacaaggtttttcaggtttccagtgtgtaaatcccccaggcttacagcccaggaataattgtgactcatccttttcttctttaccacctacataattaatagagaatgacaagttcctgtagatgcttatttcaacatgcctctttcacccatgcgtcccttgtttcttttgcagggtcatctgttttgggcttctaagcttcaggtcagccatttcgaaactccccagtcctctgcacctgtgtgtgtgcttctgtcttccccttccagcgtcttccaagaagcagtgcttcacaaagcactcctttcagctccttgctgaggagcctggtgctttcccgcatttagaaattaaaacactcttcacctgcaacatttcctagacccgggaggacagcagattgtcctgtgtgagtgggtagatgacaccagagctgattaagataatgaatggctctctctgtatcaatccagaatgtttccccaggacttacactacgtcttctaaattccatctggccagcttcctccctgtttcttaaaccttctgctcactgccaactccacaccagtttcctcatactctttctccatccccattcctctggacagcccctcccttcttcactttctctctaaggcactgaagcctggatgcttgccacagcccagcctgacctttgtccccagtcagcttttcaggcccccacgctcctgtctctcagatcagctctgtggcttatataattagaagtgctcattttttcagtgaaggacctttgtgcatgtgcatatgtgttcctaaggttgtggccttttcctttgtatttcatgagatgatgctgactttgggatttttttggccatctcattgaagattatgcaccttgatgggtcacaactgaagcttattaagcttgaatttagagaaaatcttaagctttcagcattacagtcccaaattcatactcacttttgttctttgcttgttggggtaaacatgctcccgctgcaaccccagactgagctggaagattcaggtcctccccaccccagccccaagatttaattatacatcccaaaatctccccctccatacatttcaaaaagttataatccttgaaatatgcctaaccagtcacagtaaataacgcgtgcatggtgtagagggtctcagatccagagaaagctgagaccactcttggcagaatccaacttgcaaagtgtacatccttcacaaaagcaggcaatggaattccacacatcaaagctatgggtaaggggcagatgtgaaaccagagtagtctttcccaaatcacacctgcctgatgtccttagtcatcgatgcccatgaaaatcaccagggtgtttcaaacctcaagtgaaccagactcttttggaatgggacgtagcatcagtgtttatgctctctgctgatgccgatgggagcctccactgtagccattaaggcaaactcatggcgtagccagacaccacagcgactctgtggcagatcccacagaaagggattatagtccgttcacaatcactaagcagtgagaccacacaatcgaaaatcagcccctcttgggggatggaaatgggagacagtttgtgaagcagctcggggagagaatcacaatattcctaatgttggctgagactgatggagtaattgcatgattttctgaaagtggagtaaaggtacctgtgtttggtgcctgcctggagtctaagattgtgtgagctttccctgtcctttctgtgtgtctctttccttcactgtccaggctgaagttagatatggtgtggatttgtgtggttcttgtctctttgctataagtctcctataggagtgtacacagtctgatatcacttatatcttgcccttaagcacatctgaaattcaaatgtgctgttaagtagaaaagaagaggtagggaggaggttggagggaaagagggctctgaaacattcatttcacattgaatatctcctatctgtaagattctccacttattgctcagccacaaatggtatatctatatcatcctgtctctccagtgctgaggagaccatctcagaagaaggggtggaaagattgtagaagccagagttgaaggagggctggactggtcttctagacatggcaagaccactctattcataaacccatagcagctggtgctcttgcataagacctgcacgagatcaacccagtcaacattctagcatggagtaggaaggaattcaagagccctcatgccaaagtgaagagctatgaacactttgtggtttctgagagacagggagtctgttttctttgagaatgtggctcctactcagttgaccatgctcaggtagatggccctgcacccagagtatatgggcagcacaaatgggtggtgataggttatccattaaaacaaaaagacacaaagttagggaaggtatgagggggtggagttaaggagaagacagggggcgagtatgattaaaatagatcatatgaaattcttgaaaaattaatacaaatattagattaaatctatactcatgaagattcgactcctatgaagtttctagaaatttgcaataatgcagaagacttgcaatgtgccagtcaggccaatgctgaccatcagaagttggctcagtaatttctggaccatctccccctttagccccctttcactgttggagtatttcacaaattatgagaacaagggtctatcttatgctcaccattgcattccaagcatcccccagagcgtgggacgtaggagggtagggaatccgcactgactgaatgactggatgactgaagtggatctcacaggaggaagagcgtgtggaagaaaaccgacagatgcaggcaagttaaaaaggcaagctggacactttgaagacaggcacaatttgctaccagcaggagggccacaaagcagagcaataaacatacatccctgaaaaaccacttttgaaacaaatctgtggctagcagtttctccttctactggtaacatctgagcaattgctcatccagtctcagctatgagcagtctttgaaaaccaacttaaggctgtacgttgtaactgtagtccctattcctcctcccctcttctaagtcttttttataaatagaatctctagtatacactcttactgccttaggctcctgtgttgggattgcaggaatctatcgttatgctcagcttcttgctgtttttgttttaaccattatttattgttattattattattattaaataccactactatttgttattattttatttatataacttcatcttattaagctttggattaacatacaaagtaatgagtttcattgtggtattttcacatacacttgcacacttgcacactcacacacgcactacaaactcatcacagtttatttttatttcttccctctttctcactggcttctcccagggtccccttcagtcccccagacattttccctctgctttcctatcatagctcttctattaccctttctctgcttcccttctgctttacagaattacttatttagtgttttcatctgtataagtatgtgcctgggaggctatgaaaccgtgtgcgtttcaggagtccatggagggagaagtgggattacaagcagttgtgagcccctgctatgctgtagatgctgggaaccaagccttggtcctctgagagagcattgagagctctcagccactgaagcttccgtccagccccgccctgctgttttaatccttaagtctaaaatcctggacaattttttatggttatttcatcagaagacagatccagagtctaacatgatctcagaacatgcaggtgccttcacgaggacccagagccccattactcagcactatattccaccttttctttgtcttcaaacttggataatttgttggatcttgttgtaacaatgaggtaaccacgcttaggcacacttccaattccaactagttacatgttcctcaatagctgcttctcagggtaggggatatcagcttaaagggaaaaggaccataggagagctcccagcatacactactgctgctgcttcctcttcctctccctcttcttcttcctcctcctcccctccccctcctttttgtggagagtgtccaagggtaagcttttcggtttatctgaaaacatctacagtttccagtaggtaaagactaagttctttagccatcccatcaggtcttccttcagtgtatttggccatcttcctagcatttctttctgtgtattttagattttagacttttctatattagggagaagagttcatttacacaattatgaatgtataagactaaaatttgtagcattatatcagcaagctggaaacacaaaacaaactgaaaaacaaacaaacaaataaaaccaaaacaaaaaccaaataagatcaaaccaaaccaaacaaacaaccaaacaaaaaataccagcagcagcaacaataacaacaacaatggaacctgcctctgagatcagaaggctgactgatggccagaattcctccttgcttggtggaggaaatcagtgttagtcctttgctccatcaagtgattagatgaggtcagtaaaagtaatctgatttatgcaaagtctgttcatttcattgttgatgtcaccaaagagaacttttattctttctaacgctcgctcacacagtgaaggaaagctcttgggtagagtgtaatttcgtgagaggaactattcctgtgtgctccatggggtgacctgtgtgctccatgggatgacctgtgtgctccatgggatgacctgtgtgctccatggggatgacctgactgtgaatcttctaagagaaattcccgtgctcaggctttgctctcagtctgattttgttgccatggtgaataatggtcactcatgtttgaaaaggctttcaggcgattctagcatgttctctgccaggcctgcagattgtgttcacagagaaagaaaggaaaggaaagctcttttcttctttttgtgccgtggtgtatcccagatattgagcgacactggacctgcagacaacccacacgtatctgagtacatccaccatttctctactttgtgcactatggattcttggaaggctcacttccttcactaatctcactcttccagacttataaaatggggataatactaaacctattaatggaggtagttttgaatgatataagaaatgggggaaaacacacactagatgctcataaaagtaaaaaccttctcattccaaactttggcttcagtcagttgcacaagactcaaagcatgtctgaaacatgtctccagtgaatccaggatttatggacaattaaccaatggacacaggagtgagtgagcacaaggggtaaagcctgacagtttctgtcttaaccacagcttttggggtctactattgcactctggggcacaggtaaaacagtaactgtaaattgcaggaagtgttgcaatcaggtttcttaaaatgtttctgccagaacctgctgaattaaacaagaacagtggcctctcttgttaaagagaacacatagtaattaagacgctggaatgagtcagatgaactagcttggttgaagccttgcttgcaagagcatgcttgatttttcactgacatcagggacactgaattcagtgtgtaaggcaggagctaaatgggaggagggagaaagagacatacaaatagtcctttcgtttaactatggagtgtgatatctatatttgtctatggagtgcatgtgttacacacacactttggtaacatgctctgtcacacttgtgatgttaaagaaaacctgatccacatgacaggacccttagcaagtgaaacgttacttctaatgctacattattgctaatattcaattttagttttcttctgccttgataagaaacctggaagtccctgattaccctctttttattcttcctcattgtatgcagaaaacaaacacaaaggaacaagtgagtttctccaacgagcactcatacatctgtttgaacaagcaatcccccagagggaaaatgctgtactctgtggtcttgcttcaaaggaagccttggtgttctgtgactcaaggagggcaagtggaggcaggcagctgtccaatccagaggagttcagtcaacatggaggaggtggggacatccatcacagagagcaggggacgggaggctctgggcttgccatttctcagaggtgtcagctgaatgaaaagtgatgtcaggaactctggaggcacagctgataacatgctggatcgtaggccttactgtagacatggcctagacctgccaggtgagctgggtgctgtgagaattggtgtctggattattttgacatcgtcttacaacctgtgtactacatacattctttgcattcattggaagagtttttcccactcctgggatccgtgtccgcagacagtcccagctcattcccaccccaatgcagttttcaaactgaggtcattacagacccaaatgacttcttccaaagtgtgagacggggaatgcagaaaaacctgattttacacattttttccccatgcctgagaaggataatctagggcatatgccatgtgttgtggtagcatctgggtttctgcttttggtattttaaatttcattttattttagaggcagggtcttgccttatagacacagggtctttacataatatgttctggtctgtgcctcttgttcccctttgcctctgctttctgaggactgaaatgacaggcacaaatcaccacaacctgttgggacatcttgtagtcaacctatttcctcaaagaaatgtgaggcttggatttatctgtagagtgttatgtgttcagaggtgttcagagctgaagtcacaggctggggagtgggaagatggcctgttccttttgaacatcatctctgtaccactcccggttcattctcccaagttcacagggaggggacatctttgcttccttcttcttctagaacttgttcccttgtctcacatattgttcatacacaaaccctcccctgctctaccaacctccattctgacagctctccctgtgtccggtccctgttttaaatggacccctgcttctgcctcccctacagcaaattcagtttgaaagttgctttggaggtggtcagaatgaaaaggagctgggtatgcacagagcacaggtgtgggcgctagaacatctgcatagcagcccaatcctccgtccatggtgacccagcacaggtgtgggcactagaacatctgcatagcagtcccagtcctccgttcacggtgacccagcacaggtgtgggcactagaacatctgcatagcagccccagtcctccgttcatggtgacccagcacaggtgtgggcactagaacatctgcatagcagcccagtcctccgttcactgtgacccagcacaggtgtggatgctagaacaactgcatagcagcccagtcctccattcatggtgacccagcctcaattcctagaggcttaagtgagttcttcagtctgacagcactgaacaacagtattttccaacagatctctattttctagctgtgagtatgtgaacatttgagctctcccttgcatggtttctggcggctgaactagtatctcctcaccacaatcacctgaaaaaacaaagctcgcccttccagtgagcagctcccacctactgcagaagccgacacagcaatcttctatttccatcccccaaagcaactatgaggagtgccatatagcttagcattgactattctgtggttccttggagaaacgatccatttcttttcctttttgtttctaaattccaatacagtatatgatcaaacttcaatgaatttgactgatttcattttaaatatgaaacaatattgttatgccttatgacagttggactcataatttatggttctggattccacctctcccctggggtgtctgaatgccaccattacactagctcagaggggactagaatgtgtgaggtccatggtccagattctgattctccctggggaaagtcagttgctgccgcacaggtggcgagtgcgtgcgtgcgtgcatgcgtgcgtgcagtggagtcctcgacaaaggactcaggtccagctgggaatgccgaaatagtattatggctcttagaaaaggactaaagaggttcccgtgctggggtccctggacaagcctttgtgagctatgggggtctggtcaggcacgtgggtccaaatatccaatgatgagtgctttgggggagagactttccccaagtgttgcagctcagaacacagaccgtctcagatgatccttggtgacacagcttgtgctctttattccacgtgaccagggactctatgagaccagggagtgagatggaacttgggggtgaatgcattctattggctgaggctaagatgctggtgctgctctatttacttggggaagaagtccacatgctgggttacatgactaaggccgtgaccacctggtgaaactctacccctgggcccccaaataaataaaaggaacatcaagtgaaacaattaattagacctttaatttttacattttatagtactgtagacaaaaactaaagaggctagtgttcaggaagataaataaatacagattttcatttagtcattatcacttgaccagagtacattacagctgtggaaagtgagaagtcaaatctagagtttagtcacatatgaaatttgtacaatattttccttgttaggtgaggtctccttatgtagtgcaagatgttctagaattccttatgcagctcaggatggcttaggattccttatgtagttctagctggcctggaaatctttgtatagcccaggctagtctggcctggaaatccttgtatagcccaggctagtctggaacttacgattttcctgctttagtcttctgaatggtgtgattacaggtatatgtcactatgcctggctaacaaatattctgtgagtacctgcagcctgccagatgtgaatcacgatttctgtgacacgtcatttcatagagtctatgctcttgtgtggaatagggaggtgcctattagtcagtcagcaaaccttagtattgtgtgccaagaacataaaatcatctgatggttttgaaagtgactatgggtggggtatggactacttatgtgtaattcctgagcttcctgatggggaaagcatcctaggcaggctggctggcccttccaaggtctgtgaagcttcagacaggatgagtgtagtaagagcaggggacaggagtctgtgcaaacctgcgtggcaaggctatgagacttccaaaggcctttctcaagatgttttgagcgctctgcaatattagatgaatatatttgcaaggttagataacacattctaaacttgcaaacacaatggtcaacattcctacagcggggtagaagttaaactaatgctgtgtttactgtaattgtaattttacaagtaaacaaaccagttttagaagcaccacttttatttattatccatcttttctacttattatttgacagtttcatagctatatttaaagcattttgctcatttgccccatgaccttctcttactaccctctttccactcttaacaaatccttctcctcctttcatgacttttttaaaacaaaaattaccctctgaatttaattagggttgcttccttgagtgtggggttatttactgaaaactgggcaaattatcagttgagtgggcctcattactgaaatctacccgctccttgccaacagtaaccattaatagctcctcaactagaggcgaggcctcatgagtcccgccccacatctctttggaaaccttgtgcaagacttcttcagctgagcccaggtactgggggtccctgggtgtaacagccatattgtgtcagaatgcagcacttgcctccattcctcccgtctcccagctcctacatctttcttcttctcttctgtgatcttttctgagctttgtgtgcaatgtagacgttctctttaggagtgagcggtaggctgtcatagtcttcaccctttggctgactatgcattgactgaagtgactgtacaaagaagcttgtctgaccagggctgagagcagcagtaatgtacggatacaagcatcagtatttaaaacgcagtttgacaacatagttgctcagcagaacagcagtgaaagctcctcccctagagcctctgacctcctgagccctgagcttttttttgacctgttttacagcaccaggcatgggtgtgctgtgtgccgggcctcacgacctgtcagaaagtgcagtgttgtcagaagtgcagcgtcaccctcacaacagtcttgccgatgagcgagtcgtgcttgcctggtctgtgctgtagcacgcagttcactgatgacgtttctcatctggtggcctagccagctagccagcaaggaggaagcttccagtgtgctccactttgctttatgttctgtaataaaactgcatggtcgttttagtaatacggtcttacctaaaatgatcaccatagcttgtgctgtttagcagcattcgggggcctcctattcatgaagaaatatcccacatcaggaccagggattttggctttataacctatgatttctgtgagcaccatcataaaccaatgcagggtacctcagttcaatctctctctctctctctctctctctctctctctctctctccctccctctctctctctctctctcagatttatttatttatttatttatttatttatttatttaatgtaagtgagtacactgtagctagctgtctttcagacacaccagaagacagcatcggattccattacagatggttgtgagccaccatgtgcgttgctaggaactgaactcacgatttctggaagagcagtcagtgctcttaaccactgagccatctctccagccctcaatctcctttttgtttgtttgtttgtttaaaaaaaaaacaaaatgaaaaaccaaactaacttgccaaatactgagttcgcatatgctagtttgtccattctcagttttgcctaactacccggtatccccatcgagagcctccatctcccctaaggccctcatcccacttagacctttccattccctgtatccctccctccgttacatgtgttctaatatactctctacgcttcttaaggcttcttctccttccccctttaggggtctttgttttagcttcctagtctctataagacatgtcaaattaaacacaaaaacttaaaaacttgaaattaggatccacctgtgagagagactgtggttctcgtgtttctgtgcgggggttacgtcactcaatagagcagttttcagtttcatctacttccctgcaaatttcataattttattttttatagatgaaagtatctctgtcttgcatttgaaccactttttcattatccattcattagctgatagacatctatacagattcaagcccctcactagtataactagaatctggatgcatagatatctctgtggtaggagctgggtcatagagtaattctattcttaatgggcatttatttatttaccattaactccggttcatctaagttcatgctttctctctttaaaaagaaaaatgccattaaaaatcataaagtcagccaggcatggtggtgcatgcctttaatcctgcatttgagaggcagagactggtggatctttgagttcaaggccagcctggtctatgggatgagttgcaggacaaccagggctgttatacagagaaactgtctcaaaaacaaacaaacaatcaaacaaacaaaggaacgaacgaacaaacaacccaaaagttatggggtctacttttctttaggcccaccctagagtggagttgatcaatacagtgatcagtatcaatacagtatcactgatcattgtattaaagaaaacttagtttcctccctcattagatatcatttgtgatgagttccttctctagaggtgtgtgctagttagctttatgatggcagcagacttggtgcactgatttgaaggcatgaaagggtcatggtgaacagctgaggtttggcactgtaagaagccaggagaggcaggtataacctcagtagcattgaaggcccaggactgaaggggccatgcagagaagttgaggcttgacaccatgaagaaagcccagcccaggagagcttatcggtgaaagtgctgtcagttacagcagagactctgacattttagagaagccaatgctgtgggatgaccaccaaggacagcagcagctgtggagtggagccagcttgaacctgggagataagccgtcatgtgctatgggtggttatctaagctcttttcaggaccccttctggattgttagtggatcccagatggtggacagaattattcacacattgaaaatttggttttgctttgttcagattgtgactgtacactagttttccttcttgaagtaagaaagtatttggctttattttattttgttattttattttacaggaacccacagtggtaagactttgaacttttaaggagattttagagttttagaagactttgattttaaaagacactagatattttaaagagactgaatttttaatgtgtttgaatatataaagactgggaccttttaagttcataatatgttttatattgtgatgtcgattttttaaaaaatgattttgcgattttataatatctgtaaaatcttggagatgaacaagaaagggctcaatagtgatgtttgtgtgtcaagttgacaattggtcaattgtgctgacaagagtcatgtcaactttacacaaactaaagtcatcgtagaggaaggagccttagttgagaagatgcctctataaaatgaggtgtctgcaagcctgtagggcatttccttaattagtgacaatgtaggagggaccagaccattgtgggtggggcagcgcctgggcaggtggtcctgagttctatcagaatgtaggctgaataagacagtaagtagcactcctccatggcttctgtatcagctcctgcctccgtgttcctgccctgctagagttcatgtcttgattttcttcggtgataaacagtgatatggaagccaaataagtctttccttcccaagttgcctttggtcatggtgttttatcacagcagtagtaatcataactaaggcaggatggggctttgtcccatctcctttcccctgtcatgaggtttttgtctggataacttgatgcatacagtcttcttatatgcgtctgtcctgttatctctggaaagtgatatttcattaaagtctttcaccacttctggttctcaccatctctccatctcttcttctacatagacccctgagccttgagaggaggggtttgataaagacattcatcccattcagggctcaacactccaatctctcactatctgcacattgtccagttctggatttgtgttaattgcttctccgatgaggggtgagtgatgcgctactctatggaaatgtaataaatcattaggactcattttattgccatgttaatttagcagaataatagtagtagttttttccctagggcccattacctatctagtctcaggttcttgtgtgcatcagcagtatcaggtatgggcttaatcttagggagtggaccttaagttacaaaaaggtaggttggttactcttataacatccatgccactcttgtatctgtgggcatattttactagcaggctgttattaaaacgtgtgagtttcacagctgaatgagatttatcattgttggttccctccaggagtttgcacagcatcttttatcactatgaaggcagccagtagggatgcttttaaaaggccagccttgatgacacagtccataatctcattactcagagttgaagcaccaggattgggagttggtggccagcctggtctacatggcataaccttgtctcaaaccaaacttgataaaataggaaaacaacaaaacaacaacaaactccacaatcaggttgttgtgtatacctgatactgtagcattccaaacactgaggcagaaagatcagggcctcaaggtcatgtccagccacatggtgcactcaaggtcacacccggtgcgctcaaggtcacactgggctatatgaaacaccataccaaaaaacaaaacaaagcaaaacaacaacaaaaatgtttaggttttctctggtttttaaaaattaattaattaattaatttatcttatgtattttttttaattggtaaaagccatgcctgggtgtgacttcagctgtactgatctgtaacatgtatggctgccacctaccataacttgtcttgagtgagtaaggacatcaagccactgggctgtggcctggagtcctcggatgctcatggcagattatgaggtctgggtgcttcactaacagtgacgaaactaaagggaaactgcaggggcatgaggctgcctgcaggtgagcatggattcggttttctttctagaggagatttcaacaaacttcacctctgaccaagaagtttgaggatgaatgaagatattgagtcataaaatccctaatataagtagtctacctttatgttcaaaaacacttttcaacatgattttaaattttaggaaatagatcactttccaaagtaattataatcacatctctaacacttaaagagacaagaaaaataattgagggtgtggtttctttgttgttgttgttgtttttttttgtttgtttgttttgttttgttttggtaacagtaagatataatcaaactaatctgtggaaaggcatggtatataaaatttggcagccttttgtattaatttgaaaaaatgcagactgagccagcaatggctcagcagatgaagaccacactttcaagcctggggtcaaagtttaattctgggacacttaaggctgaaagagagaactaactcctgtactgtcctctgacctccacgtgcacaccacatctctctctctctctctctctctctctctctctctcacacacacacacacacacacacacacacacacacacacggggcggggggaggaatcaaacaagcaaatacaatacaatacaatacaatacaatacaatacaatacaataattaagttcagaacttcctgaaacagcaagtacggggttgcacatacccgtgactgaagatctctctgctcagtatttcactgatcagatggattcacttgcaacatggcatcagccaacactggccttctgtcagactcaagttttcatttttatcaatccttcccacaaagtattttttctaaaatgggaattcaatcatatcccttccttagaaaaatcccttcctcagccccagggcctgccttttgttacagccccagagggcaggatccatatccactgtcccctgagaatagtcccagccaccctggcaaactcttgtttgttctgccaggatcctacatggcttccagcctctctagctcttcctacacaccacggagcactctctggacgctcagccactggtcacaaagccacttcctggaaggattctcccagtcttcctcttctctaagttagagaacacttattacattcttgtttgatgctagagaaaaatcagtcagacagaaggccagtgccagctgctgccatatctcaaatggattcatctggtctttgagatgctgcatgaagagattgacagtcaccactgaggaaaacccatatcagacgcaagaagatgcatttcattttgtactatatctatttgattaccacctatgtgtgtgtgtgtgtgtttacttctctttggaatttcataatactttggtcattttatactttagcactttgatagtgttgtgaaattcatctgcttatgatctacagcttggtctccatgtgggtcccctaataattggagcagggactgtctctgcctctgttgtctgccattggattcccttctcctagctggactgcttggtcaggcctcaataggagagggtgtgcttagtcctgctgtgacttgatgtcccagggcaggatggtacccaggggggatttccccatctctgaggagaagggaagagggtaatggaggtggggagggatttttgagggtgggattaaaaggagagcagggaagggggaactgtgatcaagatgtcaagtgaataaataaatgaaaagatcatctgcttacatatacctttccctctggactccggcagccctggggttacaacctacccatctctctacttatattggagaagattgaatcaagagtacccagataaaggcgcatcacccagagtccaatagcccttctttctctagttagccttcagaatgctcttctcatgcctgatgcagacaatgaggccctgtctgctcctaacagtcctcaccagttcctgaccaccttgtccccaggatgagttgaatggacacaccccacattgaatatgtgtccatatctcactctgaaacatgcacatgtactggtatttggaaaaaaggttctttgcagatagaggtaagaatctcaatgtgatatacacttggattttccagatgggccccaaatccaattacatgtgttctttcaaaacagtttgttgaaattgtgtgtgtgtgtgtgtgtgtgtctgtgattgtcagaggacatttgtgaaagtcagtcctctcctgttgtgtggatatgtggtaaggactcagcctatcaggcttaactgcaggttcttttagccattgagccatgttgccaccttcctaacaaagtttcttataataaaacacacaccaagagaagttcatgtgaatgtgggcagatctgggagggaaatagtcacccatcaaggcaaactaaaatctgaaaaaggaaggaatgttactaagtgttctattcctatgaacacacaccatgaccatggcaactcttacaaaggaaagtgtgtaattggggctggcttgcagttcagaggtttagtacgttgtcatctgccgcagaccctctgggtccctatgtctgcgtggaacgggtctctagtcacaggtgggcaaagcattggatgagatgacagacagatgcacacaggagaggttgtgtagaatctgaatgcatttgttaggtggagcatcaaactttttatagtacagaaaattcaagggtcagaagtcacagcaggcaaggtacattgaagttaccaggtacaaaacaaagaaatgacttcaaaaggatttacaggaaccaggtaaatgtttacagtaaagataaagcagtcctgcctagggtcagcttagtgacaggcaaggattttacactctagtgctatacctttgaaccttgtgaaggctagcaccagggggttctgctcttggcaggcctcatgaataatgcaatatcacaacccccatcctcaattcctaggccttgctaaattcttatatgagtgtaactattaagtaactgaagaatctctatttgtcagaagaatttaccaactaacttgcttctaatatgcaatgtagcctgtactgaagatttctatctcagtgagattccctggctctttttgcagaccagttgagccactggctctgtctattgtaaagcttaattagttactgaataggttaacttccttactgccttctcacaggattctaagctcggaggcttctgggatcttggaacactggggaaactaactataacagaatttaatctcaaagggcatttataataaaatattaaaagagagctcatagatccatacatcagactaacgtgggaatagagtatgagtatatggctaaactccaggaggtgagcttccttgaaactctctgcctcgtgagtggcttttaggcttcacagcctgtcaagctgactcgaccagagtatgtggcagtcatcatgatggaaatcataacagtgtgcaggcagacatggggctgtgagttctacatctgaatctgaaggcagcaggaagagaaagtcacactgggcctggcttgagcttttgaaacctcaaagtccaaccccagtgacttcctctaacaaggcaacgagttctaatccctccacagtagtaccactccccaatgactcaccattcaaacagaagagccttatgggggccactcttattgagactaccacagaagattctcccttaaagcctcaaaaacgtccctgattacacacatttggaatttctagagtcccaaactgtgaaagctatctgatgtaagaagccaccatgctgggtagacttgtcacagcaggcccaagaagctaactgagtttgcatctcagcctgctttctaagttcttctgcctctctgtgtgctgacaggtttcccagagttagtgcctgcttcttctttttttcttttttcttttttttttttttttacaatggtgtttctttctttgtctctttttatttgtgaacaatttttaagagttacatacataatagactgtattatagtattttcaaccctttttaccccctttcaatcctcccatgatcctcttcccctgccacttctcagattcatgtttccttcttcaatgatgtatatcacagtaatacactcacacatatgcacatatacatgctatgcctacacacatgcgtgtgcacacacacacacacacacacacacacacacacacacacgagtccaaatagtgttgcccatatgtacatggctttgggaccagcacactcttcctgcttcacactgtacccatagactactgtcatttactttagaccactagatcttacttttcctttttaaaatcttttttgtttcctatgctccagatttatttttctagctttctaccagatacttcttgttttgggagcagaatcgtactatgtaactcaggttggccttgtactcatgatccctttgctctgccttcctgggatggcaaacatgtcaccacggtttgcttctactatatatattagttaactgtccatctgtctattcaaactgtacttctatttccttttattttacaatccttccccactctctggtgctaagggttgaatccaaggccttatgcatgcctgataagcactctaccataaactcaactttaaattgttttggttttgttttcatgtttgttttcttggaagagcactttaaaacagcctcttttacaagctctcactttctatcagttcttcctgaaccttattgaatataatttctttcaaagatagaattaatttttataatccaatacactttcagacacagtgaaatgattaaaaagtagaaagggagaaagaaagaaagaaagaaagaaagaaagaaagaaagaaagaaagaaagaaagaaaggaaggaaggaaggaaggaaggaaggaagaaagaaagaaagaaagaaagaaagaaagaaagaaagaaagaaaggaaagaaggaagaaagagaaaaaaggaaaggcaaacttaccccaaaccacttttctaacacaatttccaccaacaatttagtgtagtttctccacaatcattacatatatgtggttatgatcagagtattttgcatggtcataaataaacaatgagggctggacataaggttaagtggtagaagagttctttgaaaggcgtgaggccctggatttaacagctatcagctcacataaaagccaaagatgaatgaactagctccttttctgttgtgaatatttgattgttaatgtttggatttaggtatcctctaaagacagttcttgatcaaccacttgcaacatcctaagttcatttcaaaatagtacttgatcaccttcaatctgatttgaactgcagccaggactgactggttttctgcctagtgacttgtcaccatgaatggagtgtgagacagtttattctgaccatgtattgcctggacctgctgaaggagaatcccagacaatcgcccctgacatcagcattcctttctgatctcttagttgatggtgatatgggaaggacgcatggctcatacaatgccacgcctgaagattttccagctcataaactcattgatagtcccaaagctgggcagaaatgctctctttcctatgctagcttcttctaatgctggattcctctttacagtttctctcagtaagatggtgaaactattaacttattttcttaagtgagaggcaatattaaagtatctataaacctgtgactccagttgaagggtttttccctagagtgtgtaacaaagtcggtgctggtcactgtcatcctttagcagccagggttgagttcttactctttcccaagtttggcaccttttattttcctttttaaattttaaaaaattttagatttatttatagtatgttgtaagtgtgatgcctgcaagtatgtctgtgtatctcatgtgtgctggtgcctgagaaggtcagaagaggaagtcagatacccgggaactggaggtacagataggtgtgagccatcacatgggtgctgggaactgaacctgggtcctctggaagagcaccaagtactctgaattgctgaagcatcccgtcagcccatcttctcttctcttctcttctcttctcttctcttctcttctcttctcttctcttctcttctcttctcttctcttctcttctcttctcttctcttctcttttcttccctcctgctctctcttttctctcttcnnnnnnnnnnnnnnnnnnnnnnnnnnnnnnnnnnnnnnnnnnnnnnnnnnnnnnnnnnnnnnnnnnnnnnnnnnnnnnnnnnnnnnnnnnnnnnnnnnnnnnnnnnnnnnnnnnnnnnnnnnnnnnnnnnnnnnnnnnnnnnnnnnnnnnnnnnnnnnnnnnnnnnnnnnnnnnnnnnnnnnnnnnnnnnnnnnnnnnnnnnnnnnnntaccaggctggtattaaactccgaatcctcctgctccagcctctcagatgcaaggattaaaggctcttctcaccacatacagcttggtgttttgttgttgcttaattaattttttgtacttttgttttctatattttgagtaatgtcataaaagctgttaattttctatatacactgttcataatgtgagaaaaatcctttctcagcttatcaacaacaagattggagttttattaagagaagattaattgaaagtacaaactggctacataatagtagggtacacttgtgattcatagcttgctggctcagatgtagaatccaccgcaacctgagcaactctgcatgtcaaagacttctaggcagtagtatctaacaggtaggctggtgtcttatttacttttctgttgttgtgataagaccccaggattgaagcaagggtgtcagagtgttagagtccttgaccatcacgacagggagcatggcagcaggcaagcaggcatggctcttgagcagaagctggacatttacatcgtgatacacagacaagaggcagggagctagttgagaatggtgtgggctttcaaaacctcaaagccccctgccagtgaaaaacctcttctaagcaggccacaattgctaaagtgttccacacagttccaccagctgtgggtcaagcatccaagccgtgaatgtctggggccattctcagtccagacattacagctagttatgcataaggtggagtgaaaagtaagtgcaagggttcttggagtcagttgtgctggggcacaggagtattgtgcaggaaggattgttgtcctgaagtggacacaggtgaaaggctaaggcagactcatgaaggaacatttcactgaagcagacacaggagataggatgttctgctaaagcaaacccgtgaaaggacacatgatgaagggttctctgctaataacatgaatgtattgctctgcctgacattgcgtagttgatctccatttgtccagagcccatggactttggctgaggcaacgcacatagaggacacttgttgtttggaggatataaacaggactccatggagtgacgaagacagagcttggctatctgggacagctagctgagcaacacttgtgagtctcgaatcttcactttgcttccccgagagaggcacagctgaaaacttctggtgttcctccaggtccatcctgctgactccagccagggctgaggctgggacgtctctgctagttcctgtctccactgttgctaacctgactctactgaactggactgctggtgtactcgtgaggtgtttgtgagtggatcgagctgccactactattctgtgacctgaactgccgatttccagacagcataggtgggagttgctccaaggaacctttctaaacaggtccacttcaaccatcttttccactacctccagtgggtggtgggctacaaggaaagttaaagtgtttaagaaccatcattgaagataggatttgaaaaaagggaaagttacaggaaagtctggggcacagagcagtagcatggtctcaaacacagatatcatcttaaagatcagaggcaaggcaagattctgtcattttctgttgttctggtttgcatggtggtatggtgtaaatggtggtgatgtttgcaggcggtgtaacccttaggggctggagcctgtggtaggaagtgggctgttggaggcagggctctggtttatcagcttggtcctgcttcttgtctactctgctgtctcctgactgctgtctcaggctcctgcagccatgtcttcctcactgtgatggattgtatctgtctttaagttgtgagctaataaccccttccttccctttgattgcatcttgtagttatgtggtcacggagtagaaatcatgacatgtgatgtagggaattcactcttgggctcttttttttctgggcaagcattctaccatttttgataagggttgacagtgtaatttaggaaggtcttgaaccctgggtccttctgcctttgccttgctcggatttcagatgtgtgatgcccaaattctaggattttagaaaagaaaatgttttgtaaacacaagatacaatttgagctgcgtcagaggagatactgtgcaagggtgggagccggagggaggtacggaagtttggtgaactgagggagtttgcaatgttcagtaaccagaacagatgctcgtttcaagtgctgacaggctgaactgtgctaaattccgggtttatagtaaagagcagacttaatttctatcacacgtgactcatatgggcagcacattcttagaaaagtgggggttagttctgatcacctgctgtgccaacagcttctgggggacaccaggattgctgtctatcaatcacacttctattttatttttaatttttgtcatgttgcttttcgaatttttaaatattgaaatgagtttagatttacaagagaacttgcaaaaacaatatagccttcctgcagttgctcattttgctaacatttcatgtttgagtgtggatttgtcaacacgaaggaggccacacagcacttacacaagtacaggctttccgaactcctccgttgctgctgctgctgttgtttttcaattcacatagtttcctatcctagatcccaaatcaggaccttgctttgaacagaggcattgaaaccaaaaaaccaaatatacctctagcttccgccttgtcatggtatagagaccatggagttaagccttacactaactttgctgaggttctggtcataatgtgagtgggtgcatgtgtgtttgttttctctgtttttgaggaagttggaaggcgctcaactagggaaaagccactgatccttcacttgagcaagtgtctgatagatgacctttcaaagtaagaggcccaaacctccatcctcggggaatgttaatattgctatcttctgaacattcatccaagaaagaaaatggcgcaagttcctaacaccctttacctccaacactttccaaatctcacatcactccgcatctttaccccaccaaaaccccacagagtcaacttgagaggtaggtttgagacttacagttcccagctacatatagaccccatttggtaacatcttttttggtttcctccattttgtaacaatttctcagattttctttgttacaacgttggcacttttcagaagctcatgtggaaattccctctattttctttatgcgtcagctattacattatgactcagtttgggttctgggtaatcagtagaaagacacagaggccaagtgcttctcatgtcacctctgtgtatcaggtcaattggtagcaggtatggatcagatggtaaggtgatggatgtctgctcagtttctaaagctactagttttctctttgtaaatgagactaagtatggggaatgggatctcaaacttcagcatgcatcagcattacacagagaactaagaataccagttttggggccctttccccagagtttctgatttagcaggccatagtagggtctttgtctttgtagatgccgctgttgtggacctatagaccagtgcctgaatatttgtcctactgtgggataaaatatctgacaaaagtatcttacttgataccacttgagaaagagaggttccatttagctcacagttctaatttcagtccatcgtgagagcaaggcacaatggcacagagagctacagatgcctgcttgcagtggcacagctgcccctctcatttcatgcagcccaggatctcttgcccaggtaagtaggacagagattcccacaccagtgaccacattaagttaaccccccacaggtatgcccagagatgggtctctcaggtgatcttaattgtcaagcaacaattaacaccagggccacacccttaaaaccattacacatgttcacaccctgataatccatagtctagagcagctgtttaattgctggaccttagacctgagtcatctcaagagagacactagaggcatatctgggagaaactctagaaatacaatgtacatttccaagcctaacactaaattgtgattaagaagacagggcagcttagagagtcggcatattcattaatgcaagccgtgctggggaaccctggagccactgctgtccgaggacagttgaatgcagagtcacttggtgacaacctatggagagtgcttagctagcttctgctccaggaaccaggccagcaaagtgtgggaacccagcaggtctgaatcacaagcctcaggctcagagggctgactagtcctttcttcaccccagcaggaagcctccacattcccagcgttgtcggaaccatgtgatttcctagaggctcatacatagcaccgcgcagccagttccagaatcagcctgaattagctgagagcctgtgacagaaggaaaccacagccgcccaatactgtttaccagcatccgcaggcttattttactttgtggatttcacatagttcagtttgccaacaccttcttaaaaatacctacttaatctgggctaacacaagaaccatagatcatttaacaaaaacccagtaccaggcttgagaagccccctttgagtcgtttgctacggttgtacaaagttgccccaagcattacaagttgttgctatttcccttggcttcctccaaatgtggaaggttttctgaagataccatatgcatcagaagtaggcccctgagctggaactaaatggaaagcctcctccccaaggactacctctcatggtaacagagggtgccatgcaagcttgagggaagtaaccaagaatcctacctagttaggatgcctacaaaccacatgcagcaagcagcacagcatgacagtcctaaggtgtagtactcctaaggtgtagtagtggcatgcacactttggcagtaaccaacaactctccagttagatttactcagacagagaaaaatcatgcccagtactggaagcctagccaaccacccagggttgtaaagtcatgactcttggagaacttacagtcaccactttccatgtaaccagcacaattcccaactacattctaagtatttgttcctataaccacagattaaatgtagtcctcacccctcatcaaggaaacttcaccttgcaacaaacagatgcagatcatggtagaaacccataaccaaccaaaatgcagagtagtggagtccagttccaactgataaaccacacggctcttgctcctaaggctgagggatcattgtggaggaggggtaggaagaaagactgtaagagctacaaggagggccagaggattttctgtgagaccatgtctctaagaaatgtcagaagaaaaaaagaaaagaaaaggaaaggaaaggaaagaagggaagggaagggaagggaagggaagggaagagagagaaaagagaagagaagagaagagaagagaagagaagagaagagaagagaagagaagagaagagaagaaaaatgtcagaagttacacccatatagtctcaccgacgtggctgtttaaacagggtgaacaagcacaacatgaagaaacttgctgacatggatggggaaagctcatgagaccttaacccttcacaaaaacatagacatgcaaggaatcctgaagggaggagaagtagtcctccctagggaggagcacacaaggtggttatcctatgccaacaggccagccttgagatcacttacacacagcatcacacagactgtgcgggttgagcttatgtatctaggaacacgcacacctgcatttgtaacaatgatgaatgaataaagaggaaggatatgtaggcgaaaaggtttggaaagaggaaaaggaagaaggaaatgaagtaattatacacccccccccccagttatttaaagaacagacatacatttttatagaaatggcaatgaaaatgtagaaatttgatgtaaaataataatcttccaaataccactcactgctgatagaccttacaggtgttataggatccctgtcttagtaaatagacatctattcccagcaagagggagaaagtggtatttttctctaattctttctcctctctgcccctctacagtttgatgttatttactatatctgaaaatgtatatggtttgggagccttacatcctctgggatataataaactgatgctctgctcttaattccctctcataaatgtttaaaagaaagaatccaaatatgactttttgttggatgaattcatgtttcaaatatagtttaaaagttaaaaataaaaatgtttcataatgataatattgtttgatattatgaatgttacaaaccaataattcaatataaattgggcaataaaaatacctattctacaggttcatgcttcgttgttaggcatccatatgaaagcgtgggtccttttagcacaattttaaattcttccataagaattttgcgtgtctccttcaactccccctgtgaaaggaagagtagagtgggggcctttcattctgcaagcactaagtgcacacagggctttcccctgctctacagcacttcaccaggattagatgaaattcagaatgacaaaaagctggaaactcttgcatggtaattaatcatcttctttgccgtaattttaagttctaatgtacatctgtatagtgtctgtatctttctatagaaagagagagagagagagagacagagagagagagagagagagagagagagagagagtgtgtgtgtgtaaaatcaaatgtaagtatgttaagtatgttccctgagtccagatgcgacatcatttatgaggtgataagaaatgcaccaatggaagaggccacagagccactaagtttcagttgctcttccaaggttgcattgagtttggcccattacggcagccctttagtgcccaaagccaagaatataattccctcaccaggggccgtattccagcatctccccaacctcacccgtcttcctgatctggcaataatattatatcaaataatgttgtgtttgggggatttggagtgtgactcaatggtggcatgtctgcctattgcatttaagaccccttgcttcattcctagcagaaccaaaaataaaactgcatttagtaatggtgatggagacaagtgacagacattcatgctactctgtaactggcctaaaacgtagaaagcagtatacagcacataccttatttaatccctgtgctagcttgccacataagccacatacgtactggagggtgaccataggcttctgcaaaatcagattacaccaaaactatggctggatgtgcttgatgggcatttatttctctagcacaaatgaacacatccttactgcagagttgcagacagtggttagtcattcggtatcccaaccaagaaagactggaaaagataatcacaatctacattttaatggagcagacagtatgtgtctgtgccttcgttccggggctgtgttaacctctgctgttgtgatatagccaggtgagatggaagtatgtagacccctggaaaaaatatatatcatacacacactatatatatcaatatcacacacacacacacacacacacacacacacacacacacacacacaccttatccatcagaaggaatgagcacagagagacacgcgcaattcagagtatgggggttaacactggtgatgagctaggtatggtgtcgtatccttgaattccagtgggatttctgtgcattcaaggccagtctggtctatgttggtattttcagacatcagggttatatagtgagaccttgtatcaaacataaacaaaagcaaaccctcatcaaagaaaaacaaacagcaaaacataattctgaggctgaagagatgactcaggggttcaaaagatatacttctcttttaaaggacctgggtttggttcctagcacctatgctcacaattgctcaccctccagatagacccagcaactctgctgcagagggcacctgcactcatgtgcacctaaccacatatggacacacacagagagttaaaaaaataaatcccaaaattggtcattattgagggttcttctcctttcgtagactgaggtgtccagcttagtcaagaccacttaagatcatctctccaaaatacaaattactgtattttgtctctactactaacatatctatagaaacctttaattcaaggtattaatataatcaagtaatgttccccagactgtgttgcagatgaaagtcttcttgctttgagtagagcagcattcatgaagacaatctgcaaaagttggggatacagtaacaacttgagccacaattaacaatccctctgatgctgggttatagtgacagaaaaaaacaaacaaacagtattatcctctatgtgtatgggacaagatagacttctgatgttttaaggcaaggtcattagcaacagacatatgtgcattttaataaaaaaattcctgttatggagttagtagcaatggaattctgaagtagaggagacaacagggatggaactatccattatgatctgggtttctttagatacacagagttctcacctccacaggctcagctatagtccaacataagaattacctgtgcagcagtcccccataagttaactgtgcacccgagcccaagcttagtaacttcaaaagtcacaaggtaacctataaacaagtatccctgactcctttgtcacctatcaataccagaagctcccgccctcagacggtacctaggaaaacatggagacagttataagccaactaaagggtgtgtgtgtgtgaacatgctttgtgtgtaggctgctcagtgttgcggtaagttataaaggccattagtttatcactttcatagtggaaagggacttaagaagtagggagggacattgtttccatggacaaagtggtgtatctgccacctacttcatgtggagggaacagtggcttgggacaggaatacggatgcagtagcaggtagactaataataacaacttaggctgtttgggaatctactagggtggactggagatttgcaaacaggcatggctggtgcagaatggagcagagatgtttgactcttattaacgaacaccagaaagcatccatcacttgaccaaccttgcctgtgagggttagctcctgcttgaacttcagctgctgcctcatgaatagaggagtcaggactagagacagaagttagcctgaactctctgtcatgcttaagtcttccaaaagcctaagttgccagccacagagcaacgtcattcccctgtggtgtcttattagggagatttcatcacaccaggggctatgtccttatggtggagggactatatgaacctaacgcgggcatgttcttcatgggaattttaatgccttctacttgagaaccaccaggtcatttcttactcatggctactgtatggagtggtcataaacttacagtatttatacattagcataaataaaccatgatatcaggttgcctagcttcagaaagaagaactaaccaaaatattttctctttaccatgatagctgggatctttagtcagtagtatacataaagtatcttggtcttcttagccatataacactcgttgctccatttaggtttgttgaataattgttataaaaatagttgacctggttaattatcttcacagttgatgagggttttggaaactgaacattttaatgggaataatagaagctgtgcttcctttcctgtcttaagggattttgtaacacccacctttcttaatgtccgtacaccaacattagacaacaagcactgcttagaacccattgggatggggtagaagtccacggaggatggtggcacagaaggatgctgtttggagtcctgctctctagttgctgtgtttcccgtcccactctggtcacaaattttgagccagtgtaagtacttgtagatagtagagtgttacagtcaaggttgaaaagaagagaagccactctaaggagcttactgacagtgtctggagctgtgggagcaaggccagctgaggagagctgggccacacactggaaaagtcctcctctcacgtttgttagtcctttgcgcagcagcatataatggcggttctgaccaggactaccctcagagatcctcctgtccgagcttcccaagtgctgggactaaagatgtttgctaccactgcctggctcctgactacaaacatttcaaatgtaggtgctatgtatgcatactctctgtcttttagtttaaagtgtcaagaagaatataaaggattataaaaccaccagtcagtcatcctggtggctttttccaaatcacctctggggagatgaagacctgggcacaggaggcttgtggaataagataattttcctcctagtctttttactgttttccgtattcagagttgttttaaaaacatgttcccatttcagggaacagcagtgcacacgcccatatgaagcggttttctctgagatgcaatggtggaccagcttcaaggaacatggaagtctgtttcttgtgacaattttgaaaactacatgaaggaattgggtaagccatgtttacatgtgtattatgcccagcaggagccgtgtttatgcatacattatatccagcatgaatgatactttggtgacatatgacgtgtgtgtgaaataagagtcatctggtccctctaatttcacatagagataaaatgttgattcaccaccaaaatacagttctgtataaaccagattgagattggtataatctccatggacccatagaagataaattcatatacaccatttattaaacagaaaactactttagtaaataacttataataaagacatactttaaaatcgtaactgtttttatagacactggctctaatgtttagggacctttgctttctcacctctgctggctgctggctttccttggaatgtgtccctagcactacccttgccgccatgttccctttgccttttttccttctatagtctatctctttcctttaaaaattacttttactattatttattattgtatgtgaacatgatgtgtgtgtgcacgtgtgtgtgtgtgcatatgtgtcatggtatggtgtcggggtcagaggacatatctgtgaggtattttccttccacattgtgtgtgttctggtgttgaatttaggtcacaaggcttttctttccccctctaagccatctctccaatgccttcattctcttatgggcgtaccatgactacagagggttctttttaccatccaggataatctccttaaaatatctgtgctgcacaccttctgagtcccctcagcaggtgaggtaatatccacagggtctgggagttaggacatgaataatttggaagttgttacccaacatgatatgccatgtttatataccatcaggaaccaggggaaacacattacagctctcttgtttctctcttgccctcttgggctattcactcttcccctattcccctctccctccctccacatgttcatggcctgcctcttcttctcttctcttctcttctcttctcgtctcttcttgtctcttctcttctcttctcttctcttctcttctcttctcttctcttctcttctcttctcttctcttctcttctcttctcctctcctctcctctctctctctctctctctctctctctctctctctctctctctctctctgccactactaccctcttaactccccttcccttgccccaaataaactctattctatactataaaaaaaccacattacaatatttccccaagtcacttgctagactctacattgtttcccacccatggaattgaaacattcctacatggactacaaaaactatatgcacaaggcagttcactgaaccataatatgtagcaacaaaaatagaaatgtattagtcttcaatggggatagaaaaaaatgaactttggtatatgcatctcatagaagatgatgtgcatgcagaaaaaaatatctttatgtactgacatgaaaatcttcaagacacaaatataagaagaaaggaaaggtgaatgccaatatattcaatttaattatatctttaagaccctatctatagagagttgactgtacaacattataatgcatataatgccagttattgcacatttaatggtaaatttgtcttatgaatattttgctgcaataaaatatgtagtactgagttgtataaaactttgtgtctggtaagtttttgtatataatgtttttatttgcaatctttaaataataaaatatataacattaaaaagtgtaatagagaacaaataacccaaactcacatacacacacactacacacacacacacacacacacacacacacacacacacactataccacacaaataagtaaatacaacacaaacatacatacacacataccatacacaaataagtaaatacaagaaaaatagatatttaatttcatataacctgaagcctgcctaactgaagaatccttctccttgggaaagaattgtgcaaatagaagaagtccttgaaatcaacaacagatatgactatttgtccattactgtcctcccaggagtaggaagagccagcaggaaactgggctgtctggcaaagcccactgtgaccatcagcacagacggagatctgatcaccattaaaaccaaaagcatctttaaaaacaaggagatttccttcaagctgggagaggagtttgaggaaaccacaccaagtggccgcaaaagcaaggtgaggccgacagcacaccttcagcgatcctacttatgaatgttaattagagatgctgtattaggatgcaacagccaacttacatttcaagaatctcctagagaaacttttgactaaacactaagcttgaagatcttgaaagcaaatatgcatcacgttccatttggattcttgcattttatccctcagaagtgtgagatgtattttattacttgctctagttttatttctgccaatgagctaaataaacacccagacaagaagaaacttagagaagacgggtttatttgagcacagttccatgttgaggtccatcatttcagggaggtcaagcagctgccacatcatagccacagtcaggagcagagagaaacaaacacatcctcacctgcttccttccatagtaggttcttctcagactgttcagcctcccccacctgtaaagggctgcaatctacgtgccgccactagatggtgctaaacctcattgtgcgcagctgcgagagcacagccagccaaagtcaccagtccgtctccgaggcttttgcccaacccctgggggctttaacctatccccagggtgcatgaggatcatgggtgttgctaccagtcctagtttagacacgtcaccaaaagtatttaagccacacactttctgagctttctttgtctacctcaatatgatatagaagtaaaagttaaccgtggaagaatctggtgtgtcctgtgtttatttcccgcgggacggggataagctcgggatacccacccaggtatttctcagcatagacaatggtaccataaaggggggatggggaggctggggcttcctacatcagttaaccatcagggcaacccctcagacataccaacgggcctacctgatcaagataattcctccttaagattcctcccatgtggctctaggtcctgttaagttggccagtacatgtgcccctgggagaataaaattctttggtgggcacttgaaaatgcacacaagacactggatccagtggtgatgctcagtggaccacgtttggagagcagtctacctaagctgggactcagctctctcagaagcaacggtgctccctgtcattctgtgggcttctcacatggaattttacaatgaacacgattggtattagcggatatgaggttatgaccctgaaacagatgagcctaggtttcttaatggctaaagacaatggagaattaattgtaactcagaatacatatgaagtgtgggggtgaagatgaggagggtgtgagagagagagagagagagagagagagagagagagagagagagaaacagagacagagacagagacagagacagaaggaacatgcacacacagaggagagggatgtttgtggcttttaatctccaaggacccaggccagaggagatttgaacgccttgttcttgcaactgcaccattgcaagcatggtctccttggtgaacaaggtaatgaaagagactccagagtctgcattcatgcattcatagttggtatgttatacacataggttttccttgtatctcatacctccagttgaaatgcagcatttatttataatatatactttccctgtattttattatttgtgttaccagtttacccatagtagactgatcatctcaacaatggaacttgctatttgtttcccagcacccagtggttgctataatagtctatcaataattctttggttttgcttttagtttgtttgtttgtttgagttgatgccctcagttgtacctctgctaagggtaatattctgataaaaggaattattatacccctttgacagaggtttaataaacatgggacttgaaatgccagtacatataaatcgaaggaattttgactgaaacaattaataaaggcatcttagatatctgtgataaaattgtcaagagaaactaaagaagcaagagcaattagtacagacaaagcaactggggaatgctgtctgggaagagcaagagaggggagctttcctcccttcagcctcactgggacctgaactaagtctcctgttgttgaaacagacacttaactcgctgtgcataagagtaagacctcctctagactataaaagataaaattgaacttcttaagttgttcattttattcttataaatcttcctctccccagaagaatcatcccacaaaagcactgctaggaaggttttgaaacaacaacaacaaaatcttgtaaataccatcttaagtctgtagagccgccttgaatttagcacgtctaggacatcagggtttgtatgcgccgacctaaccttggttctgttttacagagtacagtgatcttagataatgactccttggttcaagtccaggactgggatggcaaggaagccaccatctgcaggagactggtagatgggaaaatggtggtggtaagtgctctggtgtgtccttgtcacttgaactgtctatcagaaaagcacccacttacttgccctaaagccagaaaaaaactgagcctggcttctcctctcttacaagagctgaagggaaacattcacagataaccatatctttgtaagaatttgaaactcctatgggttgagaagttgaagctctaaaaagaatttttaaaatagcgtgttccctgatctcccactcacacgtgaagcaagcgcagggttgtgcaatcagggtttcaacactgacagaaggcggtgctcctctggatctgtcattgtgcgggagaaaagaaagctctaagttagagaggcgtgaaactgaagtgttgaggtggttctcagtgtccgaataagtacaagcaagtaaaagcaaggatgtgtttctacacaatcccacgttgttacctcatgctaattccgtgaggtaaggcgcactgtcccacctaagagtccaggagacaggttcatacacttccttacttacacagagaaagctagaaagtgtggagtgttggtattacggccctacccctcctctccccaccccctgcctttttcatccttccttttgccctcaggaaggctctccaggtcacccttcccacttttaaagaggggagaaagccaggcactgattcttatcccaaactctaccagcaccaaaaggaagaaaagaaaaaggaaaaaaaaaaaaaaaagaaagaaagaaaaaaagcaagccagcaagctagctagctctggtgacctctgatgtgatgtaacatagaccaagtaattcaagaagcaaactctgtactgaggaaagcaaagagggatttctgcactctcaagacacaacagttttctttctctaaggaaggttgagttttttttttttttttttttttttttggaaatatatctaattcttttcctgaaatggcaggattaaaaatgagtctatagcttcttataaggacattagccaataggccaacatggttcaatggtagcaactaatgggtagttagttcactgagaagaatgccagacaccaaggttttatctctgaaaatcagaactttgggcaagtcatttcacctccccatgactccaaattccttaaatggcagacagtacttctcagaaggcttcccgggagaactggacaccatgtgagtttgttctttgaaaaccatgcaatgttacatttgtgtaagttagtgtacttatttaaaaaccaggcagtatgtaaggttgcaaaaatgtttcaatgtagaaccttaaaatatttaaataaaagcttcagattccaaactgtatttccttctcttttcatatctctgaatatataattgcaaactccatatatatatatagacccaatatgcataatacacacacacacacatttatatatatatgcagtatatctaataaagatctctttccaaacttgccagaattgtcatatgtggacagcacttagttaatattttctaggtgttagtgctcaactttactgaaatatttccatcttttatcccctaggaaagtgcagtgaataatgtcacctgtacccgaacataccagagagtttaagaactccatctcaaggtctccatgctctcaaattgtcatccaaactaatgatgttgttcgaataaaactcccaagtaagatctatgaatgcttgcacaatatcaccatgttattggcttattgagttatggctgtgtgatagagtctagcattgatcctgtgagaggggatagactcatcggcacaatgcatagctaacatcagatcctcagagagcaccaacgctcagttgcatccgctcaataagcatagtcaatctatcctaattaaatgtaatcttgactgcttagggcaaagtgttatgctggggttgaacacgagagacacatttaaaactaagggacactccaattaaatgttcaactctgttacatagaactttgcaagtgcaggcccattgtggaaatcagccatgatggagtgcttgctgctctatccacagcggacctcacattaggcctggggttatgttcgtcaccttgtggatctgacacctcactttgtagacgaactacaaaggtcccaatcagttcattgtccactctaatcttgggaaattcataagctaaagtttgcacacaaaaaaagtgtaaaaaagtgtttataacacctggacagaatgctctgatgtcactttagtgaattaattttgtaattagcgacaagggttgcattaaaatcagtgacagagacttttatctgggaagagaagcaaaggtacaattctgccttctcttttcaacactcaatgaagtcatcttcccacaccacagccttgatacaatgtgtaggacctcgcttatgtcaataatcattatttagaatacttaagtgacatggaattatctaaagaaattataccagctctttataatccagatggttttatttctccttttagatcatattctgcacgttagatgctctcaacatattaatagaaaagacaggatagatacggtcacgtcacgcagacctgtgataccttcacgccggaagcagaattattgagaatataagtctaggctacatagcaatacctcatctcattaaaccaagaataaataaagaaacaaatcaatggatacaaatttatgtaaataattttattaatgttgaatattttctatctagtggatccttgagaaagtaatgtcctacttgaataattgggctggtaatagcctgaaatgaacaataaatgtcaagacagatgatagactgtacttatcaattagtctggctcacagtctcagaggcatcagcccatgactgaatggttctttttattttaggcctgtggcaaggtaggacattgaggaagggcgtgtgcactaagcaaagctattacactcaggggcaaaggagcaaagagagaaatggggattcgaggggctcaaatcccttgaaaaacaagcccccagtgaccttatgccctccagatggattctagtcccacccttcctatcagctctgcagcctggagactgatccaccataatcacatgcgaatttgggcctaattcacaatccacaccttagcacggattggtttttgagctgtgcttcagcaatagttactgtattagacattttttctgagtaggttcatcttggtgagacatgtataaagacatagactaaaagtcagagagcttaaatacttactgtaaacaccctcagctgatcagtaccagggcagctacaaactaagcttgcaacctgaacattcatgttcttcagtagtgattcgagatgcttcccccaaaataaaactcataattattagagttcttttggtgtctttgtgtgtaatagcagtcatacagttcaaactgtgagtgctggcaaggcagttcagcagataaagacacttgctaccaagccttaggatccctgaaagtctccctctgacctccacacacatgcttgttatatgcgttgtatgtgggtgcacacacagccacatgtatagaataaataattgtagctaaacattttaaaacctgaaagtattaacttggacttgtaatgcctgagaaatccagcgtaacctaaactctcatgtcctggagggatcaggaaaacaacctgcctcagctgcacatgcaagagtagagatagcgaactttgactcatcagtcacccacgtgagacagtttccaggaactgttgttcagtccacctcacagaaaccacccgatcgaagggcgtgaggcatgaaattgggtgcagcgaaatagagagagagagagagagagagagagagagagagagagagagagagagagagagcgctcctaggcgtcagattagcagttacagcagcttagggctttgtctgttaaagactgttgggtgttgcgggtattatatatttagaaagcgattacattgacagagtgtggcatgactcttaacactgggcaggactctggggatctcagagtagaattctttaatcaacagagtagagaactgaggtgtcccagagagaggtgccaggtttccttttgtattgtgagatcttctcttagcaaacgctatcagccatttcacatccttatggacaaaagcaaagaaagatagaaccacagctccagaccactttaagcagaattggtttattattattattattattattattattattattattattattactattattgacagggtctttctatgaggcctcagactctcagaactctcatctcccaagcttcttgtatgtgaggactacagatgtgtatcaccacagctggctagatttgggggcatttggagatggaatctcagtatgttgttcctgctggccctgaatttctggatcaatctattctcctgtctcagtctcctgacaagctggtacacatggccttgaccagaatcgttgatgatacagttatataaataatagtctaaagccagtctaaagtcaggtacaaacaggggtcttgcaagatttatggcaaaagagctgggccttcctcactcaggggatggcgcttctttccctaaaacttgtcgcttaattttaattactaacagttatcacctttctagcaatggacctctcatccagtgtataaggtcagatgccaacaaacaaacaaacaaacgaaacaaaaaaccaaaccaaatcaaacaacaaaaaccaagtagaactccattctgctgctccattgccaatgcaggctccagagaacaccttgaaaattacctttctctcacttcttgtccaatagtcctgattttctgatggctctccacccagtcttttcagactacaatttacctgccacactcattgctaggaattagatatttttgcatcccattgctctaacagtgatgcagacacggaagaagacacaattattgtgtaaagttgtggtgaagtaaggaaataaaaatcacaccaactacttcaaatacaggtaagaagaaagaaagaaagaaagaaagaaagaaagaaagaaagaaagaaagaaggaaagaaagagggagggagggagggagagagagagagagagagagagagagagagagagagagagagagagagagaaaagaaagaaagaaagaaagaaagaaagaaaagaaagaaagagagaaaaaagccattaccaagatacagttcatacccaataaagctcacttgttaaagtacacagtgagatggtatacttagcatatttataaaactgtcaatcataatctaattgtaagacgtcatgatcacgccttctctgcctgcagaaacctgtattactatgaatcgacgtgtattgcttttcttgatttagagtaatagattttgtggttcttgaacactgagcacccagttgtccagggtggagctctgtgaaagactgtcctgtgcttgagagtccttgctttgttgactcctttatggagagactgaagatgtttcaaaacgacgaggttctgaactgttcggaactgcaaacactgttaattcagaacggcccagccagaactccttgtagcgccccctaccgctgcaacattgtcttgcgctgtctgtttcttcctagcaggttaaaaggtatgctcctcacgcccatctggtattagctctcaaacacatcgtaatgaacaagacttaggctggaaacagctcagtggaacaacacttgcctagcagttcaaggccttggatttgacccctagcaccaagtaaacatagcatcctgaggatgtcataaagagagagcctcgcattcctgacatgagcgtgtaccagtgacgtgccccacacacagatgagggctccaggggctgtaccagtcagtaatgtgcaggatgtgaagataagagctttaggggttggggacttgttttcagtgccgttgtggtcacaagggtcagggttttccttgtgtcataaacagctagaacacgggcaaaaatatttgaagcagatgtttttgaagattaggtagtaggaaatccaagactatgatgtcttaggagaggaaaacatttgaaatgggccccaccgtagacacagctttttgcttagccacagccttaatggtagtattgagacccatggcagtttgaatagaattttaaggcacccaggagaggtgggaagggttctgggaaggagtgtggctacagaaaggggaaagccacagtcagtgcctagggttccatgtgtataaacacagtgtcaacttcagcgaagccagggaacaaatggccaaactgctgcggaatgaaccctcaacagacctcagagagggcagggaataaagctgaggctgggtagagcagacagcgcgagcactcaggaagagccagaagtgacttgtcctggcagtagagctaagagtaaaagctatgccagagccagcttaagtaaggtgagttgtgctggaagagttaaatatgatctaaatacagtgcatgctttttatgaaagtctacataactaaaaaggttacaataaaataactttaaaaagaataaagaaaaagaacaatgagcaacacttcttaaatgaagaccataagcatgcaggcagtcaataagactacacttgtacccatcaccaatccaaaactgttacacaagacaagaaacagcaaacagagtctataaatggaaaaccatcttactttgaaacagatccagatatgacagcaatgatggaattaacggacacggactttaagttataaatatgctcaaacactggaggatttagtgaacctaggcataatgagattagtggaaggtgacaagccatctagagctaaagccaatagaatattagaaagaaacacttgcaacataggttaaaaatggttagacccctaagaaagaagtttgtgggtctgaagacacagtaaaagaatctacagagcctggcacagacggaagtaaagactgggcagtgctttgggctaaagagagccgctcattcaggtgtaagcatttcccaggaagccacagtctatgacaatttgatatgaaggtgccctccttccagggtgggattgcagctgtaagtccttagaaacccctgaaagtggtggtgtatcagatagtgtgccacaccagccagcaaaaattcttggaataatccaaatttataaaagtcattagaaaggaaaaataaatatgtgactgcttggttttactatctgtgacacagaaaagatttctttaatgtttctctacgtttatagatagtttacaaattaatttgcatatgaccttatgttattttaaaacatcaataaattccaaggaggagaagaaggtcgtttggttttgttttgggttcactgagctctcaggaggcagaacaaggctttgcctccggtgaagtgctatacaaatactggatatgtggatcaaggaatttctctcaggcttccttaaccatgaagtagcatttcccacgaatttcctcaaggtggcgctatgtacggtagtcagggtcacctgtattattcataacacagccttgatatctgaaccgtttctcttgtatcctttaatctttaaagaactttcccatctttttacttttgaatctgtcatgttcttgctttcaccccatgctagaattgaaccttgattattggctatgctagatgcattctgcatctcattttccttgggtaagtacttgaaactggaatgactaggtcatgaacacacacttgagttaacgaacgtgctctcagacactcctgccagcactgtgtgaaatgtcaattttatcgcctccttgccaacagatggaatagccttgtctttgatctgttctaataggtgtccagtcatgccagtcttttctaaacatcaatttcttaggtttgatatgttttttcagtttcttacaaattccccaaaaacttaggaggtttgtatataaaggcaacaacatgtcagtgaagaaaaaaaaataggttttctatggaatgaatggagtaaaataataattacgtgttttccaaaacgtttactcccaatgtaaggttcatgtttttagcgtaagcctttccttgttctttcacctccctgacggatcctatcgggagtcctcaaatgacagtttgttctggctcctccgaaggctctctgtcttggtatctctttcaaagcaaggcattgcagggtaaaggtctaggttaatctcagtagtttccaaatcctggctgagctcaggctccgccggtcctgggggatgagatgtaggcagctgtaacaggatggggtggggtggggttgnnnnnnnnnnnnnnnnnnnnnnnnnnnnnnnnnnnnnnnnnnnnnnnnnnnnnnnnnnnnnnnnnnnnnnnnnnnnnnnnnnnnnnnnnnnnnnnnnnnnnnnnnnnnnggagggtggggtggggctatcaaatgcagctgttattctgggaggattttctctcccacttataaaactgtacagattttaggtttttcttaaattcaaacatttgccaggaatggtactgctctgctttggaaaaaactgccggcaaaggcctctgcattttcaaactcctgagtccacacaattgtcaagtcaagaggaaattaacacaaatataaaataagtgtattgactatgacagactaagacagtatttgtcaactctgtgctcaccgagtaaatatcttttaactttttattgattctttgtgactttcacatcatgcactccaatctcactcatctcccttttctttcctatttgccctctgcccttgcaacttccacccaccaaaggaactttaaaaaacaaacaaacaaacaaacaaaaaagcatagaaaacttctcattgtagaaactgtagtgtgtcacaccgtgtcccgtagaatccttttatccatacatctttttcttatgcttagtcattttttattggatattttatttatttacatttcaaatgttatcccctttcctgatttctgcccccccccccccactcctaccctatcccccctccctctgcttctatgagggtatgtctccatccacccactcctgcttctctgccctctcattcccctactctgggccatcaggccttcctggaatcaaggtcctctcctcccattgatgcccgacaaggtgttcatacatctttgcttgcagatgtgcattgcagtgagctgttggtctggctcaagtcctctgtcttctgcttcgctatcaattgtggatgctcaaggggactcctctcagatatcctgctgttgccctgtgtcatggaggtcctgcagctctggatctgcaggacccgccccttcatgtgctccagcagttcttagatgaggtgagattttggagtggcctcacacagtactggatccgggtttgtgtggtagctgagttggtcagcctgccagctctcccacaccagcatcaccagggtgagctctccacactgcccaggctagctcacccaacgctgcagctggccaatctcttttgctctcatgtctttggggctggcttaccagagtctttgccattaagactagctctactgtgttgcccagtgagggcaaagccagctctcccaactgcctcaggtgctgttgggggggggcatctctcctgtgcccgtgccacctcacagaaggctctccctccctcatgtcctcggagcctgcttaaccccaaccccaacaccatgaccagctctattgagctgcccagacgaggtatagggcccactgccctgagtgagaggtaggggccagttcgccagagtgtcacagcaagtaagggacagggccagctctgcacagcctttggacatagcagcccagaccagggatgtccacagggtctttagtggtaatatgagccacagacattgacacagacctctgctgctgaatggtcatgggtccagccatggactgggacttcaccatgacctcgggtggcagttcaggctactcacaacaggccactcctcccgaccctcgtgtctccagttctgcctctcttcacagtgcgctggctgctccacttctttcctcccaccgcattgtagcggttcctgctgtgggcaggacacatgattggtgggcctctggatgtccccacctcatggtatggcaacaggcaggtctcacagtgtcctcctatctgagcattgtggtgtggctgtgggcgagcctttgtgtgtctacaccccacctatgccactgtgtgtagcagattccagatgtccataaatatctttttttttttaaagaaaaaaatatattcaactgattccttagataccattgcctgttccaaggtcataaataatttattctattttggaagttctcaaccttcctaatgctgtgaccctttaataaagttatacattcctttagtacagtttaatatattcctaaatgaccctttaatacagttcctcatattttggtgactcccaaaattgtttttgttgctgcttcataactacaatttttcagggccggagacatggctcagcgggtaagagcactgactgctcttttgaaggtcctgagttcaaatctcagcaatcacatggtgactcacaaccacccgtaatgaaatctgacaccctcctctggtgcgtctgaagacagctacagtgtacttatttatagtaataaataaatctttgggctggagcaagcagggactgagtgagcagggttgacctgagcaagcagaggtcctaaattcaattcccaacaaccatatgaaggctcacggctatctgtacaactacagtgtgtactcatatacaataaataaataaataaataaataaataaataaataaatctaataaaaactaattttgccactattatgagccataatgtaaatatctaatatgcgggatacctgctatgtgggttgtgacccacaggctgagaacggctgttttctttctttttcacctagtactcaaatttaggagataacatggatccagattcaggaagcacttagaaaaaatttgggctatgaacaaatgaaatgctactaagagacatccattgccttatgaatcagagtggtcttatggtgtcagaggcgtattggaggaatgacagcaagcataaagaaaggacagcagggctgttgatggggctctcaaagagagcaatgcattgagctgcaacttagcgtggacgtgtggagctcagactcagctcagacagtgtcaagggtcattgacaatgacctttcttggcctcagggtatttcgtgtagcctctgaaggtccaaaacaccaggtagtcagtccacttgcaaactagagggatatttgccactgacacttgtggtagcacagaaactctgttgctatctgcctgcgtcacctgaatcaaatcctcaaacatttttatgcctgagtaaaaatgcaatgacagttatggtgtcatagtgttcttgagaagactaagacattaacacacgtagaatgtgtcctggtacttaggacatactatctccaccagacagcagctatgacttattacatctcacctctaatggaaacacagaaacatgatg

SEQ ID NO: 773 - DNA, 794 bp, Mus musculus
ccgggactgcctctgaagcaggagacactgggacccagggtccttcctccaggtccatcctgctgactccagccagggctgaggctgggacgtctctgctagttcctgtctccactgttgctaacctgactctactgaactggactgctggtgtactcgtgaggtgtttgtgagtggatcgagctgccactactattctgtgacctgaactgccgatttccagacagcataggtgggagttgctccaaggaacctttctaaacagggaacagcagtgcacacgcccatatgaagcggttttctctgagatgcaatggtggaccagcttcaaggaacatggaagtctgtttcttgtgacaattttgaaaactacatgaaggaattgggagtaggaagagccagcaggaaactgggctgtctggcaaagcccactgtgaccatcagcacagacggagatctgatcaccattaaaaccaaaagcatctttaaaaacaaggagatttccttcaagctgggagaggagtttgaggaaaccacaccaagtggccgcaaaagcaagagtacagtgatcttagataatgactccttggttcaagtccaggactgggatggcaaggaagccaccatctgcaggagactggtagatgggaaaatggtggtggaaagtgcagtgaataatgtcacctgtacccgaacataccagagagtttaagaactccatctcaaggtctccatgctctcaaattgtcatccaaactaatgatgttgttcgaataaaactcccaagtaagatc

SEQ ID NO: 774 - protein, 134 aa, Mus musculus
DAMVDQLQGTWKSVSCDNFENYMKELGVGRASRKLGCLAKPTVTISTDGDLITIKTKSIFKNKEISFKLGEEFEETTPSGRKSKSTVILDNDSLVQVQDWDGKEATICRRLVDGKMVVESAVNNVTCTRTYQRV

SEQ ID NO: 775 - DNA, 26354 bp, Homo sapiens
aaatgcatgtttttgattcagtaaatctggagttggttctgatcatctgcaatgctaacaagcttccaggtgatgcagatactgcatatctgtgatacacgctttgtgtgtgtgtctttttatatttgttgatttttttttttttttttgagacagagtctcactctgtcaaccaggctgcagtgcagtggcgtgatctcggctcactgcaacctccacctcccgggttcaagcagttctctacctcagcctcccaagtagctgggattacaggcacccaccaccaaacctggctaattttttgtatttttagtagagatgaggtttcactatcttggccagactggtcttgaactcctgacctcgtgatccacccgcctcggcctcccaaagtgctgggattacaggtgtgagccaccgtgcctggccttgatttgtttttaaatgttgaaataatttttggtttacagagaagttgcaaatacagtacagagctcccacatacccttcatcctgcttcccctaatgttaacatctaacgtgtatatttttcaaaaccaataaatgaacattgctacaatactagcaactaaactatagactttatttggatttctccatttgttctactaatgtttctttctgttccaggatccaatttgggatcccacattgcatttggtcatcatgtttccttagtttccacagatctgtgacaatttcccaggttttccttgtgattcatgaccttgacagtttgaagagtattttgtagaatatccctcaattttgtcttcatatatctgagattacatgaagattaaatttgggttatgagtgtttaggaagaccacagaagtgaaatgccttctcattgcatcctagcagagggtacatgacagcatgactttacactggggatattaaacttgatcctgtggttaatgtgatatttaccagtttgctgaagttactatttttcccttttcacactctgttctttggaagtgagtctaagtgtggtcaatggttctcatatttgagcatgcatcagaatcacttggaggacttataaaaactatgctcttttttcagtttctgattcagcaggcctggggctggggccaagaatgtgcatttctaaaaagttctttggtgatggtgatgccgcctagtccaaagcccacactttgagaactactggtctagaacatttgtccttagttgctgagccttagacttcagtcagaattgcctgggaataattttagaaatatatattcccaggctttgtccttggcaattctgacctatgccggctcataggagttggcatttttacaaatgcaagtcaggcttgagaaccatgaggttactgctactctgcaataatctgattaaagcgtaattggccgagagcctgggggcaagtgctcaggcagcaggtggggtcccaacagctccagctgtaagaagcaaagggtgggagagcctgggaacccagcagggtctgaatcataggccttcaggctgcctgggtctgaccttgctgtctttattcatccctccaggaattccgtgtattattttgatttgtctgaatcacatgattgctcagaagcagacagcaccagcaagccagcactcaaccctaagagcagccttcagtgagcagtctgctgaaattctaaaacagagtaaggcatcgcatagcatgctgtttaccagcatcaactaatttattttattgcctaaatcttaagttcttcagtattcacgcaaaagatgttgtatgattacaaagattccaaaagaaaattgacgggagtgggtgatgaaggagggagagattagaaaaaaaaaaaaaaaaaaaaaaaaaaggaactaaagaagtaaggaaaatgtttttcttacatgaacttcagaaaaaatttaatttatataattttatcatataattattataattattattcagccttttattccattatcataataacttactattacttataaaaattacctttatccttggtgaatatgatgaaaagtattatcatttttaactgacaaaaaacaattctgtgtaataaagacaattgcaaataagtttaaatggcattttacataataaaataaactttttatttaaaacataaaggtagccaggcttggtggctcacatctgtaatctcagcacattgggaggctgaggtgggcagataacttgaggtcagaagtttgagaccagcctggccaacatggcataatcccatctctatcaaaaatacaaaaattagctgggtgtggtggtgcacgcccgtaatcccagctacttgggaggttgagatatgagaatctcttgaacccaggaggtagaggttgcagtgagctgatattgcacactgcactcctgcctgggtgacagagtgagactccatctcaaaaacaataaaaaaattaaaaagtaataaaaattaaaataaaacataaaggtccctaagattctttaaaatgagatttttctctgtattactttcctggggttgccacaacaaattgccacaaacttagaggcttaaaacaacagaaatgtgttctcctacagatttggaggccagagatagaaactaaggtgttggtagcttctagaaggctctgggggagaatctttttcatgcctctcttctggcttctggtggctgctgacaatccatggtgtccctaggcttatggcagctcgtcaattgctatcttcatgtgaccttttcttttgtctccatatgtcttaaatctccctctcctttctcttataagaacatatgttattgaatttagagtttgcctaaatccaatacagtctcaacctgagatccttaattagtatctgcaaagatcccatttctaaagaaggtcacatttacaagtgtactggggattaaggcttgaacgtatcttttgtggtggacacagttcaacccactacagtttcagacatagtttgggtgcttacaccctccaaatctcatactgagatgtaataatccccagtgttggaggtggggcctggtgggaggtgtttaggtcgtgggggcagatcctccatgaatggcttggtgctgccctcgtaataatgagtgagttcttgctctgagctcacacaagatctggttgtttaaaagagcatggcacctcccgatctctgtcccttgctctagctcttgccatgtgatacaccagctccccatttgccttctgccatgattgtaagcttcctgaggccctcatcagaagcagatgctggcaccatacttccagtacagtctgcagaaccatgaaccaattaaaccacttttctttataagttaccagtctcaggtattcctttatagcaacacaaaaatggtcaaacacaattcccaacactattaaaaaaaagttgaactgtgtgaagaatgttggcatggagcagtgccatgttactgcttgcttggaagaccacgtgcctcatcccagccattcagctcagcttcctgtccactgcccacctccaggtgtgcatttgagtagcagcaccaaggcagaaacaccctgagcctcatgaatggccaagtttcccgatgttcttagccagaaaatactaagagatgacccagtttcgttaatgcccttcctacaaagcccacccaatataagaagagactcatgcagatatttaggtcgctaatttttgtttgccacagcacttaaatttttctagtgaactttctccattttcaataaattttactttaaaaagccactgtaaatttttttccttacagaatggttttaatccaagtgcattagaaccgcatggaaaacttgaaggcttaatattgctaaggtgataaaaaaaaaagtagaagaattttatagctactgagggctatttctgaagaaactttataatttaacaggctcattaaccattccagtttagactcaggaagaagcagatagcaggacagctttttaaactaggtttctttcctcaatttccttacacaattaatttttgattctcgtatctttctgtcttacagcacttagagtgattttaaaaatattccatatatttgactgataaccatctcatgttacttttataaatgccggagtttggctccttatattaatttttctgttggcattatccatggcataaatataaaaatgtcttttgatgaaaaatcttaaatgaaaaatggtatccaccattcttctatcccaagaaaagaaagcctatagtagttgttaagttatgatccccagttttaaaaatttatacttgagactctaaaacaggggttgacaaatattttttctgtgaagagccagtagtaaatatttcaggctttgccagtcatatgtttgttataactactcaacctcactattgcagcacaaaagcaaccatagacaatatgtaaaggaataagtgtggttgtgttctaataaaactttatctacacgtggcagctggatttagtatatgggtcatagtttgccaacccctgatctaaaatatcaacttattctccagctgtgtattatattgctagatacccacagggaaacatgaaggaattcagtgtagtttcagattctctttcacagagttggaaacatttcggatttctatttcaatccccattatatactcagtggtgggaaagacctatcctagggatctttcctttagtaggcactcaagtgtttattgaattagttgcaaatgagtaaggcctgagttctccttgcatgccaatatctacagagtgcccactatgtcttgtccagctccaatacacttcaaattgcttcgttgaaataactcaagtttaatatgacaaaagactggaaaatcttgcctgctggggctttcctctcctgctttgtaggaaagttatgagatctgtacttctgttatgaataaatatagtcacaatacttttctatagaaagaaaaagtgtgtgtgtgcatgtatatgtgtatatacatcagaagagcaacagataattatgttccgtatttactgggccatcaggaatgcactggtgagagggccacagcatcattaagagtttcagtggttgctcttgttgggttgttagagttcagctcattggtagcaatgggaatgaagagaatttgattcaatctgggccagatggcagcacattactgccagaaaccaggggattgattgcacttcaccataaaatagggcaaggctgaaggcacagctaagggtgtttgacccgaaaggggttatggagatgattaaaataacactgaatccatagaggcaaaatagatgattagccaacaagggtgctgcttcatacatacaatcaaaagaaggcaggaatggatgggcagcagactaaggatgagcgccccagtagaaagtcatgatcttttgctcagattccagatctgagccaattttcagacccagaatcctttgtctcaataggtgacaagcccacagaaggaagaaccctgagataccataaactgttaatgtcccccattttcctcaaaggagatctgttatcgtttacttgagaaaatatgcaatgaggaaagaggaaaatccagatattctgacagcctcgggtctgaattattgtcgattcacagagtgccaaatcatcatgttagagtgaagacatacagcagctaggtaataaatagaatcctggccaaagtctaggtctcagtaggtccggtaggtctgtggattcctccagaagtcatttccctaggccttgaatgcgtaattgggattgactccttggctgttggagtaagctccacctttctcattttctaattcaaacaagaattattatagtggggaaggcaaaatggaagcttctgaaactgcacccccacactcccaccttcttcactgctatcctctctccatcccttgataagatggtgaataaaaaacattgtattcggtggcaggggaggagtgaggaatgacagaaattggggctactcaaaaggactttaagactgcagaaggtggtggttcatatcatagcaccatttaattcatgagtctgatcactgcaaaatccaagtgaatcttagaatatttctagcctagtgaaaaatcaactaataaccccaatgatgggctactgtgcttgatgtgttatctttgttagtgcagattaatacagtgtcaggtacatggtgttcagtcagaccacatttcacattctttcctacctcaatcaggaaagatcagaaaccatttgcatttgcatggaacagacaatgacacatgtttacattttttttttaattttttgagttggagtctcactctgttgcccaggctggagtgcagtggtgtgatctcggctcactgcaacctcccaggttcaagtgattctcctgcctcagcctcccgagaagctgggattacaggtgcccaccaccacacccagctaatttttgtaatttttagtagagacggggttttgccatgttggctaggatggtctcaaactcctgaccccaggtgatcctcccaccttgggctctcaaagtactgggattacaggcatgagccacctgttacatagtcctgtggctatgttaactcctactctttatcataatataatcagatgagatctaggctgtctggacacttggcacaatatcatgttatcaggcaggatgaacaagaagtggctagtataatggaggccttggtaagacacattcaacacagaatatgagagttaaagttggtaatgattgaggcaacttctagtaaagtttttaggggtccagcttgaccagggacatataaggaaatcttttccaaaagacaaattgctacattttgcctgttctatcaaaattcttgtgggactctttggcttatggtggcaacatattgcacatttaggcatgtgctgcagcccatatactggatggcatgaaaggctccctgctttgagtggagcccagagcaggaaagggtctgcaggaaggaagggctgtgatatgagctgccctgatgcttgggtcatgtgattggtaaactccacggtgctggaggtgttagtgagaggaaaatatgcaatataatgtgtatggtgtgtgtgtatgtgtgtgagagagagagtgtgtgtatgtatgtgtgtgggtgagcatcatagcaccaatgtctggggttgtgaagaaagatcatgccatctgtaacagagacttatacacctattaaaacagagtgcctaatgtgttactggggccccatagagacagaattcttgactataggatatcaagtaacaatgtatctggaagtgtccattatgagccaggttccgtcagacccacagagtcatcaagtcaggtatgtccagcagaagtccatcgtgagatcagattgtgcatctggggtcaagcctaaacaagaccagaagtcctaaggtaactgcatgagcaggtggtgcagatccccatgtcacccaccactgcagcaccagcacccctccttcagatcatgccccagacagtatgtgggtcccacgtgaccagctaaaggaggagaaaaaacctgagcatgtttaatgtaccagtcagcacagggtgtggaggcaagttaaaaatgggcagtggtttcatgacacttgggatgtgggggggacttgaggaactggtaaggaaaatcatatcaatggacaaagctcagagtcatgcacctgttccctatttcatgtggaggacacagtggcttggaatgggaacatatatatactcatgggtggaagcgaatcgtctgaaaagctggtcagggacctggaaggaggactgaaaaattgcagacaagaatgtttggtggagaggaatgtgtgtgaacctataggagtgggcaaaatatgtgaagatttttggctcttgtattcatgaacactagaaagcatcaatcacagaagaggcactgaacaacagagtagacaaaatgactaggccagttgacattaggcagtctctgagctgatgtgactgacacatgaacggagcagccacagtgcagagatagaagccatacatgggctccgtctcacacctcagtactgacgcctgtgcaagtctaacctgtcagcaacaggggaaaaacaccgctcccaatacgacatcttcaaggaggtgatcttcaatcgtgattttccttgtgggaggggatccatgtgcatccgacatatgtggcagcacattcgacattttcttgaaaaatcctgggaattgtagtgccttcagtgcccagattaccctcaatgttgggtcatttcctggcttcagcctcatgcctattaagttgaatgagcacagtcgtacaaattactcaggaaaaccaaccaatgaactaaggctttttgttttgttttgttttgcttttttgatacggagtcttgctctgttgcccaggctggagtgcagtggagtgcagtggcacgatcttggctcactgcaacctctgcttcctgggttcaagtgattcttctgcctcagcctcccgagtagctgggactacaggtgcgttgcaccatgcctggctaatttttgtatttttagtagagacagggtttcaccatattggcccggctgatcttgaactcctgacctcatgatctgcccgcctgggcctcccaaagtgctgggattacaggcaagaaccactgcacctggccaaactatagtatctttaccaaccatatctggaacatttaatcagtagtgtatgcaaaatttttgcctcatattaggcatataatgctaattgctttataaatgttagttgaataattatcagtaagactattggcctggatattagaatttggaaatttaacattttaatgggaattataaaatgccatgtccccattcttgtcttaaaataattttataacttcagtatttcttaatagctttgtgtcaacctatggacatcaagctctgcctagaattaacaatgatgtcctcaggggctgatggaatgtataagggcatgtttgtcctttacttagcatttggagtcccctcttctctagctgatggatttgctgttatattccttgacccctgttctgacttacagttattagtggacactgagattttacagtcagggttgaaaggaacagaaagtagcctaaattaaagaggacttaaaagatatttggtgttctcatggcaatgatggctctctaaaccgttgggaagttgagctggcacctggaaaagtgtcagtaacagggctgtgtgtgtgtgtgtgtgtgtgtgtgcatgtgtttgtaacatgatctctttcctttcttttttctctgtcccattctctttttcattgtgcacatgacttaaagtggttgttctagcccttactaaacttaactttttacttcaaatgtcaagtaccatctatgaagtctgtctggtgtttagttgaaactatcaagaatgagaatgatcttcaaacagccaataaattggctttttctgaatcatctttggacagacagagagagagacctgggcacaaaagttccacggcataaacacagctgtccaggcccagctcttacacactgctttgtgcctggcaggtcctagggaaggaaagtaacatttagttttgatgctaaattggtgttggaaaaggtatatctagttctgctaaacactctactgtgtttccattttcatcctgatgtatttaaatttaagaaagcttttctgctttagatgatactcaaggaacattgcaaggattagagttccttattttatttcctaacttttctcatctcattctctacccaaaattgtattaaaaacaagttcccatactacttcagggaaaaccagcatacacatgaaactactgttctttgagatcaacttatctcagacagaatgattgaccagctccaaggaacatggaagtccatttcttgtgaaaattccgaagactacatgaaggagctgggtgagctatgtttacttgcatatcatatccagtaaaaatgggcattttgatagcacagaacttgctctgtataaaataatattaatcttgaactccctaatttttcacataggaaaaaataaatattgattgagtaccaggatatagttctgtgcaaaactatgttggagttgacaataatctctcatataagttaccattaatttacataaactaactaaacagcaagtgattttaataaatgttttaaaacaaaaaaatacaactattttttaaaatgattattttgtaaatgtttgctctaagctttaggggatcttcagaataaagttcagagtagattttgtttttcagcctctgctggctactggctttccttagtgtgtgccagcaatgctccaaattttgctcccattttcacactgctctctcttcttctgtagtatagcatccctcttcctccctcttaaaaggaaatttatgattatgtttgagatctgctctgataatccaggatactctccccatctcaagatccttaaattaaccacatctgtacagtctcctaacatgtaaaggtaacattcacaggttccagggattaagacgtgaatatctttaggaaccattatccaatctgtcacatcctgtgattgtgttttatgatatgaattccatgaactacattatagtattttcccaatatatcttcccttagaattttaacttaggtattgcagtatatgtaatgctatttctactgaaaatactcctacatgtgctgcacagagctgtgtatacaaggatgttcactgcataattatttgtaataaccaaaatggaaacaaatgaattgttcatcaacagggagacagacaaaataaattttggtctatacacactgtggaatattatgtactatgaaaaagtatatatctatatagagtgacatggaaaattttcaagacatagataaggggaaaacttccaagacaagataaggggaaaaagcaagttgaaaaacagtagatataacatattttttaaaatcctataaataatggtgatgcttgcacaacattgtgatgttctcaataccactgaattgtaacttcaaatggtaaatatatgttataaatattttaccacaataaaaacatacatcattgaggaaacaaacccatatatatatacatgtaagaatacaagtgaagagctaaatatctggcaaaatccataccaaagtattttgtttgtatgtgagtggatataattttaaaatagggagatagttgatagctttaatcagattttcaaaggggttcaaaaatcagtaagattaatagctactggactagtgaaaaagaatactcactaaacaacaactagagacagattttttttctgcaaagatagtctattttaacatgtcatggtggagctgctggcttgggatatgtgaagtcatgcaccattaaatctgttcaattcgcaaacctcctagttagcaaagaattatacagataatgttgagtttttggagtcaacaacagatttaagtattgtattgtaatgtaatgtatttgtaattctttatgcaaaaagataatactccttttatctggtttccaggtataggaagagccagcaggaaactgggccgtttggcaaaacccactgtgaccatcagtacagatggagatgtcatcacaataaaaaccaaaagcatctttaaaaataatgagatctcctttaagctgggagaagagtttgaggaaatcacgccaggtggccacaaaacaaaggtgaggcctacgacagtctttcagacacatttcaaaagaatgttagtcagatatcatcctcggtaagtaagcaattctagcaaacatatctaaagtccttaagaggaacttttgtctaaaacataggtctaaggatgtcaatgtgaagatacaaatcttctgggatgcttgtgaaaaatgcctcctgctcactgccagaggccctgaaaattgcatttttaatgaatctgatgcagacgcttagcagaccacattttgagaatcatttccctagattactgtttagtcctctcagaaacaaaagttttccctatccattttgtagcagttttctacacatagaattacagtgaataaacctcgtattagctggcagaggtaaggttatgccaccgtgacaatgaaccacaagcctggagtgagttaacacaatggggatttatttctaacttatagtacatacgtagtgttgggtggcattggggaagtttgtgtgtgtgtagtggagtaaacaggaaatctgctccccctaatctctcagggatccatgccaaaagaggttcaactaccacctgtggacatcctggtcttctccaacaccaggataaagagacatgggctttttattgtctcaccctgaaagtgccacacagagttttcattcatatctcaagggcacatatctcaggaatatattatttatttataatatgtaatttacttctacacgtattgtttacagtctttttccctacaccagaatgtaagagctcatccaaaacaggatttcctgtctgtttcacagaaccccgtgcttggtcatgacagttgttcaataaatatttattatttgaatgaatgaactcaatagaggattgttaaactatatggaggataatatcctgataaaaggaactatcatgccactgtaatagttactaaatgaatatgagagtttaaattcttgtaccatataaaatggaagaaaatttttgacttaaatgcttaatatggatttctatgctaaattcttaaaaatctactagaataaaaaagctaggttgggtgcggtagctcatgcctgtaatcccagcactttgggaggccaaaacaggaggattgcttgatgccaggagtctacgaccagcctgaacaacatagcaggatcccgcctctacaaaaaacacaaagattagccactgtggtggtgcgtgcctatagttccagctactcaggaggctaaggtgggaggattgctggagcacaggaggttgaagctacagtgagccatgattgcaccactgcattccagcctggatgacacagtgataccctatctccaaaaacaacaacaacaacaaaaaaaactggaaaatattattgggataagaagaggaaagaggccttctttcttttaagtaagctcatataatgggagtttgaattagtttcacatgtattattattattattattctttattgagacagggtctctgttgcccaggctggagtgcggtggtacaatcttggctcattgtagcctcaaccacccaggctcaggtgattctcccacctcaacttcccaagtagctgggactataggcatgtgccacaacacctggctaatttattattttttatggagatgggggtctcactgtgctgtccaggctggagtttcacacttattttgaaagttaaaatgtatttgtaattctttatgcaaaaagataatactctgcttacacagtcaaagataaaaagaacatttcatggccgggtgtggtggctcatgcctgtaatcccagtgctttgggaggccaatgtgggcagatcacaaggtcaggagattcaagaccatcctggccaacatggtgaaaccccgtctttactaaaaatacaaaaattagctgggcgtggtggtatgtgcctgtaatcccagctatttgggaggctgaggcaggagaattgcttgaaccagagagtcggaggttgcagtgagccaagatcgcaccattgcactccagcctgggtgacaagagcaaaactctgtctcaaaaaaaaagaaaaagaaagaacattttacttattcttcaagataatattacagttttactcttgtaaaaccttttttcttcagcagaattaggcaacaattttactgctgacaaagtcttaaaataaatagagttgtcaataccattctaaaactacctgagagtattacaacagctaaaaagaatttgctgcctgataaaattttaatgttgaaatatgacaagctgatctgaatttagttttttctgtttttcagagtaaagtaaccttagataaggagtccctgattcaagttcaggactgggatggcaaagaaaccaccataacgagaaagctggtggatgggaaaatggtggtggtgagttagcccatcctcgctttcttcccaccttctgcaacgactaatataaaatcacaacttgttctcaaacaatgaaaatgaatgccattttccttgttctcatagtttaaagaatgagaaaaaaattatgagataaatgtataatcgtaagcattatataaaatgtgtgtggattgaggaactaaaaaactaaagagaatgaaaatattatgcagcctaatcctttgactcacaggtaaaacaaagcaagcatgtatttgtgcaatgaagattttagcaggggttgagggttgttgccaatcctctactccactccaggattaacttctcactgtttttccatctcaacaccaaacaaaaacatgaaaaggaattctagaccagggataagaagctgaagtggtgtttttttggtgtatgaatgagttaatacatgtcactatcatgcccctatgttttcatatattaatattatttcccaatttccacaataatcctgtaaggtaaagcttattatcccatttaacagtgaggaaactgaaattcagacattgacttacctaaggatatgcagctagaaaaatgtgatggtactgggaggagcatcaggttgttttcattgaacactctatattttatagaatccatcctgctccctttcagatggtttcccaggtcaccttccccacttctccagagtagaagaatgtgtgttcatgattttccttctcccaaacccccacctataccaaaatgagtaaaaaggtaactttctacataatataaaatagttctaagggaatatgcaagattcgtgtgtaggttacaaaaatctaaccttgtttcttaatacagtgattttttttctttctacaatgaagagtacattttattccttataaattcacaaggggaagactaaggatgattgattttattgctgtttataatgacattagccaataaacagaaagcttttatagttcattaggaagaatgctacactcagaatcaaaggatgtggatttccacccctgccattcagtacttacgtgactttggacaattcatttaatctcttcaagattcagattccttgccttcaagatgtagaaagtgtctttgccaaaggttttctgagagaattaagtatcatcatgtgtatattagtgccctgaaaaccataaaatactacatcaatgtaagctagtattatcatttagaaagtgtagagtatgtaaaatagcaaaatgcatcaatgttggcatttaaaatatttaaataaaaacttaaattccaaattgtatgccttgctttatacatatataaacattatatatacccgaaatataccacatgtatgtgattcgccatacataggttatatagaacatggcaaaaccagctaacagataggtcctatctatagtctatatagatctatctatctatctatctatcatctatctatctatctatctatctatttttttttttttttgagacggagtcttactctgtcatccaggctggagtgcagtggtgtgatcttggctcactgcaacatccacctcccaggttcaagtgattctcctgcctcagccttctgagtagctgggactataggcgcatgccatcatccccggctaatttttgtatttttagtagagacggggtttcaccgtgttggccaggctggtcttgaactcctgacctcaggtgatgtgcccaccttggccttccaaagtgctgggattacaggtgtgagccaccgcgcccggcctctctttcaatatttttaaggaatgtatgtgtggatagtacttagtttgcacttttctaaatgttaatttcactaactatactgaaatacctcatatttcttttgtcttgtaggaaagtactgtgaacagtgttatctgtacacgaacatacgagaaagtatcatcaaactcagtctcaaactcttaaggctttctcaagctgtcatccaaactactgaggttgtttaaataaaactccaaagtaaaatattacgactattaatatgagagagcctttctttgcacaagcatcaataattttgcttgccaaattgcacatgcctgtatcatgtagtactttggcattcgcggccatgagaatccaggatgatatatcctgttcaatgcaaggctgggatattttcagagaggcacttcatgttgatttttttcttatgatgcattttatgtccaccctctaaattcaacataatctgcactttattgggaaaataatattttttaataaatagaatacagcgcaccttgcaggtacacctcagttatatatgaaaagataagaaaccatgtctagaactaaggcagtaattgacatcctaatgtaatactaaactgttatgacagagaactccatatccactaccaacatcactgaaagccactgcaaagaatattctgttttattagcacaaaacctcatgcactctcaggcttaggagggattttagaaactgtgtggactgaacactttattttgtggttgggggaacaggcccgagacagttaattgtacactttactatcactcagatggtttcaggaagaattagaaccagaatccatgttgcccagttattaaccttacaaccataacaaagtgaacttagattggaacagttaggtagaaagaggtttatggtgtacaattatgaaccaagtgtaatactacattatactaatgaataaacaagcttccatttgtcttaaaatgtgtagcaggatgccacagctgagtccagatgaggatatagagttttaccgtttgaacctgaggcctgtcattgcctatttgtctgaattgatatatgggggatctcagtcgtctggtagatgtggaagaagtgcttgtttattttttggtgtactgaaatgacgaagaggacaatggaaggcacacaaagatatctgtaccctcagctacttggactggacagagagaggattcgaggcagacgctgaaagagcagttttcctgaggccctgtgcatggctgtggatgtgagcagctctactgcaggcccaagtaacagcttgctgcaaagacagaggagaagcagtccccctattggaaaggagcccagcactgctctgacacctccacagtcagtagctatgggaactttgaaaaacggtgctcctggctttggcattagggtgtcttgcctactgtggtcatgaagatactctcataggcaataagaaccaatgcaggaagccttgtgctgaagggatagttagcagataccaggagaacccaggaaagacatccctgatgactctcaggaacacctgggggccaggggctgggagaaggatggactttcaagggctagagtttttcatgaacaggagcatgacattggatgtaggtgttaatatgatttcatttgtcaacaatctgataaaatctagggatgtttgagtactcaactgaaaaaacaacccacaaaaatacaacaacagcaactgcacatttccaggagagatgagcagcatgcctcctgtcttctcatttcctttatgcagttgagaatcattaaagtagaaaatcatttactgtggttgatcgaagtgcatatctctcagggatggttgggaaactgatctaaataaaccaaatcaaacaagacataccacagctcctgagtgatgttgtaattcaggatttgctgcacatctgctgtgcaccagacactgcatgagagccggggatagaaggagaatgaagtcatgcttgctgatcttgatcaactccatagagaagtgatatattggaaagacatcacatgggtgtactaatctccaggaatgtataagcaacagattataaaacaaatgtttcttttcttttttctttctttttttttagatggaatctcgctctgttgtccaggttggagtgcagtggtgcaatcttgtctcactgcaacctctgcctcccaggttcaagcgattctcctgcttcagcctccctagtagctgggattacaggtacacaccactatgcccagctatttttgtatttttagtagagacaggatttcgccatgttggccaggctggtctggaactcctgacctcaactgatccatccacctcggcctcccaaagtgctgggattataggtgtgagccacacgccccgccataatacaaatgtttctacttggaaagaaagatttaaaaccactttcttggtgaataattgccttgcccaggatggaagacaactagcaatagggcggcagacatatcagcatgaatggactcctatcactccttttcatgacatctctctttctgggccacagcctcagtgcagtttgcattaattcagctcaagtcagtaatcatcagtcaagatatttaaggaatatggagttattcctagtgaggcataacctgttctttttaagctgggaaaagtctggggttttaaacaaaaccatattatttgattcagacgtagccaaaatattgctagaacagaaatttaaaaaacaccaactaaagaaagagaaggcggagacggtcttcgccgagagtcgtcggggtttcctgcttcaacagtgcttggacggaacccagcgctcttcccctagcccggccggccgcccatagccagccgtccgtcacctcttcaccgccccctcagaccgccccaaggtccccccgccgccgctccagcgccgccgctgcagccgcctctctttagtcgccgccatggcgaccccgtccacctcgcaggagcgccaggactacaaccaggactcagaggccgccatcaaccgccacatcaacctggagctctgcgcctcctacttttacctgtccatgtcttatactttgaccgcgatgatgtggctttgaagaactttgccaaatactttctttaccaatctcatgaggagagggaacatgctgagaaactgatgaagctgcagaaccaacgaggtggccgaatcttccttcaggatatcaagaaaccagactgtgatgactgggagagcgggctgaatgcgatggagtgtgcattatatttggaaaaaaatgtgaatcagtcactactggaactgcacaaactggccactgacaaaaatgacccccatttgtgtgacttcattgagacacattacctgaatgagcaggtgaaagccatcaaagaattgggtgaccacgtgaccaacttgcgcaagatgggagcgcccgaatctggctcggcagaatatctcttcgacaagcacaccctgggagacagtgataatgaaagctaagtctcaggctaatttccccatagccgtggggtgccttccttggtcaccaaggcagtgcgtgcacgttagggtttcctttaccttttctataagttgtaccaaaacatccacttaagttctttgatttgtaccattccttcaaataaagaaatttggtaccaaaataattaataaataaaaaattaaaaaaaagaaagaggaggcgtttaggtttatttaacagtagaattaatgttgaatatttcctgtctataagtttgggaaaatcatgttttatttgaataagtcaattgacaacctgagatggaaaatgaaataataacaatgataacagctgttattgagtcttgctaagtgtcaggcactatgtttaaactttctatgcataacttcattttctctttgagattaaactgagactcagataggctaaatggtttccttaaagttcctcagctaatcaataccaaggccagacttcaaaataggtcttaatttctggagaagcatgccagaatgcatctccagaaatcaagaaaataattattagagtttcttttagagtctttttatgtaataatgaatatgataaataaatgcattattaaaactactaacctgaacttgtaaagcctgagaaatccaccctacatgaactcttatgccctgaactgatcagaaagattactttttggagctgtagatttaagaagcagaaaacagctgggtgcagtggctcatgcctgtaatcccagcactttgggaggccgaggtgggcagatcattggaggtcaggagtttgacactagcctgaccaacatggtgaaattccatgtctgctgaaaatacaaaaattagccaggcatggtggcacatgcctgtaatcccaagtacttgggaggctgaggcaggagaattgcttgaacctgggaggcggaggatacagtgagccgaaattgcaccattgcactccagcctgggtgacaacagcaaaactctgtctcacatgaaaaaaaaaaaaaaaaagaagaagaagaagaaacagaagcagaaaacaaccaaatgttgattaattgtgttgtggtggcacctctcaccatggtatcccatctacacaacagttaccacagagctctttaaggacactcatgctcctctcacttatttctcatactttagtgaaggaagtatcttctgggcctagcatatgatagactattcccaaattctaatttccttaagattttggattccttctctatgtcagaccaaggaaattctagaatctcagtctcattaaatatcagtctgctgttgagcccaagtttcaactaaccaagtcaattaaccaagtaaattgttagggataaattgttagaataaattgctagctgcacaagctaacaattaaatgaagagtctctggtaaatgaagtcatatgaataaagttggactaatgaagtgttgtagtttgttctccttggtttaatatccttagaatccactccaatatgtattacccagatctctgtcaatataaacgaacatctttaaattcttttagagtataacgtttcctccagggtcagaccttacccttgtcctcctagaacatggggagatcttatctaattttggttgtagtggcaaccatgtatggttgcagtgagtcctagggagaaaggcaccttcttgcaaggcaactgctccagataaggccatcaagcaaaaagagttagtcttttcagacactgaaaggcagtttgcttctactgtcaagagaggctcagagtgattctagagctccaaattttcagctgtgatcacccagatgtccccattccaagtgtcattatttcactctttcccaatgactgccctagttttcaagtgagaaacttagtgaagacgtgaattcaacttacattgtaactctaccccacacaactaaattttgcacctcattgtcagcaaagtcagctctgccattataaaaatattaattttaggtccttgcacatgctttctagttctctgaacatgacttaaactgagagtataatgatatgagtttgtcattttctttggataagaactccacagcattcaaaagaagtcattccattccattcttgccttcatggacaagtgctacagccatcaggatacacacttcatcacaatcaatacacataataattaatctaactgtgatgccattaccacttcattttctattagcaaggagctcaaacctactttgaagagcaaggatgcaaccaacttaaaccacaaatctcatctgctatggtttgaaagtttgtacccactaacactcatgttaaaacttaatccccaatgtggcagtattgagaggtgggacatttaagaggagattaggtcatgagggttctgccctcaagaatacattagtccattcatggatcaatgaattaatgagtcagtgaattatggtggctttgtaagaagagtatgagagacctgagttagcatgctcagtcccctcacaatatgatgccctgcactgcctcagaactctgcagagagtacccaccagcaagaaggctcttgccatatgtgatcccataatcctggacttcccagcctccataactgtaagaaccacagaagaccctgaatagccaaagcaatcttgagcaaaaagaaaaggacaaagctagagtcatcacactatttgacttcaaaatatgctgcaaggttatagtaactcaaaaacagacacataaaccaatggaacagaatggagaacccagaaataaatccatgtatttatagccaattgacttttgataatggcatcaagaatattcagtgggaaaaggatagtattttcaataaatggtgctgagaaaactatatatccatatatagaaataaaaaaaccagacccttttctttcaccaaatacaaaaatcaaatcaaaatggattaaagccttaaatgtaagacctgacactatacaactactagaagaaagtattggagaaatgaattggcctgggcaaaattttttgggtaagaccgtaaaagcacaggcaacaaatacaaaattggacaaatgaaatcacatcaagccaaaaagctgctgcataacaaaggaagcaatcaacagagtgaagagacaatgtacagaataggagaaaatatttgcaaactgttcatccatcaagggattaataaacaacatatctatggaattcaaacagctcaacagcaaaaaagcaaataaactgattaaaaatgggcaaacaatctgaatagacatctctcaaaagaagacatccaaatgggaaacaggcacatgcaaaaatactctgcatcactagttattatggaatgcaaatcaaaaccacaaagagataacattttaccccagttaaaatgtatgttatcaaaaagacaaaaaaataacaggtgctggtgaagatgtagagaaaggggaatgctaatgcactgctggtgggaatggaaattagtacagcaacagtgaaaaataatatggactttcctaaaaattagatctaaaaatagatctactatatatttcagcaatctcactgctggtatatattcaataaaaaagaagtcagtatatcaaaaagatatctggatgcccatgtttattgcagcactattcaaaatagtcaagatatggaatcagcctaagtgtccatcaatggatgaatggataaagaaaatgtggtgtagatgcacattggaatactattcagccacataaaaaaataaaatctggtcatttgcagcaacatggatggaactggaggtcattatgtaatgacctgtgcctggaaataagccaggcacagaaagacaaatatcacatgttctcaaatgtgggagataaaaacgtttatctcatggaggtggagagtagaacaatagttactagaggccgagaagcgggtgggggtgatgaagagaggttggtcaatgggtataaaaatacagttagacagaagaaataacttctagtgtttgatagcacagtagagtgacaatagttaacaatcatttattgtatatttcaaaatagctggaaaagaagattttgaatgttctcaacacaaagacatggtaagtatttgaggtgacagatatcctaaataccttgatttgatcattgcacattatatatatgcatggatcaaaatatcacatgtaccccataaatacgtacagttatgtatcaattaaaaaaaaactgaaaacaaaaattccttttccttataaattacccagtttcaggtgttttgttataagcaacagagaatgcactcagacattatctttaaaaacttactcctagtactaatttctttatcgctctgggttcagtcaggacttagaaaccatactggttatattatgtaataatagggagaatttaatatgaagatttgttaacaggtataaaaagcttaaatggcataaaaagaacattaagatttcacacaagtagcaacttcagaaagcaggtaacacttaagaatgtgtgtgtgtgtgtgtgtgtgtggagacggggtctctctatattgcccaggctgttcttgatcacctggctttcaaatgatcttcccacctcagcctcccaaagtgctgggattacagacacaagccactgcgaccagtaagagctgaaatttaggcctcagaggaggcactgctcctatggggccccatcgggttgggtctgagatgtatgagaagagggagaaggttccagatggtttgtgctggtttctctgaggcagtgccatgaggttggctcagagacaataaaaaattgtgaactgaaattaattgcagcaactgtaacctactgctgctggcagcctaaagaaagattgttgaggtcatgctgatgggagcagaaaatatgacacttgagtaaagctatgaaggcagagagaaaatgagcctggcatataactcaggggagggcattctaggcagagggaagagactgtataaaggccctaaggtaggagcatgctgtgattgaagacaagaaagatattaagtgtggcaggagtagacagagcaagggagagagtagcatgagatgaatgcagagagataatagtagagacagattatggtgtgcctcaaaggccattgcaagaactttggcttttactctgagaaaaatgggagccactggaaagtatttaggggacgagcgacataatctgatgtacagtttaagggaatcatggctgttgggttcaaaaactcagaagtaagtcaattaggaagtcttaacagtattctaggcatgtgctgatggtgccttgcagtggggatgacagtggagagaatgagaagtagtaagactttctaagttagagctacagaatgtattgatggattggatttgaaagcaggagagagttaagagtgatttaaaagtttttggtcttagatcctagaaagctgcatgtcattaaagggcattatatctaaactatgccaaaacgattgcctgattttataagtacactgaaaaactaaacaacatgagacagaacctattgaactcatctttaaaaagtggctaagttgctaacctgtttgcctagaaaacattagagacgtccctttctagccaagatggagtaaaaggggccagatttatccttccacctgaaacaacaaaaaatggacaaattatatgaaaattgttttcaagacaaaggatatcacccaaaaagaacagtgattccagagagaagaaaaatgaatgaaatcagctcattgccccagcctcttagtatacctttaggagtaccagcaccagctcagccacctgctctctgctctgaagtctgagtcccagctttataggacccctcctccaagcttttgcattctaaaactccgtccctttcttttgctcctgcagccatatgggtagtagttgagtcctgctattactccgtgttacctctgtgttatttttttagttctccaataccagcttcaacacttccttgttttaaaatctctgatgtgtgatttttacttttctgactggtataaaatgcttatgatgtgtcaaacgatgtactaagtcacttacgccatcttaaaaatttttagtaaaacacaatttggtagataaaaaccatgcttatttcataattaagaaatttatgtctcagagaagttaaataatgatgcttatagtacttccaggattgcagtctatttcactgtaaaggcttcatctcactgtaagcgctccctatcactaaagaacactgtagctggacaaagggctttggaaaaaaaaaagtgaggcttttgacattacttctaggattatggctaaagccaggattatttctatttgttttaaaaatttcatttgaatgactttgtaactagaaagcaactcttccatataaaatatatgaagaatatatattttcttccatataaaactctttccatataaaatataagacacaaaaatgcattccaaagctaagaactggtagcaatctcctccatgattggatgatctactctattttggtaacttcctaatcatttacctctggtagatattgaaggctggggaagggataaaagataagctggcctcaagaattctgtaaatattattccaatgcctacaatgaagtattacga

SEQ ID NO: 776 - DNA, 507 bp, Homo sapiens
atgattgaccagctccaaggaacatggaagtccatttcttgtgaaaattccgaagactacatgaaggagctgggtataggaagagccagcaggaaactgggccgtttggcaaaacccactgtgaccatcagtacagatggagatgtcatcacaataaaaaccaaaagcatctttaaaaataatgagatctcctttaagctgggagaagagtttgaggaaatcacgccaggtggccacaaaacaaagagtaaagtaaccttagataaggagtccctgattcaagttcaggactgggatggcaaagaaaccaccataacgagaaagctggtggatgggaaaatggtggtggaaagtactgtgaacagtgttatctgtacacgaacatacgagaaagtatcatcaaactcagtctcaaactcttaaggctttctcaagctgtcatccaaactactgaggttgtttaaataaaactccaaagtaaaatattacgactattaatatgagaga

SEQ ID NO: 777 - protein, 140 aa, Homo sapiens
MIDQLQGTWKSISCENSEDYMKELGIGRASRKLGRLAKPTVTISTDGDVITIKTKSIFKNNEISFKLGEEFEEITPGGHKTKSKVTLDKESLIQVQDWDGKETTITRKLVDGKMVVESTVNSVICTRTYEKVSSNSVSNS

SEQ ID NO: 778 - DNA, 50605 bp, Mus musculus
  misc_feature (1)...(50605): n = A,T,C or G
atctagctgcctggaggtcagtattctgctagcagccttcaaatgaagatgtagaactctcagctctacctgcaccatgtctgcctggatgctgccatgctcccaccttgatgataatggactgaacctctgaacctgtaagccagccccaattaaatgttatccttataagagttgtcttggtcatggtgtctgttcacagcagtaaaatcctaactaagattcccatctaatttaattagggtggcttatgtgagcataggttgtgtgtgggggggaggttacaagagcatttaacaatggctatgcctctgaagaaaatgattctcccttccacagcaaccatgagtcatcaatagctcctcaagagggggtaggatttttgagtttcccttcatccaagatggaatattgacatgttccatcttgtgaaggtcttgtgacagtaaccaaaagccactataatttcatgggtgcaatggtcaggtcacgtcaaagaagacagcaactagccagtaatcttctgtatcctctggctcttacaatcctattcctcttctgaaatcttcagaaggtggagacggtgacagtgacgtctcatttagaactcagcactcagtggtcacatattctcagaactttgtctagatacaagactctgcattaaccactgcctactgaaaagagaagctaataccaggtccatttacaaaaacaacattaacaagttctctgctccctgcagattatgagctcccagccatgagatttttgatcatgtttatggtactaggcatggatcccttcttgtggaacagacctcaaatccagtcagacagtaactggttactcctatgccagggttccaacaggcatatcttgccttgaaggttttgcaggattcacagctgggtaaaactgctgattttttgccccccaggaatctgcataatatgtcctagtattacgaacactgtccaatagggaggcgaccgctagcttagttccagcttaatttctctttgcaagcaaaatattcggtatcttcagcaccaaagttttactattcagttccagtgggttacaaagaacagtggaaatagcatgtactcactgggaccttagaatcttcagattcattcttttttttttttttttttcagtcagggtttctctatgaatctattggccaggctgtcttggaactgtctatgtaaaccagactgacctcaaacccagagctatatctccttctgccttctgatagcagggatgacagatgggcatcaccatgcttaaatagacttttaaaaagatttacttttattttatgtgtattccatgattttgccacatttgtccaggtgtggttggaagccagaagaaggtgtccgatttggagctgaacttacaggtattataagctgcttgacgtaggtaccacaaaccaaacttagtttttctgtaagagcagtatgtactcttaaatgctgagctatctttaaatatatactattctctttctctctctctctctctctctgcttttcttctttctctttcttttttctcttctttcttctctcttctctcttctcttctcttctcttctcttctcttctcttctcttctcttctcttttttctttttttcttcttgagacagagtctcactaaatagccccggctgccctggatctcactgtgtagatcaggctgcctgtgacttcacagagatccacctgcctctgcctctgaagtgctgtgatataatgtatataccaccacacctggctaaagattccttatgatgatggtgatggttgctgctgctgctgctgctgatttttataataataatgataataataataataattagagttacgcttgtgcctgtgaatatctgcagaagcaagaagaggcttgttgaattcccctggagctggagttacaggctgttgtgagccacctaacataagtgctcttaattactgatccatctctccagccccagaatctttagtcttcgggtcacaattgctgggtcaaagtgtagtattttctggaatagattttgattcactgctctttacagtgctgtgcaaatttacatcttcacagaactgaatgggagtccttgccctgctcactgtacctgctgtcatcatggtgggacctagacttggccatcagatatccaagggattgctcttacttttacattacattgtatttaccgacagacatgagtttgccttccttttcaggttttctggctacatttttcattttatggcaaatattatagggttttattctgtttttgtctctatcagtaatattccagattatgttgtctactgacaccttttatgcattttaaagcacatattaattatatgcagaatggattgcactagatgttcatcatgtatatagagtatttgacatagtcatcctttatcatcctctcttgcctgccctcctcctgtttctgatctcctccctccctccctccctccctccctccctcccttcttcctgcctctttctcttacttccttccttctttgtgaaccaatgaatttagttgggttaagcagattatcatggacaacttgcagttttctgaaaaacatgtatttccctcccccagcaatgattaactgcctacggatcctccaaaaggagagaactaactcccatagacatgctgtgacgtgctacctgctcacatttgagggttttgatgttctattgctgagaaaggaagggccttgaatatgctagggaagtcctttaccacagagctgcaccgtaccacctaaatttgctttcaatatttattgtgtaaaagaggacttcatatactaaggcatgtgtgtggatatcaaaaaacaacttccaggagtctgtactctccctctaccatgtggatcctggaactaaactcagaccatcagtgtctttatataccgctctccctccagccctggttgaaaccctcatcttcctgcttccatctccctactcatgtgactacaggtgtgtgttaccacacagggcaaattacagtgtgtgtgtgtgtgtgtgtgtgtgtgtgagagagagagagagagagagagagagagagagtgagagtgggagagagagtgagagtgggagagcgagagtgagagagagtgtttgatgatggagagacagtttgaagggcagacatacccaccacagtgtgcactgtgccagaggacaaggctgtggaatcagttctctccttccttgatgtggtgcagtgttttggatgtgaaatgtccacattaagagacagttctaggaaaagacttttgatgttttatagtctgcccttcccaccccagtgttctgtcctggtttgtttggtgatttttgtcaacttgccacaagcttgagtcatttgggaaggactcttaattgagaaaatgctttcataagattagcctgtatgcaagtctgctgggcattcttcttgattaatgattgatatgggagggcccagcccattaggggcagtgccacctttgagcaggtggtcctgggttgtgtaagaaagcaggctgaggaagccagtaagcagagtgccccgtgacctttgcttcttttcctgcttactgtgatgttggaatgtgcatggaactaatgttggagtaatccttttcctcctcaaattgcttttcctcacttttccccctctagaaaccacagcaaaggatatctaactaacacaaaaattggtgccaggagtgaaatgttgctgacaaacctgagcatgtgttttgaggatgtttgaactttggacctttgcgctagaaaagccatggcgtgctcagagcttaataagctgtggttgtgtgaacttggaagataatgctgagagtaatcttgccgctggaggcccggctggtgaagtttaaagagaagcaaggccattatcagggccatttgtttgttattttgaattaagaatagtagttctagtcactgggaaaggaaaatttggctgtgattaacaagagaccaaaaccgtgaaaacgaaactttgctttcctaggtcagctgatactggccatgtaggactaaggagtcagctgcaattaaagagatcagcatcactttggcaaaaacctcggagaagtgtttcctcggggccagcacacaggagctgggatacagagggggccaaagttgcttctcattctggcaaccaaacttggtaatgtgtaagagctacccaagtggtgctggttttgaaggcctgaaaggagtcatgcagaaaagctgaggttttgacactgtggcaggatcctgaagagagtctagaagaggacgttagtgaaggtgcagcctcagtggcagtaaaagcctcagtattgaccggatcatggagcagagttgaggtgtggcactgtgaagcaaggtcagagtccccaaacagagcccaggagaagctagtgataaatgtgcatcccatttgcagtagagacagcagacttttggagaggtcagtataatgtgacggccatcagagtggagcaagcctgagcctatgagacaaactgtgtgtacggtatgtagcagacctggagacatggaactccctaagccctttggaggccagaggatcctgagtgggttccagaagtttctcacggagcttttatactgttggactttggctttgtttaggttcgattgtgactgtgccctggtcatcccctcttggattaggaactcagttaacttattttgattttacaggaacctagttatgaacctttagatattttagagaaacgttggagttttagaaatattggatttttagaaagatattgaacatttcaaaaagagtccatatgtttagtgtctgactttttaaagactgtggtgattttgaagttaggatgttttatatatgatattaataccaatatatgagatcctggggataggcaagaaagggaaggatactgttaatagtgttgtattggtgtgtaaagttaacaaggggttaatggtcctgtttttttattttatttttcagtgtgatataagctagagtcacttgggatggaccctcaattgagaaaatgcctccataaaattggcctgtaggaaaaatctgttaggcattttcttgattaatgattgatgtaggaggatccagctactacatgggcagtgcctcctctgggatggtggtccttgattttacatccaagtaggctaagcaaaccatgatgaggaagccaataagcagggctcctgctttgagttcctttgttgatggactgtagtgtagctttgtaaactgaaataaacttttccaagtcaatttttgtcatggtgttttatcactgcaatagaaaccctaatttaaatactatgagtagaaaaaatgtgatctctctgcccctgacttccaggtgagccctagacaactgttgttgtgtctaacctatctgaatatctaactgtattctcttctaagttgcttgtgctcctaagatttcctcacagtaggaggaaagtaactacacattccagggatctggagcaggacaagcttgcatcatcggtggcaagctgccgagcgatcttcctggtcgagctgttggttatttgtctcatagtctgatagtcttagcccacattggtgtagaactcactaatagtcaaggaaatcatctggcccagcaataagtaagtaagtaaataaataaaaacagatattgtgatggtttgtatatgctcggcccagggggtggccctactagaaggtgtggccctggtggagtaggtgtgttactgtgggtgtaggctttaagacccttatcctagctacctagaagccagtattctgctagcagccttcagatgaagatgtagcactcttagctccgcctgcaccatgcctgctgggacgctgccatgcttccgccttgatgataatgggctaatcctctgaacctataagccagtcccaattaaatgctgtccttataagagctgctttggtcatggtatctgttcacagcagcaaaaccctaactaagatagatatacacatataaaagcatgaaactagatacttacctttcacactgcataaaaatccactctgaacagatcaaagacattaatgcaagatccaagactttgaaactgttagaagaaaagtaaagcaaaagatatccaaaaaaagcatagacaagggctttctaataggattacagttgcttaggaaataatttcaataactgacaaatgggacctcatgaaattgaaaggctcctatgatgcaaaggaaatacttaataaagaacatcctggattaatatccagacaatacaataactaaaaaactgaacaagaataactcacaacacacaaactttatatgtcccagtacaggggaacgccagggccaaaaaaatgagaatgggtgggtagggaagtgggggggggtatgggggacttttgggatagcattggaaatgtcattgaggaaaatatgtaataaataaaaaaaaaagaataactcacacttacttactaaatgggctaatcgaagtcagcagtctacaaaaattgtatacagaagagacctgatcaatatgtgagaaatgtaaatcaaaacaaatttgagattctattgtaccaatcagaaggtcagagaactaatcctggcaaggatgtgaatgaaagggaactcatattcatagctgttgtcctgtaaactagtctggcatccatggaaattggtacagaagtttccaataaactataaatcaatcaaagagacatttgcacattactgtttaatacagcactattcatgattgttaaatgatggcaccaagtcacctggatgaagaaactgtggcatgtacatagaatgggatctttttcgccacaaaggattaagttatgattttttttttttttgagacagggtttctttgtgtagccctggctgtcctggaactcactttgaagaccaggctggcctcaaactcagaaatccacctgcctctgcctccggagtgctgggattaaaggcaagcgccaccactgcccggctcaaaggattaagttatattgtttgtaggaaaatacacatacctggagacaatcatattacattaattaagccagtctcaggaagataaatctcatattttctttcatttgtagttcctatggctgttgactagtcttgtgtcaacttgtttcacacactaacagagtcatgtgaaagtaggaaaccttaattgagaaacatgcctcctttaagactcagttagtgattgatgggggcaggcccagcccactgagagtagctccaccgttgggctcgtggtcctgggttctataagaaggcctagtgagcagcaccccttcgtggtctctgcattagctcctgcctccaggatcttccctgtttgagttcttgtcctgttttcctacagtaatgaaaatcctttcctcccaaagttgctttttggtcctggtgtttcactgcagcaatagaaaccctaactaagacactagacatttttttttttaaagatttatttatttatgtaaatacactgtagctgtcttcagacactccagaagagggcgccagatcttgttatggatggttgtgagccaccatgtggttgctgggaattgaactcaggatctttggaagagcagtcagtgctcttaaccgctgagccatctctctagccccaagacactagattttatataatcacataaaatcatgaatgtatacagaacatgaaagagaacattaaagtagaagtgaaattgggaagggtaactaaatgggagatagaagaaatgggtgggaggatataatctgtacctgtaagaaaattaaaaacaagattaaaatttcaaaattgaaaaaggattatctgatatcaaaatgccagaaggacagcaggttgtggggttttttttttgttcttttttttcactttgaaccatagctaagattgtctctggcacagagtgtgtattcaaaagacgattgttaaataaaactacagagatctgaatattgtcttaagcaacagtggttgagaaactttacgtaccagcctgtcctgtggctagacccaagcaacgattgataatggtaggtagcacaacttcacaggtgtcaagttcagacacttttaaactagaaatgtgaatccataaagacttaaaagacttccctgaggcttgtaatccattcacaggagtttaggaagcactaattaatgttttgttaaggctacctttgctttttagcttcagccatcttttcttggtaatggcattttgcacaaagtttagactttgcagagctttaatggcatcagtgtgaatacattaaatttcagatggtgaattttcaataggtaaagacatattttcaccgactggctcaaaataacctgtcattacttactaattctgaaaatactatatgtcttttcttaataggcagattaacattagcaaaaacagcgaattttcctttctggattactgagtcaccttttattagaatattgggcaagtcttcacttactcagccagataggttgtgctgtactgggtatgccccttggacttagtatatttactttttttttttttttttcctgctttctacattcactgtttttaatttaggctcaatgttctcttaccactaatccctgtcttggctttgtgaataaagcacacagactggtttttgcctgtaggtgagatggtatttagagtcttgttcttgttttctaccaagctttactttggacttgttttcattttgggttttaataataagataaccaagagcacgggaacattaagaaactcaagggatggactcttttgttgttcttcttcttctttttttttttttttctttttaagtcaaggtttctgtgaagctttagttagcctaaactgggcttgaacttgaaatggtctgccttcagcctttacctacttagtgctcagattccgccgtggcggtctggtttataaattcacttacgaaatattggagataatagcgtagaggtacagtccggtgtggtgtcttccacatcctttccaaattaaagccctttcaaattctttttaacaacaagaataataacaaagtccctgtaactttaatgtatgagcaacacgtcagaataagattgtagaaacgaagatcaaaaaggagtgtggatggatgtattattttcagattagcctgcgagacttggataacaatttcagaaatactttggaaaataaaacgtacctagagcaactcctcggtaactagtatcgataaaacaagtatgtctttactttgataaatagaaaacagcattaacaaaacttcatgatgaactggagaactctcttaacacaagtctctgacaagagaaaagacaaaattcatttcaatgtcaaatcacttaggccaacccaacaaaagcacttcgcatccctcgctttgctagaaagcggcactgaaaagaaacgaacgaaatccagagaggccagacagtgtcgacgttcatagtaaaaactacaaaaaaacgtccgaagattctgggtaaagacgcacagacgtggatgaagggttacaggttgttttatcagacctggaagacttgctgaagataaactattctgttcgcgtgtctgcacacagaagcagaagcccttcctgccgcgggaaccctgggaattgtagtcgcggagccacgatggctgtaaatttgtttagcactccgtggacggcgagcccttgggtccaattcagtgttctgggtcctcataggtccggtctagctcaccaatgagctactaggtttgagaacatcccgcctctggttgggtgtccttcctcacgttgcttcattttcagccaatgggataataaagccagcagaggtgacagggtcaccgcggagcctgcagctcctccgccgccagcgactcagccctgtggttctttgagtcgggccgtggctcggggtcttcgccgcccgttgtccgccgtggtgggtgcggctctgatgctgcggcaggctccggacgcccggagctctggagggtacgtagccggggccgaggtggggccgaggggccgctgctgcgcgggccggccgctgcgcccgcctcctgccggcatcccgcgggctgcctcggacggctccggacgtgctcttctctcctcttccttctgaccagccagcccgccctacgagtagcgggtgtccatgtcgcggcgttctttctgtaaatctgcgagcctctgcgcgcaggcctccattcaagagaaactcgtgtacacaggtggtgggcatttgtgcacttagctgctcctttggtgatactgtctcctcagcgcttgcagtagaagtttcccactgggttagttctgtgcttgcatggtacttgccagacattttactgtcttgcctttttttttttcccaccctgttacccgctcaaaactgctacctgaagaaactgaggcttggagacggtaattcaattccaaaagagttacagttataattgcaaggagaagccagatcgggtctcggcgtttgatagtggtagttgcttttcaacccggcttaatcattaaggatttaggataagtgtgtgcccgcagcagctcttagcacgtgagggctaaatacttctattaactaagtggtgattcttagctataagaaaaggaatacctttctgacatctgcccagacactgatgtctcgcgtgtctctaactccgtgcttcaagacttcttgcccgttggcatcctcatctggaagctggttggacatctcagattcccagacccacttacacccactgagcttgaacttacttttggcaaggtcccttaggtgatcgcagtgtccttaaagtttgcgaagggttctgtttgtcaacatagagccaaggaagagaaaataagtttgggtcgtgatggtatgcctttaatccctgctttggtagctattggcaggcagatccctcctagtttcaggctcatctcaactacataggtcagccagagctaagtaaggagaagaaaaagtaaaggcatacgtcctatgcactgtgacctctactcagactgagatacagaaaaatgagaacaaagcttttgtcatttgcacgacgtttcccttttcagaaaatgaatgtgtctcttgagagttttaacttagccgtcccaactcttaaagtagacatcaatgttaactgtttcataattgtcttgtaattgacaccaggtgcgggctttggaagtaaaagagcaaattaagacaaaggggatgctgatttactgttgctggctagttagattaaaagaaccttgtgctctttatattcagtttggcaaggtctgtgtaagccccacccccagtttcttccatttgtcgtgaagatcttcccgttagttttttgttgttttttgtttgtttgtttgttttttgtttgttttggaaggaagggtagaattgctgctactcccagttttcccagtttattcatttggttatttgataataaagctgaaacaaactgccagactcacttatcctaattcccaatagttaaagatagtgtttcagagagttttagtttttagtgttttaataataattaaaaaatattttctatgactgttttgactgcatatatgtctgtgcacatgcctggggccagaaggagggcatcagatcccctggaactggaggtagagttgtaagctgctttctgggtgctgggacttgatgcctggtcttctggaaggtcagtcactattcctaactgtccagccatctctagccccactttcagtgctgtgttcagaggcattcatttatacagcagtgtaaagtttcaggctcttgtttgcaccagaaattatttgatgtgcataggtcttgggtcttgccttcagaaacacctactcatttggataggcccaaggaaattgtattgtttgacgctgtcaggtccacgcttcttgacattagtgcttttgatggaaaatgcaactagcaaacagatgaacaagcacacttgtgtttgtgctaatgtggtgttcattacagaaggaaaagggtttccatttgttttgttttaaccttttatttgcttgtggttcattagctactataaatgtgctcaggacagcatttcaggttatttaaaaattattgtctctctttgctgtgtgcatgtgtgttgtgtgtgtgcacacacttgtgtctgtgtctgtatgaatgctgtggaggctggagatcaactttgagtatattcctccatctcttactcagccttcctttttgaggcagggtctttgcggaacctggaggagctaagctggctcaccggtgctctgccttctacctgcctctctagctccagcactgggatcaccagatgtgtaaaaccaagtgcttgcttttgttgttttatactggggcttgggattcaagtgcaggcccttgtgcttgctcagtcagcactacccactcagtcatctccacaacggtcagtctgtgcatgtgtgcacatagggtgcacgtctgtgcatgtgtgtggaggccaaggggcttcctcaggctccctccaggttactcttcgagatggggctgtcagtgagcctccaaggatccacctgggtgtttctctctagctaggaccgcatgcagcactgcatccagcctcacattggtgttggaaatgcaaactcagttttcgttgcatagcaggttctttatcaagagaactatctttccagccctaaaattattgttttagtgtggtacagaataaataaatttttacattagcatacaaagtaatggattccatgatgatatcttcatacatattgtatgttgctctcattaattcctttcctacatttattttgatttctgctaaatttggaatagagaagtgtggagaaaattcctgcagtaatcacatataactagttttccagcctgtgaaggaaaatatttctcttaaacaatttaagttgatagttaatttaagttgatagctaacaaagaatatttagtatataaattgggcttcaagttctatcttaaaaaagattaatttttaattatatgtatttacatatgtgctcatggaggccaaaagagggtatcagataccctgggaatggagttacagatggttgtgagcaacaaacatggaagtttagagctgaacttgggtcctctgcaagagcactttgtgcttttaaccactcgccatctcttcatctccaagttctaccttttagcggtaaccccctgatatcctgtcactccagaagcaggtagagaatattgggtgtctttgtcccagcgtcctgccttgcgcccctccctcctgtttttcttttattgaatgcatttatggcactagggaatgaaattagggtctcatccccaggccagttgctgtcttcctgttttgacaggcgtggtcatgcactcatgcaatctcagcactcagggagctttagcagagtgggaggttagctcgggctgtgcactgagaccttgtatcacaaatcaaagtaaggtaaaataaaaattggttatgtgagctcagcaatctgcagctaaaacattgattatttgaaaaggttcagccacatagtcaaaaaggggtgtctgtaacctgatgccatccagatactaaaataaaatgaacttctgacattgaatagccttgctttgaagttttatgttaaacctgtcatttggagagcaaatccgagaactcctgcctgcttttcttacctcgtttaaaagttgtcattgctgtgccatttgacctacaactctccttgttttggtgttgagtttctgacccttccctaggtagaccccagtgtgagcccttatcagcagggtgtgaggactggaaactttaagatattttgactgcacgtcattctaaaggaaggagaagattatatataacatttaagggatgatctccattgagtagttattgaaggatgacagataaaaacagagtgttacagtgtcaaagcctggacactgtgaaaaagccactgtttgctgtgtttggctttgttgtagtgtgtgtgtatgtgtgtgtgtgtgtgtgtgtgtgtgtgtgtgtgtgagcatgcattcatttactgtatctaggtttatgtacatattggtgcatgtatgccaccatgtgcggagggtggaggtcagagacaagttgtggggttggttctcttgttcctctgtttgggttccagatgtgggacttagttgtcagctttggcagcgagtgcctgtaccatggtctcccagattgcttggttgaggcacagattagagagaagcccttttttattgtttctttctctctctcccttgctttccttccctgtctttggaattgaactcggaaactaagtaaggtgtgctaggcagtgctctgccacttagcttgttccttgaacaaagtcttcattttgagtcagggtctcagtcagtcacccagggagccttgaacttgagctcttcctgcctcagtgtctgaggcagcttgcattgcaggtaggccacagggcttggcaagggtggtctcctttgctcttctcctttgctttaggagatttcacagtttgctgtgcatctctcctcaccccctccccacagaggagtaagaaaaacccaggctgtcagctcaccactttgccttgaggcattttttttttttttttttaggcctagaaaggtcctaggagggaaaagtcctggcagtgttacagtttgaaaaggggagcaaaggttacaagcttgtacgtaaagaccgtgcttattggaaccttagtgttaaaatatgtattgctaaaatgggatttactggagtattgaggatggcatatgtgcttttgcatatataaataacttgattgcttccttcagcttatgttcattttatttttcacaagctttagaattgccagtccttatttttgtgtgtgtgatttagattcatctgcttctttctaaagatattataatgtagttacttaaaggtaccagagctaggcacagagggtgcttgcttgtcatccaagcttttgagaatcagaggcagggggataatacacggacagcatcagcagcgcagtgagtctgaggccagtctgcactgtgtaagtaaacagacaaatggaatccttgtctaccttggcagacgaggactgattttgtcaacctgacttctactctttttttttgttgcagaatttaagaagcttttattcatgtgcatgtcatagaagatgaattcatcctcttctactatgaatgaagaacctgatgctctatcagtagttaaccagctacgggatttagcagcagatccactaaatagaagagccatcgtccaggatcagggatgtttgcctggccttattttatttatggaccatccaaaccctcctgtcgttcactcagctttgcttgtaagttgcttttaatactttgtgttgtggttttaataatgcaaatacgaattttcaaagacctttgataacatggtaaaagactaagacattagatcatacagtctgtattctggcatgtaaaaaacatggaaaccatggcatatatgtagttcttcaacacaaatagcaacatgttgattttgttttttaatgtaaatggtaactataacacatatagttataatatgttctgacccttggtattttcagttaacatggtgatctgttgtttggttggttttcttttttggggggtatttcttttgggggggggggcttgagacagggtttctctgtatagccctggctgtcctggaactcactctgtagcccaggctggcttcaaactcaaaaatccacctgcctctgctgcccaagtgctgggattaaaggtgtgcgccaccactgcccggcttgtttggttttctttttgacatgggatgtattgttgtgttggctgggctgttctcagctcttgggcacaagtcatcttttgactgcaggtatacatacatcgtcacacccagcctattactattttcatcccgaaaaccccctgtgtatgttgaatgtatagtgtgtgtagctagggctcaaacccagcactttatgcatatttggcaaaccttctaatgttctctaggtcatcaattaagagaattcttgagttctgaagattactctttagtgcaagaggttaaaaatcagggtgtcatggatgttaagcacatgttgtactgaactcacccaaaagatacatatatttttaaaatttcataatagctttctttgttggagaggagaataagacatcttactttgcatcaccttctcacctagaactcactatgtagtcccagactagacttgcagtagtcattgtggcccagcctcccaagtactggggctacagatgtacactgcctcatctgacttacaacagctttttcagatttgacttttatgccatcataaaggtcatgcatttaaaatatactcttgagtggctttattcacagagagtggtacagccatcattgtagtcaattttagaacatttttattttgttctattgtttgagacagtctttttatgtaatctacctggagcttgagatcctgttggtgcaacctctcgagtgttgggattataatgctctaggagggcatggccacatctttctttagaagtttttatcacccagacatcaccagactgtattggtcacctcttactccccagtgtcagccccattatgtaggcaacaccgatcaatgcatttgctattttgcaaaaatgcctaaagagtttttatgtagatacaatcatataatatgtgacttggtggcatttcttttatttgtattatattggaacatatctatattcaacaagtttcagcgctttgttcctttcatgtcttgagaacattccattgcgtagacatacactgtttcgtttttgtttatgcattcactagttgatgggcatgacactttaatataaggtaaggaggacagataaggaaagagaaaatatgcagataaaagctaacaattcaaaaggaattataggaaacatggaggctagggaaacatgttaaagagcaacaagacatcagacagatccagaatggaggaccttcaatggtaagtaatacaaaaaggacaggcagctgggaagagagtgcagtgatgacagttgtgtgtggttttaaaatcctatcgcctttgctgggggttgcctgagctactagcccctcctggcttcccttttgtactacccgcctgtggtttcaggaggcgaccgcactatcagcccactcctctctttggataaaagacacacacacacacacacacacacacacacacacacagagttaattcctttaaaattatcttcttggcacaattgctgggcacagatatttcctgcctggataagtgtgcccttaccaatttattatctccatctttccaaacctgccctaaacttagtggctagtcccacctggccctgccagacatccttggccacctgcctgcagcagaggctgcagaccctagctctccttgaggccttacataattgttgtgttcttcttcctccaaagcatggcagaaaaacttctcttccttgcatcttttcctcctgggacctagaagtcctacctgtaccttccacccagcaattggcccctggccttctttactgacaaatcaagaaccaattggggaacaggactttaacctcagagcctcccttacagatagttagttaccttatacattttatttaagagatgaatcagtcaaatgttatttgtggacctgacttatatcctggtttaaatgaattcatcataaacaatttttaagtgactggaagagaatgtgcagcatatggtaaatggcattaaaaagtcattatgaaggctagttagactcagcagttaagagctcagactactcttacagagtaccttagtttgtagtacacaggtgtatatataagcaaaatacccttatatgtaagataaaacaatttttaaaaatgtcaagtttttgcagctaataagatatggtcagtggctggtaaaagtgcgtgtgaccgaccaatcctgatgccctgaactggtgtctagaacctacatgttggaaggagagagcagacctctgctagctgtctcatgacttccaggcagtctgttctggtgcaggggcatgcacacaaatggaataatgtaaaagtcaacttaaaaaaattaatgttttaatgtgtggtgttaatgttctcatgtgtagtggcacaaacctttaatcctgactcctaaaaaaggcagaggtagacagctcttgagtttgagaccagcatggtctcaaactacatagtgagttctaggccagttagagatatatagtgagactttgtcaaagcaaaacaaaacaccgtgctattgtggcattagtaactaggcaataaaaatgtgttgagacttgaagaaaaggttgttactttttaaaaaagtcatttgtaggattttcttaagataattaaaagctaatttcttcctgagcatggtgtcacacacctttaatcccagcatgtgggaggcaggggcaggttagttccaagctggccaggtatataacgtgagaacatctcaagacccaaagcaacaacaaaaaaccaaatttcttagagatgtagtgaagtagatcagttatgacaggagagaggtgaaaccagattgtccagtgcctgatgctgagtgatgggtacacggggtcaccacacattgtctttatacagaggtatgctccatatgtctataagagataggtctgtgttggtaaactttgcacatagaaggtggaggcaggagagtcaggaattaaaggccagcctgggtcacatgagataagctgttttgatcaaataacagcagaaacaacgtaagggaggaaaggttttttttgagtagttcatggggaaggcataccaagagcagcttagttcatgagttcaggagatgagaacatgtggcgaagcaactgagcagaggcctagggatgggtctactctccccacaattagtttaggcagactgtcctaaaagagtaccgacttcagaataggggtccaagctggctcaactcctcctactctgtggaacctgtcctgtctcacgtttcttagtttgggattacaggtgtgatgtccacacagctggctggagtaggtaattttttgaggagaatttcctaagtatagaaattagaataagctgtttactgtgggggagggtaaaactgctcatcaatgttgagaactgcttagtgcagtagtattggattaggatgatcctgtggctggattattaaactacttttcttcccacttcaggcctgctataggctctgatggcctaatagctggatttatccagggttggtacttggccaggtaagttgggcagaatggctgtaagggacttagaataggatcatggcaggagttggtaaatggtgagattataggcgccagcctgagtagaaagggagttggaagagaaggctggaaccagtgaagcctagaggctggtgggccaaagttctaaccaggatggcaagcacatgcacattttagtagttgccctttcatagcataacttcagaactttatttagttcagtggccactcccagttttataatgtacattttcaatttacttgtccatgtttagcctgatcatatgctttatttatacatgatgtgagaattacacaacaatgtgctacactttagtgtaccatatagacatcatttgtcttcaccttaggcattgatagtaaataggaaaactggttcatggcttccttgtcagcattaggcttccacctgtgtgtcttgtgttcccttttctcccatcattgtgttcttttcatcatatatcatacttcgtctgtgtttctaaggcatacatgctacatacttctttaaacaatgtgttctttcgatctgtgtatgagatactcaggattgaactagaaccccataacgttctaagcaagcacctagctaaagcatttagttagctctaaaatatatttaaaaatgtaaaatacggttgttttttcaatttgtttttcctcacttgagacctgcctgcctctgtctttctgatgctgggattacaggtgtgtgtcaccacacccagtttcagttattatgcctcttgaaagtttggaggatttgcggtgagggaggaataggaattggggtgctgttgccctgtagtccaagcttgtctccaactttggttttgtttggagacagggtctcatttatccctggctggcctggactgtaaccttgtagaccaggctggcctcgagctcacagagatctgccttcctttgccttcaaggcatgtgccactgtgccaggccttgccttcaactagtaacctcccttgttcacttttcccagagctaagagttggaggtatgtgtcaccatattcaagttcagctgtcgtttatacttattgttttctttcccctttctagtgttctttattcctaaacctaggaagatactgagatttttaccaacatcttttttattttcctgcctgaggaactttcttttaattaacatttgcggtataggtttgttattgtttccctatacttaaaaaatattgctgctgtttgtctcgtggcttatggcttttgttgttttttgtttgttttgttttttcagataaggtctcactcttatagtccaggctggcttagaaattactatgtaaatcacgcttgcctggaactcagggcaatctgtctatctcagcctcagtgtgctggggatacaggagtaagccaccatatcaggctgccaacttaggtgatttctaataaagtggtggacttgttttgagcattttttatgcttctgtacgtgtgtgtgtgtgtgtgtgtgtgtgcacactcttgtgtgtgagacagagactgagagggttcatttgtggaggtcagaggacagcttgcaagattgggttttcttcttcccccatatattctggagactgatttcaggctatcaggtttccatggcaaccccttttacacactgataatgagtaaatgccatcctgataatgtttgttgtgactttatctatgatgttttccaggaaatgattgatctatgtattacagattttgatgtattttcttttcattgttttacttgggatttttaatttcttggatctgcgggtttaaatctcaatgtttttctccgtgttgaaattgtcatccattgttgttttgaaggtttttatttttaatttttagtgaaagtctttcccctttccagtgtctctgtccaccacgtatgttagagtatgctgtcctgtaggcactgatcccttatgcccgttatatcatcccaaacaccggcaccctaccctgagctcagggtctgtttctttgagtttctggtgggattattccctcaccatgtggtcttttatgctttgaatatacagattaatacttaaacaggacttcctctctgtaaatctctggaagtcttgctgtggaagctgcagtgtatcgcagtgtacccttttatcccaacatctttacttgcaaatgttcattgtaatgattcattggtctggtttgaggcttctggcttctgatacactgtcaacactagaacctcactgggactcctcttggatattcagttgttgccctctgtcatggaggttctgtacctttggatctctgcctttatgcactgcagttcatagacaagtagatgtagttggagtagggctgggtggtagctcagttggtcagcaactcttccccatacacccactccaccagatcagctctccagcagtgtcctggctagcttacccaagggccaaggccagctccccctctcatgccctcagggccagctcacttgatcccctgctaataggatcagctctactgtactccaagggagaggtgcagggcagtgatggagagggcaaggagccagctctcctgttctcatacccttagggccaactctactgtgctgctacccaggtgagaggtaggggaccagctctcctgagtgccgcagccagtgagatactaggccagttctgctcagcccttggacatcagcctggtcccaggtagcagcccagaccagggatatccatggacatcaacacagactgttgctgctgccgggccacagatccagatataatcctcagtggcagcagggccaggacttcacgatggccccaggtgggggtacaagctactctcccaccattctgttactcaccaccctgcgtctccagttccatctctctctgcagtgctcaaagcattccacttctctttctctcatctctccaccacacacttggacatcatagtggcatctcagcgggtgggccacgtatcattttttttacctgaaaggcaaaggctcagtggaaatgtgaatgctaactaggccgagatagctgtgaatgatggtgatgaaggctggggatgatatttagatgtgaagggaaacagccaaacaacctcaaaaaagcagcacgtgagggaaacagtgacaaaaacgtgctcacggtgagagaaaaaggacctgaaaacttgaaaaagttagcctaactcagcatgtggccactagttcatcttctaattttctttttacttactctgatgttttgagatagggtctcctgtagcccagggtgtctcgagacttactatgcagtaaaggccagcctttgactcacagcaaactctcctaccttagcctccttcatggtgagattgcaggcactgccactttgcctgttttgtttgttttctatttaaaatacatttgaaaggtgtaatatagtaaaaacaggactcagttcattttataaagttcactgtatgctttgtccccagcaatttattttaagtaatgagcaaaagcacctgggccagtgatggctattggaactactttttgagattacttaatggaatatagctccttgtggccttgtcaagatgaaatcataaagtgggatagcctcgttttgaccttgcagataaggtcagaaggttcgtttcatccagcatgtttagttttcacagcccctaggaggttactttgaacgacacagttaaaggagaattaaaaatcagttgatgctgaaaataaaaacatttattttcttcttggtcttgcagtaagttataggtgacattaattttgagcagttcggatgtgtgaactgactgttgttttgtttgcaggcgctacgctacttggctgaatgccgtgcgaatagagaaaagatgaagggagagctggggatgatgctgagcttgcagaatgtcatccagaagtaagtccagcaggcagacagtgtgtcagtagcgtcctctgaggtccctgaacgatgctctgtgcaaactgaaccaagactcaaattttattttcttttttaagcgtcaggtattattttgaaattttaactgtaatagaagataggcttctgtaggttttatgtccaaaaattgtttgctaatgaatattagttttctgtgtaaccctagctgtcctggaactagctctgcagaccatgctggccttgaactcagacatctgactgccctgccttctcagagctagtatgtgccaccatgcctatctggtttttgtctttactgataaatggtaggtatttcagtccttataaatgtttatattgtatttaagatattgacatggtatgcatcctgtcatttgggaatattaataaatatttcaaaattgatttgcttttctctcctaagttttagagttaatactaggatatttgcagctaatgtgacagaaacagggaaacagggtttttttcagatttgacgacagctgagtgttcatggcctttatttagtatctctcaaatattctttcccatcgaactatctagttcattaattgctgtttgtgagtttatggtttaaggatttaaaattcatttattttctattggttaaaaaaggatattaagaaatcactcactcataggccactgtctaaaaattaaaatacacggtgtgtgtgtgtgttttattttgaactgctaatcttcctgcctttatttccagagggctggtatggtatgtgtgtgccaccgtacctagattctgtggtgcacgagtagggactcaggaatccattcatgctcgtcaatcactttatcaactgagccaagtgtgcgtgtgcgtgtgtgtgtgtgtgtgtgtgtgtaagaaaaagacgtatgctgaatgaagctttataataaagtacatgagttggtttggtaacagaccatccagacaactaattctagtcgaggatcttcgtgaggaaagtgtggtgccctgtccttgtcattacagcatcctggctttactcaaaggatccttcatcaaggtcatggaaactggaagtttcttttgatgaggttatcatgaatctgattgatagagccatttaacttgatagatataattgtatatatctgtatattttaaattagtggcatgtgtattccttaaacaggcatagttattgaagttcaaagtaagtggtacaaaaaaagatgtgggaaattagatttaaaacgagtgttgaagccaggtggtggcggcacacacctttgctctcagcactccagcggcagagagccaggtgtgactcccattcataccagaagcttaagctcggagggggctgaatcagggttgccaggagttagaagtcagcttgatctacagaggctgcttctaaaaccaagagatggctcagtcgttcagagcacctggctgctcgtcctgagggcccgggctggcttcccccacccacgtggtcactcacaagtatccaaaatgccagttttaagggacctgaacccctcttttggcttctgtaggtactgcatcatgtagtgcacaggcatacatacatacaaaacaccataaacataataaaacacatttaaaaaccaaaataatgttgaaaaattaaaatatataattgaattttaaaaatttaaattaagttcaggttatgtacatttaacctggaaaggtaatatttaccctgttggctcaaggatgtaataaaagaatatatatatatatatatggaaaagataaattggtagagtgactgaccactgtgagtttactcagaggaattaaagacattttcttggtagatcatcaaggaagaagatctgagatagttagaaatgttgtacattattgtcttaagcataaagaagggtagaactgggttgggcatacacaagaaaggatgcagtttctggttacagtatagacccaacagccatcccagtgggcagctgcaagccaaagtgtcttacagtagtcctgcactaagcagaaataacagatcttactaggggctgcttggcaacagcatcctctgcccctcagatttatggtggctctaaagctgatatacttgctattatgactatagaagaacaagtcctttatttatctcactttcctctacccatnnnnnnnnnnnnnnnnnnnnttcctctacccatccacccactcatccacccacccacccatccacccacccacccacccacccatccacccacccacccatgcacccacccacccatccattttatatgagtatgtgcttggttgtagaagtcagaggatagcttgagttaagcacctttaactgctgaattacctcactgtatggtgattccttgctccactactagtaaaatatttattacccattctaatttggtcctacaatccttttaatagtagaaataaggattgataactagagaagacagaaagacattgctgttcctttggcttctgtagattttagtatttgaaggtttcctttcaagcttcttatgttttgtttgtttttctgcccttcaagcttgggaaagtcacctctgttcactaacataagcctttgaagcatttgtgtttgaatggcgtgttaatataggtagtctagttagcctggtcagtctgcctgcgtaatgttaggattacaggcagtgttaatataggtagtctcgttagcctggtcagtctgcctgcgtagtgttaggattacaggcagtgttaatataggtagtctcgttagcctggtcagtctgcctgcgtagtgttaggattacaggcagtgttaatataggtagtctcgttagcctggtcagtctgcctgcgtaatgttaggattacaggcagtgttaatataggtagtctcgttagcctggtcagtctgcctgcatagtgttaggattacaggcagtgttaatataggtagtctcgttagcctagtcagtctgcctgtgtagtgttagggttacaggcagtgttaatataggtagtctcgttagcctggtcagtctgcctgcgtaatgttaggattacaggcagtgttaatataggtagtctcgttagcctggtcagtctgcctgcatagtgttaggattacaggcagtgttaatataggtagtctcgttagcctagtcagtctgcctgcgtagtgttagggttacaggcagtgttaatataggtagtctcgttagcctggtcagtctgcctgcatagtgttaggattacaggcagtgttaatataggtagtctcgttagcctggtcagtctgcctgcatagtgttaggattacaggcagaccatcacaggtgagctctgctgctccctgacatctcgttgggcccggggcatccaaactccttttctcactctctcatggcacattctttccctactgagctctcttcctggccctgctaatgtttcttgaaatggcattgttaatgtgcttgccagcagtttccatctctttggacctttatcttttttttttttttttttttttttttttttttgagacagggtttctctgtgtagtcctggctgtcctagaactcactttgtagaccaggctggactcgaactcagaaatccgcctgtctctgcctccggagtgctgggattaaagtcatgcgccaccaccgcctggcttctttggacctttttcaaacattgaaaattatttgtactgcagctctctgtctctacagttcaactttaacaatagctgaagctacctgagccaataaacgaaagatgatttgaacaagaattgtggtagtagtggttgaaagaaatttggtaacttgatcttgttacttggtttcctagttaatgatttcaattaaatgtagttttgtgccacgctaggatcgattatgaatctcaatcatgtttttaatgaacccaggagattgtgctggagaggtagctgagtgttccaaatgaggatcagcaggaagagagagtgacactgggcctggcttgagcactccatacctcaaaacccacccaccagtgaaatactttctccaacaaggccatactcctaattgtgccactctttatgagtctgtgggggccattttaattacaaccatcagaatgagggagagaaagttagcctggactgtgtaaaaagttgaagggagtggctggagagatggctcagcagttaagagcactgactgctcttctgaaggttctgagttcaattcctagcaaccacatggtggctcacaaccatctgtaatgggatctgatgccctcttctggtgtgtctgaagacagctacagtgtactcatatgtataaaataaataaatctttaaaaaaaagttggagggagatcttataggctaaatgctttttctacatttattgatgattcttattctttccttttcatttgttgaatcagaatcttgtgttatagattggtatcagaccttgaacttgcctcgtcctcctgcacatggttactgtagcaggcaggagtcaggtgtacgctgtttatgtggtgctgctaggaactgaatacagagctctatacgtgttagccccgcactctgacatctgaactgcatcaccagtgcccgttactggttattccaagactcattggtgtttctttctaattgaacaaggtatcaggctgaatgaagcaagactcatcaaaattaagaagtacaattataaaaccagtaaaaatgactatatagttatgcttttttttttttttttttttttttccccaaggactacaactccaggagaaacaaaacttctggcctcagaaatctatgacatccttcaatcctccaatttggctgatggtgatagttttaatgaaatgaattcgcgtagaaggaaagctcagttttttttgggaactacaaacaaacgggccaaaacagtagttttgcacatagatggtctcgatgatacggtaagacttgtagatgtggttcataggacaacaatgagaaatggtatcaccaaacatgttctttgcagtcacttgctaacgtgttctaagaaaaagttgcaatattaatagtttatacttaaggcaaaaaggtcatcttatgctaaagatattggctaatcagcatacatagcagttttaactgtaatagtaggacttaaagaatgtaagacttgtaaataggtctaattagagctgtgcatgatttatgtagatgagtcataacttaggaatgtcagaaaagagatggggtcctgtaggtgttaaaaggctctgtggttagcatgacttttcagggctcatcagtatcatggatgtgtgcatcacttcatatgtattccatcgagtggtctacagtactactttgcgtgtttctacatattggctcttagagacctgaatagagcctgtctgttataacttcttttaaagcactgtgtcagcatcttcttgggtgtatacttagtggcattgctcagacatatggtaattgtaagcttaacttttttcacgaaccatcggattgttcacagtggctgcacagtattacatttcaaccagcattgtgcgaggggcctagtgtttccacatcctctagtagatttgaggtttaatggttttgatttatagtctcctgataactagtggtgtggagcaacattttagacatgtattggtcattgctttagtggttaaattgggcttgatttatatctttcacttcagatttatatttgagggaaatattcatttcctctttgttctttgtccagttttaaatggtcttttattgctcaacattgactgtgtatactgttaaccactgagccatctctccagccccatatttgtacattttattgaagtcatttggctctgggctttgctttgtggacagtttttttgaccattaattgaatttctctacatgctttattagatctatttatcttaccctctcccctttttttagtaagttttgattgtttatgtctttgtaataatgtttacattttgttgaggttgttaatattggcaaacagttattcacattgcttgtaaagctaaatgcccttgaactaaaaattcaagttttgaaatgcttcaatgtccattttttttttcatttttttgttttgttttattagatgatttctttatttacatttcaaatgttatcccctttcctggtttcccctccaaaaccctcctatcctctccccctccccctactcaccaacccagccactcctgcttcctagtcctggcattcccctatgctggggcatagaaccttcacaggaccaagggcctctcctcccattgatgaccaactaggccatcctctgctaaatatgcagctggagcaatgggtccctccatgtgtactcttcagttggtagtttagtcgctgggagctctgggtgtactggttggttcatattgttgttcctcctatggggctgcaaacccattcagttccttgggttctatctctagttcctacattggagaccctcagtccagtggttggctcagagcatccacctctgtatttgtcaggcactggtagaacccctcaggagacagctatatcaagctcctatcagcaaggacttgttggtatccataatagtgtctgggtttggtgactgtatgtggaatggatccccaagtggggcagtctctggatggcctttccttcattctctgctctacactttgtttctgtatctcctcccatgggtattgtgttcccccttctaaggaagactgaagtatccaatccacactttgatcttccttcatgagcttcatgtagtatgtgaattgtatcttgtttattccgagcttctgggctaatatccacttatcagtgagtgcataccatgtgtgttcttttgtgattgggttacctcactcaggatggtattttctagttccatccatttgcctcagaatttcatgaagtcattgtttttaatagctgaacagcactccattgtgtaaatgtaccacattttctgtatccattcctctgttgagggacatctgggttctttccagcttctggctattataaataaggctgctatgaacatagtggagcatgtgtccttattacaagttggagcatcttctgggtatatgcccaggagtggtattgctggatcttccagtagaactatgtccaattttctgaggaaccgccagactgatttccagagtggttgtaccagcctgcaatcccaccaacaatggaggagtgtgcctcttttttttttattattattattaggtattttcctcatttacattttcaatgctatcccaaaagtcccctatacccacccccccaatcccctacccacccactccccctttttggccctggtgttcccctgtactggggcatataacgtttgcaagtccagtgggcctctctttccagtgatggccgactaggccattgtttgatacatatgcagctagagacaagagctccggggtactggttagttcatattgttgttccacctatagggttgcagttccctttagctccttgggtaatttctctactgtcttaatccacatcctagccagcatctgctgtcacctgagtttttgatcttagcctttctgactggtgtgaggtggaatctcagggttgttttgatttgcatttccttgatgactaaggatgttgaacatttctttacagaccttatttttaaatatcaatgtgatgctcaaaaaggtttggagttggaaagtaaaattttatttttgattaataaattttctctgctcatgaaataagccaattcaggccaaattacagatataaaagcagctcttgacaggttcactgaaatggggccaggaaaaaatcactatatagacggggggagggggggacagacagagagggatggagaaggatggggtggggtgggggagagagcgagctagagagagctcaaaaagaagaggaacctagggagggatggagaggaaaacggagatggagagatgggtctggggtgactggagggccctttttgtacacgtcacacacctggttcacacacctggtacaggcaggtgatgatgcagtccgttgctaggtccttgagaacaagccagtggactagcctgtgtgttaacggggtaagtgttatgggtccctggtttgaagcccaacacagatttctaaaccttattttatacgtatggttcccaagaccagacaaaagatacttaacctttcataacgttttatttttataaggtttggcagtaatatttccttctttattcccaagtttagttgttggctttttcttggaagttaaaggtttatcagtttcattgaccttttcaaagacccaaatgttgtattacacttattaccgtttaagttgggggtgcacatgtgaccgtgagcggaggctgcttctcttgagcctgtcctaggaccaagccctggcctcagacctggtagcaggctctcttaagctcatcctgctctcattagttctgtgggtttggactttttgctttgttttttgatttcgcttgtttgttttgcttgttttgagatttggtctcactttgtatccagtttgatcttgaactcaggcagttgtgcctcagcctcaggaatgctgtgtgctctagttataggaatgtgctgctatgctgggactgagaaccaactttttaaaggacaccaaggttttattgagaaataaagttaacagttcttagcagcagggagtagtccccaaaatgtgccaagagccgccttttgagaaagatttttctcatttaagaacttttttcatgctctcaatctgttattctgtctagctgcttcaaagcaactatttactttcttcttctcttccctttcctcccatccccttccccctccatgtatccacctccttcctccctcttcctcctccagttcctccctccccctctctccttccttgttcactttcttccagccccttctttccccctccacttttcccagcccttgcctctctgcctacccactttctcccatccccctcctcctctactttcttgcctgacttttacctctcttcccctcccccctcccaacagttctatagccttcattattgcaacttgaacagtcaactttccaacttgattttcatatgttccaaagccctcctcttacttttgtttaaaatggttttatttttgatggatgtggactccatgttgactttcttctactgcactttgaaatagccatacaccatgttgtgttcagaatcctgctgtcatttgtcttgtcttcctccctcctcttgctcccgcactgcctgctcctcagttgttcacgtccttactggcttgactgatgtggatgtccctttcctgggccaaggcagagcagccttgcccagccagctttagggcacacagcgtctcagatgatagggttgtgctctggaatctgagtttgaagctctcctgctagcaggagcccagtcttttctttgtgtgtttttctgtttccattttatctagcttcttggctttgtgaatttaaatttgtggcagatttgtatggattttcccatcatatcttcaaaacaaaattttctccctttttcctggatctgtcagggattcttaattatgtgctgtctgccacttgagatttcttcaagttcactggggtcctgtttacttcatcccttctcttacacttaggatagatcctgtttctgtgttccttaatatcttcgctgagtgctgagtttgttattatccttccccagtatgtcttataaacatcgttttcacagtgtattttcacgttttgacttagatattttatgatgtcaccattgcacatttacactctatcttcttgaacgtagaaacattttaggaaaattgttaatgcccctgtgcactaactccaccacttgtattgtttctgaatatattggcttttctagtttagtgtagtgtttgtttgcttcttttgaatgtctggtggcagatattttgtgctttgtggaacacagaattcatttgtatgcacagcctgtaattgctcctcagctctattctgttttgtttgggttttcaagacagagtctctctgtaaatccctgtctgtcctggaactccctctgtagaccaggctgctaccctgcctcctgagaactggaactaaagctgtgccccactatccctgctcagctttattgtgtaccgactgctgcttgttagtggttgggtcttgagctctggtttaaagttttactatgtaggaccatgcttttcaacctagggataagtttggtacactgctgaggcaatgttcttcccaccctgtggacttacagttattgtctagtgtagtccgtgaggatatgatgcattgctaacctagtgtgagccgatagagttgttctttctgctcctccccagcagagttttgctcagtctcaggttccttcctagcatccatgcactgaccatcagtcagctcgcagtgaccactgcacacctgactctggagacagtggctgtctctctgtgtggctccttcctcttttgtccttctctcattcttaatttgctttgccctgagaattatatttgctttattttacgtcccttaacttggtcctgaattcagggaggcttccgagttctggttggtttctgttagatttttttgttgctatgtcaaactacttaacagaaacaactcaagaaaggagttgcttattttggcttatagcttttagttcatgattcctgagccttgaggctttgggcctgaaatatgctgtgacaatgtctgtggatagggctagggcggtagaggtggctggctaccctagaagtgggagtatctgcaggggctttcttctattccatttttcttctgtctggggctgcagcgtaagggatgccctcacagacaacatactagagatgttcttactgggagtgttttgtgtacatgtgtacagagttcatggaggctggaagagagtgttggatcctctagaagtgaaggcacagacggttgtgagctgccatgtggattctgggacttgaacctacttattttggaagagcagccagtgctcttatttaacccttgagctgtttctctggccacaagctatgctctcctaatctcctgctcatttcccagttctgtccagttgacagccaagattagcatcagtttcattttgctcatctcagtttcttctttcagagatgttacttttccagtatctaagcatcaggaggtttttttttcaataatattttgtatttcaaattgtttaattgtttttataaagacaattcataacgtttcactttatttggggactcaaacataaggttttaaggtttagtaaataagtatgtgtgtattagggggtgcttctacagtctttatttactgtgacaggaccaaatatgttaacaaataacttagtgaaactgagctacaaaagcccaaaacatttctagaaaattctagaaattttctgataaatgaaaattgattaagtggaatacattaatatacataaaatatctccagtgaattcttgttgattatgttgagtatgggaaacagttacttttcatagttaacacaaaaattcccaaaggggtaaggttcagcacatgagaatatttggtgtgcannnnnnnnnnnnnnnnnnnnttttaaggtttagtaaataagtatgtgtgtattagggggtgcttctaccagtcttttatttactgtgacaggaccaaatatgttaacaaataacttagtgaaactgagctacaaaagcccaaaacatttctagaaaattctagaaattttctgataaatgaaaattgattaagtggaatacattaatatacataaaatatctccagtgaatcttgttgattatgttgagtatgggaaacagttacttttcatagttaacacaaaaatcccaaaggggtaaggttcagcacatgagaatatttggtgtgcaatcatgaggacctgagttgtatcctctgcatacatgagtgcacatatgcaaatacatacatgcttcccaccctcctctctcatatataccacacactcaaacctaattgctcacaaatataggccaatatacagtaattgtgaccgtgcttgccaaaatctgaaatacagctgaattgatgaggatagtctcctgaaggtcaaaacaaaaggcagtttcttaattacaggtactggatagcgataatgagaaaagacagatcgaataagatgtgttgaagtgggagatgggagaattagcaccctgctttaaagtataaaggttatgtgtaaaggtatctattaccctcctgtttaattgttgtcttgaagcttactgcctctgtcagccctagtcctgggagcttctagcctctgtacaatcggatctaggcctagaatattttcagcctctgagacttactgctgaactgtcgcaccctttcttattctttcagtactctgcctagctggctcaactcagctgttctgtcttaaactcctctcctaactgactcattcaatctggctctctcagcctctccacctttgcttggcctcaaactaactctggcaatctgttctaatcttttggcttctaatctgttcttctctggctcgtcctgccttcacctgtgtctaccttgttctctctccaacctgtctctagaaaactcttctggtaaaacttcctccttttcctgtctgtctgtcatccgtccatttgtctgcactgctttcttaagtagtttccctttcctcccttttctcatgagagttagatatatcctattctgtcaaatctttctcggattggtcactttgtctgccactcaattagacataacttcaaatggatacttccttctacaaactaactttactttcattgtttgagattaaatgtgtgtactaagggtaaatctgtattccagccagagggattaaagatttgtgctaagggtgaggcaccacagctagaaacaggtttttccagtaaacaacatagtctcggtgttcacagtgtggtcaaatatcttccaatagccatgtgttacagtgtcaatactaacagaggaaaataaaacccaaaaagataatattgataatacttggtattgccatgaatgatgaactatttataagggacaatgactcaaactccagatgcttttaattctaacataaccctaaagatttttttccaatatatttttgtttgtttttttgttttttgtttgtttttcgagacagggtttctctgtatagcgctggctgtcctggaactcactctgtagaccacggtggccttgaactcagaaatccacctgcctctgcctcctgagctcaggaagtaaggcatgcaccaccagtgctcggctccaaaatatttttattgaccatttgggaatttcacatcatataccccaatcatagtcactttccaattctttcaggtctaccccccacttcaagcccctccccttgcatgcccaaaataagagaaaaccaaatccaactagagattcttaaactagaatagactgtgtcaggcataccatatgctctctgttgtacttgtcaactctgtctcatcattaagctgcagtcagatgatagtaagtaaatgggtgtggctgtctcaggagaactgcacagaaatggctgaaggactgcagtttgatcacctttaagcttgaggaacctctgtttgtctgtttttgagcactttgtcctgttattcatttgttctttctatgatattaattagtattgggtgatgtctttctgatattagaaattattaaaagctcatattagtattgaagtttgagctaggcggtgatagtataaagtttttaatcttagcacttgggaggcagaggaaggctgatctcttgagtttgaggccaacctggtttcaggacagccagggctacccccacctccccaccaaaatggggtttgaaatatgctaggaattactggtaagttagaatccagacctagttcaattgacacatagcaatgtttcatgtcatgacatgttgttccctgtggcaccataagattataatgctgctgttgttactgtgttagatatgcttatgtagacaagcatgtaccttcattattcaattccttgcaatttccagtataggaataagctgttgtggaggcttaatgtcgtaggctacaccttacagcttatgtgtacagtaggctttgacatgtgggtttgtgtaagtctgttccttagtgttttaaaaaggacagagtcagcacagtgagtaggctatgtggtttgagctggtttctttcctgctttgataactgtttgccttcactttttcagtctcgacgaaatctatgtgaagaggccttgttaaaaattaaaggtgtcattagctttacttttcaaatggctgttcaaagatgcgtggtgcggatccgttcagacttgaaggcagaggttagtactctcaaccactgaatggcgttatgcatgaagtcgtaacttagcacagcaccatttagaattgctcctttttcccggcccaggctctggcgtcagcaatagcatcaaccaaggtcatgaaagctcagcaagttgtgaagagcgagagtggagaagaggtaaaacttgtactttactctagccctaccaaactgaggctcgtggttatttttatgattagaaaattataacatttgtagaggaatagttannnnnnnnnnnnnnnnnnnnatattttgtatttcaaattgtttaattgtttttataaagacaattcataacgtttcactttatttgggggctcaaacataaggttttaaggtttagtaaataagtatgtgtgtattagggggtgcttctacagtctttatttactgtgacaggaccaaatatgttaacaaataacttactgaaactgagctacaaaagcccaaaacatttctagaaaattctagaaattttctgataaatgaaaattggttaagtggaatacattaatatacataaaatatctccagtgaatcctgttgattatgttgagtatgggaaacagttacttttcaaagttaacacaaaaatcccaaaggggtaaggttcagcacatgagaatatttggtgtgcaatcatgaggacctgagttgtatcctctgcatacatgagtgcacatatgcaaatacatacatgtttcccaccctcctctctcatatataccacacactcaaacttaactgctcacaaatataggccaatatacagtaattgtgactgtgtttgccaaaatctgaaatacagccgaattgatgaggatagtctcctgaaggtcaaagcaaaaggcagtttcttaattacaggcactggatagcgataatgagaaaagacaaatcgaataagatgtgttgaagtgggagatgggagaattagcaccctgctttaaagtataaaggtcatgtgtaaaggtatctattaccctcctgttgtaattattctcttgaaacttcctgcctctgtcagtcctagtcctgggagcttctagcctctgtacaatcggatctaggcctagaatattttcagcctctgagacttactgctgaactgtcgcaccctttcttattctttcagtactctgcctagctggatgaactcagctgttctgtcttaaactcctctcctaactgactcgttcaatctggctctctcagcctctccacctttgcttggcctcaaactaactctggcaatctgttctaatcttctggcttctaatcttctgttcttctctggctcgtcctgccttcacctgtgtctaccttgttctctcttcaacgtgtctctagaaaactcttctggtaaaacttcctccttttcatgtctgtctgtcatccgtccatttgtctgcactgctttcttaagtagtttccctttcctccctttcctcatgagagttagatatatcctattctgtcaaatctttctcggattggtcactttgtctgccactcaattagacataacttcaaatggatacttccttctacaaactaactttactttcattgtttgagattaaatgtgtatactaagggcaaatctgtattccagccagagggattaaagatgtgtgctaagggtgaggcaccacagctagaaacaggtttttccagtaaacaacatagtctccgtgttcacagtgtggtcaaatatcttccaatagccatgtgttacagtgtcaatactaacagaggaaaataaaaaccaaaaagataatattgataatacttggaattgccatgaatgatgaactatttataagggacaatgacttaaattccagatgcttttaattctaccataaccctaaagattttttccaatatatttttgtttgtttttttgttttttgttttttgtttgtttttcgagacagggtttctctgtgtagcgctggctgtcctggaactcactctgtagaccaccgtggccttgaactcagaaatccacctgcctctgcctcctgagcgcaggaattaaggcatgcaccaccactgctcggctccaaaatatttttattgaccatttgggaatttcacatcatatacccaatcatagtcannnnnnnnnnnnnnnnnnnntttcaacaggtttttattttattttgcattgtcacacatttatttaaaaacctgtagcccttttggtagtgatggtccaggtcggttggtatttcagactgaagtttgtgtgtgtctaggtgttcaaggactctcagagatctcaaaggcaactataatggcagtttttgaaatatattgtaagataataaaagataacaatgaaaatcaagcagttattgtatttttaaatttttatttatcaacttcccgcccatccatccatccatccatccatcctccatgtctctgtgtgtacatgcctgggggagtcaggagactattaggtcacgggagctggagttacaggcagttgtgagctgtctgatatggttctgggagttgagctcagtgctctgcaagaataattcatgttcttaaccactgagctatttctctagccttgggatattgtagtataaagattgatacgtacgtacgtgtgtgtgtgtgtgtgtgtgagatgctgggtatccatccagtgactcaggattctttttaagcttgtttgaaattatctatttatacatttagagacaaggtcttactatctagtccaagctggcctgaaccttttatgtggcccaccttaaccttgaactctagattctcttgcttacatcctgaatggcaggtatcatcatgccaagctctttggcagtttgcacacataatgtatggcacatagtcttagttctatagttgcaagagtcagaggaagtacctcacctgttactgtgtaattatgtgtagacccctgagctggacaaaccagacctgcactcttgtcatgtttttgggtttggttttccagagcctcctgtagaagcttgtgttccaacctcagatctacccatattctgattttaaagaattgttacaggagaataaaaattgcttcttatagcttgcaacctgtataattactagacagtaatccctgaactatatagcaaactgaaggtaaatttcacacaggatcatttacagggttcaatgagatcatgatgttttacaagacatacttactggtatctggtggaattgttgctactggtcatgtggcacgattgtcacaatgttaacattgattcatgccctctctcctgccctctgtacatgtgcacatatgccacggcacacatgtagagacagcttctggaagttaactctctccttccatcatgtcagttcccagtattgaactgagggtgtcaggtgtagcttggccaatagtcatctgtccctgataagccatcttatcagcctctggaatctcaagagataacccaccattagcctttaattcatctactcaagactcatcaagagcttggggttgtttctgaggcttagttatctgtagtttttatctaaaattaccccttgaatccatttatccattgtcaaattttttttcccacacagatgctgaaattcatgtttatctaaaaagtacagacatgatgaaacgtaagaaaatgttaacatttaagactagtatgcaagagcttttgtactcttcatatacggtttctgtaagtctcaaagtggctttacattataaccaccaataaaaaagtcacaatacacacagaataaatgtaagtttgatggaaaagttactccaccagacactcagtgaaaggatgacagaagagtcatacagtcactgttgtgattactttttttaaatttattttttttaattaggtattttcttcattgacatttcaaatgctatcccaaaagtcccccagaccctccccgcccccacttccctacccaccaactcccacttcttggccctggcgttcccccgtactgaggcatataaagtttgcaagaccaagggacctctcttcccaatgatggccgactaggccatcttctgctacatatgcagctagagacaagagctctgggggtactggttagatcatattgttgtttcacctatagggttgtagaccccttcaactccttgggtactttctccagctcctccactgggggccctgtgttccatccaatagccgactgtgagcatccacttttgtgtttgccaggccccagcatagcctcacaaaaacagcttcagtgaagtagctggatataaaattaactcaaacaagtcaatggcctttctctacacaaaggatacacaggctgagaaagaaattagggaaacaacacccttcacaatagtcacaaataatataaaataccttggtgtgactctaaggaagtgaaagatctgtgtgattnnnnnnnnnnnnnnnnnnnnnnnnnnnnnnnnnnnnnnnnnnnnnnnnnnnnnnnnnnnnnnnnnnnnnnnnnnnnnnnnnnnnnnnnnnnnnnnnnnnnnnnnnnnnnnnnnnnnnnnnnnnnnnnnnnnnnnnnnnnnnnnnnnnnnnnnnnnnnnnnnnnnnnnnnnnnnnnnnnnnnnnnnnnnnnnnnnnnnnnnnnnnnnnnnnnnnnnnnnnnnnnnnnnnnnnnnnnnnnnnnnnnnnnnnnnnnnnnnnnnnnnnnnnnnnnnnnnnnnnnnnnnnnnnnnnnnnnnnnnnnnnnnnnnnnnnnnnnnnnnnnnnnnnnnnnnnnnnnnnnnnnnnnnnnnnnnnnnnnnnnnnnnnnnnnnnnnnnnnnnnnnnnnnnnnnnnnnnnnnnnnnnnnnnnnnnnnnnnnnnnnnnnnnnnnnnnnnnnnnnnnnnnnnnnnnnnnnnnnnnnnnnnnnnnnnnnnnnnnnnnnnnnnnnnnnnnnnnnnnnnnnnnnnnnnnnnnnnnnnnnnnnnnnnnnnnnnnnnnnnnnnnnnnnnnnnnnnnnnnnnnnnnnnnnnnnnnnnnnnnnnnnnnnnnnnnnnnnnnnnnnnnnnnnnnnnnnnnnnnnnnnnnnnnnnnnnnnnnnnnnnnnnnnnnnnnnnnnnnnnnnnnnnnnnnnnnnnnnnnnnnnnnnnnnnnnnnnnnnnnnnnnnnnnnnnnnnnnnnnnnnnnnnnnnnnnnnnnnnnnnnnnnnnnnnnnnnnnnnnnnnnnnnnnnnnnnnnnnnnnnnnnnnnnnnnnnnnnnnnnnnnnnnnnnnnnnnnnnnnnnnnnnnnnnnnnnnnnnnnnnnnnnnnnnnnnnnnnnnnnnnnnnnnnnnnnnnnnnnnnnnnnnnnnnnnnnnnnnnnnnnnnnnnnnnnnnnnnnnnnnnnnnnnnnnnnnnnnnnnnnnnnnnnnnnnnnnnnnnnnnnnnnnnnnnnnnnnnnnnnnnnnnnnnnnnnnnnnnnnnnnnnnnnnnnnnnnnnnnnnnnnnnnnnnnnnnnnnnnnnnnnnnnnnnnnnnnnnnnnnnnnnnnnnnnnnnnnnnnnnnnnnnnnnnnnnnnnnnnnnnnnnnnnnnnnnnnnnnnnnnnnnnnnnnnnnnnnnnnnnnnnnnnnnnnnnnnnnnnnnnnnnnnnnnnnnnnnnnnnnnnnnnnnnnnnnnnnnnnnnnnnnnnnnnnnnnnnnnnnnnnnnnnnnnnnnnnnnnnnnnnnnnnnnnnnnnnnnnnnnnnnnnnnnnnnnnnnnnnnnnnnnnnnnnnnnnnnnnnnnnnnnnnnnnnnnnnnnnnnnnnnnnnnnnnnnnnnnnnnnnnnnnnnnnnnnnnnnnnnnnnnnnnnnnnnntgatggccgactaggtcatcttttgatacatatgcagctagagtcaagagctccggggtactggttagttcataatgttgttgcacctacagggttgcagatctctttagctccttggatactttctctagctcctccattgggggccctgtgatccatccaatagctgactgtgagcatccacttatgtgtttgctaggccccggcctagtctcacaagagacagctatatcagggtcctttcagcaaactcttgcatttattaagagtgcaaaaagaagtaatgcatggcatgagggctagcattaattatcaacttgacaaaaatctagaatcccctgggagacaggcttctgagcatgcctgttggggttattctgattgtagtaattgaagtgaaggcccatccgttgtagtgacatcattccctgcatgaaaacctaaactgtaagtagagaagagtagctgttacttagtaggagaatcctactattaaggttgatgtccaccatgtctggatagctctctgagcttggcacagaatggaggactccctttcttagtggggcttctctttctttgtctaaccttacatggagagtgtctctgagtacagatgtgtgaccttacctgaagaatgtgcagagctctctgcaagggatactcagcactcaagtcctgctctagctccccacctatatgataactaagtactgtgttatagctaatcaacccttcttgcctttatgataattaagttctgtactttgaccaatcagtcctttccatccatatccctaagaacccttatatttttaccctccccctgaaacaataaaggagagctgtgttactgaagctgactcttggaaatccttctgtcatactcagagctattcaaaccttgtttgtcaattttgctccctctactcccatggccaatgacccccaaggaaagggagacccacaggtaactgagcagtaacaagcacttctcagtcctggttcctgattgataatgtgatgtgagcagctgcttcaagttcctctgccctgactcatcatgatggactataccctcgaactgtgatccagaataaacctgttctccttcaagttacttttgtcagatttattcctacagcaacaacagacatctcttgagtactgattaggttcatggcaaactctgtgtgtgtgtgtgtgtgtgtgtgtgtgtgtgtgtgtgtgtgtgaatggtatagctgggtcacattaggttttgaggaacatccatactgatttcaaaagtagttgcactaatttgtattcaaaagaagaatgtgttcttttccccccatgtgcttaccagcatttgatggaatctcaatatggattttgttttcactgctataatgagtaatgtatgtatcatttttttttccttaaacttactgggtatttgtatttctctggactggttaatgagggtcaagcaaaaggaatctagaataaagtggggagacttgtgtgtcgtaggtctggatcctttaatagagcttacaactccctgtaactggctccagggagatctgatattctcttctggcctctggggcaccaacacgtannnnnnnnnnnnnnnnnnnngctcctgtctgcaagcacaacatagcattagtagtagtgtcagggtttggtgcctgcccatggaatggtttccaagttgggacagtcacaggccagtcattccttcaatctgctccatttttgaacctgcatttcttttctggagcaattttgggttgcaggttttgtagataggttgatgtccccatccatctacccagggtcctgtctgactactggaggtggtctcaggttccatatccttactttgggccattttggctaagctcacccacattgagtcctgggagcctcctcattccaggtctagacgttcctcccaccccacacccctgacaactgcatatttccattcagtctcctgtccctctcagcttttctctttctccatatctgatcctgtttggtctattgtttttatgtgtatatatgcttgggtaagaagaatacactacacttctgacatgttcaaatatctgttaatccagaataaggtcattgtactctcctttgcaacctttactctctggttctcaccattgataactttgaatgtcttataaacaaacataaacttaaccaaccttttcataatgcccctgcacttcacaaatgactgtatcatgtcccatatcttaccctttgtctcaaattgttactctatactttctacattgattttttatctgaattctgcatatgagaaaaaatgtatttgtctaagtcttacttgtatgcttcatattttggttccactcaatttatttgaaactcaaatctcttatttgtagctataggcctgtgagctttcatgggtttaagtgcagcactacatgcatgagtccacaggagggtacaagagagcatttcttcccctggaactggagttggaggtgattatgagtaagatggttgcaagggaaacaaacttgggtcctctgcaagagtagtaacaatggtaaccactaagcctcatctctaagtccattctctaattctctaatttcattcttaatagatgactagtattccactgtgtgtgtgtgtgtgtgtgtgtgtnnnnnnnnnnnnnnnnnnnnccaacaacacacacacacacacacacacaaacacacacgtataccaaagtttaaaataagatagagtgttaaaagaattccatgaagaacctggagactcctagattgctacctgcttcctataatcatctcatttgatccttgtttgtttttttaaaaaaatactttttaatatatgtttgaaatcatttataactacatcatttcccctcttccctttcctccctctaccccatgccttctgcccctttgctctcatctcaaattcaaagcctcttattctttaattattggtgtgtgtgttgctaaataactaagtccaacctgctcaaactaaatgtatagtgtcacttagggtttgggttggtatgtgtatgtatgttttcaggtatgaccatttggagaagatactttctcctgctctcagtgttccttagttgcttgtaattctttgtgtagatttgaggcctcctgagttttccccttccatgttagtgtggctgttgtcatctttcttcaggtcatgtttgtgcagccatgttgctgccccattttcacattggaatgatctgtaggcttttaacagatagtacagtctgtgtcccaccccaggcagttgaactacaactcccctgggggaggtggtagtggtggaccagtgcatgggatacattataatagcattgaaatgatgttgatttgcggtgatgttgagctctgggattgactctgctcaggagagttcttgtttcaaccagccatttcataagcaatgcaaatcttagaagaagcttgtatacaggatcacggattctagtagtggactccttgttcgtcatctcagcttttgtgtggttttgtatgtggattttgcccttgtgcttatgtctggtgtatcgtcagtgcagtgtttctttatgccatccagcacaatgattggtctctgttttgaagcaaattgtggcaaatggtgatttgatgtttcttgacgtagggaatcttctttattataaccttattagcactacctatttgaaaataaatgataccgtgaaacatgttgcaggatatttggtcactctgaggttgtgttatttactgaaaaaaaaaaaaaaaaacctttttagttgtggtgtggctcagtcttagcagacacctttaagagcttttggcatgaatattgcaaacaagattaaataaagtcaattataggtcaagaggtggaacaagcaacgaatatacaggaagtgaacacaggcttattaagagtaagagggagtgaggacagacacagaggaagtagcagggaggggcattgagattgcaagaggttggttgagacctcttgagagagagggatgcctgaggaggaatgtcagctgggtgctttctctgcctttctgtagtgtctttcaccctactttctgtagtgtctagcccctgagacttcattggcaaattgagtgattgagattttgttaaaaaactttcggttgaaatgtaaatgaagaaactaataaaaaattgttaaaaaattctagtttttggtgaatagcttcttgagttctttatatattttggatatatatttatatatttggatattagtgaagatttttttcccaatctgtaggttgccagatttattgactatgtcctttgccttacagaagctttccagttccatgaagtccccttcttgatcttaagagcttgagccattggagttctgtttaggaaatttccccctgtgccaatgagttcaaggctctttcccactttctcttctattagattcagagtacctggttttatgttgaggtcctccatccatttggacttgagctttgtgcaaggtggcaaatatgggtctattttcatttttctacatacagatagctagttagatcagcaccatttattgaagatgctttcttttttccattgtatatgtttagcttctttgtcaaagatcaagtgtgtgttaagtgtgaggttttatttctggatcttcaattctgttccattgatcaacgtgtctgtctctgtaccaataccatgcagtttgttttgttttgtttttgttttgtttttaatcactgttgctcagcagtaaagcttcaggtcagagatggtgattcctgagctgttcttttattgttaagaattgttttagctgacaggagcgtgatatagctgtctcctgtgaggctctgccagtgcctggaaaatacagaagtggatgctcacagtcatccattagacggaacacaaggtccccagtgaaggagctagagaaagcacccaaggagctgaaggagtctgaagccccataggaggaacatcaatacgaactaaccagtactcccagagctccttggaactataccaccaatcaaagaaaacacatggtggaacttgtgtttcatatggctttagttatatatatagcagagaatggccttgtcaggaggtccttggtcctgtgaaggctctatgccccagtataggggaacaccaggaccaggaatgggagtacgtaggttggggagcagggggagggggaggggatagagattttcagaggagaaactaggaaaggggataacatttgaaatgtaaataaagaaaatttctaaaaaaaaaaaaagaaaaaaaatggagagaaaaaagagaattgtttttacaatccttggttttttgttttctgatatgaaattgagaaatgctctttccatgtctttgaagaattatgttgggattttgatggacgttgcattgaatctgtagattgcctttagtaggatggccatttttactatattaattctgccagtccacaagcaggggaaatctctccattttctgagatctttgacttctttcttgagagacttgaagctgttgtcatacaggtctttcacttgtttggttagaattaccccaagatattttacattatttgtggctatgtgaagggagttgcttccttaatttctttctcagactatttatcattggtataaaggaaggctactgatttatttgagttaattttatatctggccactttgctgaagttgtttatcaactggagaaattctctggtagaatttttggagtcacttaatgtatgctatcatatctgcaaatggtgatacctttatttcttctttgtcaatttgtttccccttggtctctttttgttgtcttattgttctagctagccctttgagtactatattgaatagatatagggagagtgggcatccttgtcttgttctcaattttagtgggattgcttcaagtatgtaatggggtatagaactaaactgagaattcacaacagaggaatcttgaatggctgagtagcacctaaagaaatgttcaaagtccttaatgattagagaaatgcaaatcaaaatgaccccaagattccaacttacaccaatcagaatgggtaagatcaaaactgcaggtgacaacacattttggtaaggatgtggataaagaggaacactcctccattgcttgtgggattgcaaactgctatagccactttggaaatcaatctggaagttcctcagaaaattggaaatagaactacctgaagacccagcaataccactcttgggaatatacccaaaagatgccccaccatgccaggggcatgcgttccactatagtgtccttgtttgtaatatctagaagcagaaacaacccagatatcccatgacagaagaatgaatacagaaaatgtggttcatttacacagtagaatactactcagctgttaagaacaaggaaaccctgagttt

SEQ ID NO: 779 - DNA, 1069 bp, Mus musculus
agcagaggtgacagggtcaccgcggagcctgcagctcctccgccgccagcgactcagccctgtggttctttgagtcgggccgtggctcggggtcttcgccgcccgttgtccgccgtggtgggtgcggctctgatgctgcggcaggctccggacgcccggagctctggaggaatttaagaagcttttattcatgtgcatgtcatagaagatgaattcatcctcttctactatgaatgaagaacctgatgctctatcagtagttaaccagctacgggatttagcagcagatccactaaatagaagagccatcgtccaggatcagggatgtttgcctggccttattttatttatggaccatccaaaccctcctgtcgttcactcagctttgcttgcgctacgctacttggctgaatgccgtgcgaatagagaaaagatgaagggagagctggggatgatgctgagcttgcagaatgtcatccagaagactacaactccaggagaaacaaaacttctggcctcagaaatctatgacatccttcaatcctccaatttggctgatggtgatagttttaatgaaatgaattcgcgtagaaggaaagctcagttttttttgggaactacaaacaaacgggccaaaacagtagttttgcacatagatggtctcgatgatacgtctcgacgaaatctatgtgaagaggccttgttaaaaattaaaggtgtcattagctttacttttcaaatggctgttcaaagatgcgtggtgcggatccgttcagacttgaaggcagaggctctggcgtcagcaatagcatcaaccaaggtcatgaaagctcagcaagttgtgaagagcgagagtggagaagagtttcaacaggtttttattttattttgcattgtcacacatttatttaaaaacctgtagcccttttggtagtgatggtccaggtcggttggtatttcagactgaagtttgtgtgtgtctaggtgttcaaggactctcagagatctcaaaggcaactataatggcagtttttgaaatatattgtaagataataaaagataacaatga

SEQ ID NO: 780 - protein, 236 aa, Mus musculus
KMNSSSSTMNEEPDALSVVNQLRDLAADPLNRRAIVQDQGCLPGLILFMDHPNPPVVHSALLALRYLAECRANREKMKGELGMMLSLQNVIQKTTTPGETKLLASEIYDILQSSNLADGDSFNEMNSRRRKAQFFLGTTNKRAKTVVLHIDGLDDTSRRNLCEEALLKIKGVISFTFQMAVQRCVVRIRSDLKAEASAIASTKVMKAQQVVKSESGEEFQQVFILFCIVTHLFKNL

SEQ ID NO: 781 - DNA, 50807 bp, Homo sapiens
  misc_feature (1)...(50807): n = A,T,C or G
gcttcctatgtagggtaggaaacctgtccgtatttttgtatggcttttgaagaggctgttgctgattggctgtctctcttaccctcccattgcaattgatcccggaggtcgctgggctgtcactggatctctgatgttcttgccccgggtggcacaagtctcttcctagtgagggctttcctccttcacccagagcattaactcatttactcaacaacggcttgttgggggacaactatgacagcagaaaggttgttaaaagccttgagccacgccctaagtgagcctacaagataacgaggagataacacaaactaaacaaaaacacaaacttaatcaaatattataatggaatcgaggtgggagcctgggcgcctccataatgtctcagggaatacttcctgagaagtgagtgcttgtctgaggctgaatgaaagagcaggagctttggagccgaaagggtgggagcaatggaaggtggcgattctgtcaaagggcactaatttcttcctctgagatctttccggagggtatttactgctaagctaatgaagcttgtgtttcaggcacgctggctttcgccagcctttccaaagtccatagaggaactttagcatcgagtttacgagattatatgttgtttcctacttatttattaaaaggaaaatgtcttaaagcacccctcaaagaggcatgggttaagacctgtcttttttgtttttttttttcctttccaacttcccttccttcatacttcctttcatgctagatacgctggagtggccttggacattttggggatctaggtggggaaaagagagttgaattgaacttgggccacttcgtgataagttactgctgtctttcctggtgctggattggcttcgagcaagacatgctctgccaactcactcagtgctatgatacagggatgggtcccttggcacctggccctagaagtatgtggctagtggaggagaaagaaagtttgaggccaggcgcggtggtgcatgcctgtaatcccagcaatttgggaggctgaggcaggtggatcacttgaggtcaggagtttgagactagcctagctaacatggtgaagccccgtctccgccaaaaatacaaaaaagctgaatgtggtggcacgtgcttgtaatcccagctactcaggaggctgaggcaggaggattgcatgaacccgggaggcagaggctgcagtcagcggagaccacgcacaccagcctgggcgaccaagcgagactctgtctcaaaaaaaaaaaagggctggacgcagtggctcacgcctataattccagcactttgggaggccgaaatgagcggattatttgaagtcagaagttcgagaccagcctgacgaatatggtgaaaccctgtctctgctaaaaatacaaaaaaaaaaaaaaaaattacccgggcttcatggcgggtgcctgttcccagctactcgggaggctgaggcaggagaatcgcttgaacccgggaggcggaggttgcagtgggccgagatcacgccactgcactctacactccagcctgggtgacacagcaagactctgcctcaaaaaaaaaaaaaaaaaaaaaagagagagaaagagagtttgaaatgcactaagccagaagctaatctaggggagatcttctggtcatcacgcttctaaaattgtaagcaggatgctttgctttttgtttttaattaactactttagaattattttagatttacagaaaagttaagagtacgtaaagttcctgtctactcctcacccagtttccctaatgttaacatcttacattaccatgatacacttacaaaactaaagagccagccaggcgtggtggctcacacctgtaatcctaacactttgggaggccaagctgggaggatcatttgagcccaagagttcaagaccagcctgagcaataaagtgagaccccatctctattttttaaataaataaataaataaaaggaaaaaacaaaaaaactaaagagccaatattggtacattactatttactaaactccagacctcatttgggtttcagtaaggttatttttctgtttcaggatctaatctaagatgccacactgcatttagtcatcaagcctccttagtctcctctgatctgtgaccgtttttcagtcttttcttgtttttcatgaccctgatatgaccatgacagttttgaagtttggtcaggtattttgtagaacgtccctcgatttgtgtttgtctgatgtttttctcatgattagactgtggttatagggtttggggaaaacatcacatgatgagatgaccttctcatcacattatgtcagaggatacatgctatcaccccaccttattactggtgaggctcacacatggtaatatttgctagttactccactataaagatgtattttcccactttccatattcgtttctttgaaaacaagtcactaaatactgctcacactcaagtggaacaggggattaaacttcaacttctggagtggacaatctataagccttatttggaattctgtgaggaagatttgtctttcctcatttattgatttatattcgatcatttatttatatagacatatagactcttgtatatttattttatactttgtttcataagtatactatgatttttactgttactcaaattgtttcagctttggccattgggagttattttaactaggttcatgtggtccttttgttttttgattatctccttttttctggaactataagatgctctgtgcttatcttgtatttttccttacccagccctaaaatcagccatttcttcaaggagtcctggaatggtatttagaaaccaagatttaggtactggatgatctcattgctactgggatatcacttaatttattattttattttattttttatggagatggcatcttgctgtgttgcttaggctggcctcaaactcctgggcttaactgatccttctgccttggcctcccaaaatgctgggattacaggcatgagccaccatgccaggcccaggatattgttgaatttagcttctcttataagacagagctaggaaatatattaccaccttgttttttaattctttgtttacatctctgtgatagtcagcctctaaggtgacccccagtgatccttgactcctggtattcatgccccttgtataatcccctctccttgagcatcgacttgcttctagtgaatagaatacagcgagaatgaaaggatgtcatttctaggttaggttacaaaaagattgtggctttcattctgtttgctccttctagctctccttcacgtgctctgaggaaagacaatgtcatatgtgagctgccctaaggagaagcccctgtggcaagaaactgagggaagcctctgaccaacactcagcaaggaactaaggctctccttccatcagctatgagaaactgagtcctactaacggccatgtgaggcgagcttggaaaaatagcctctctcactcaacccttgagatgactgaagccctggctgacctcttgatagcagccttttgagagatctgagccggaggcacccagctaagctgcacatggatgcctgatgcacagaaactataagctagtaaattattattgtgttaagttgacaacttttgtagaaatgtattaggaagcgatatacaggacgggcacggtggctcacacctgtaatcccagaacttcgggaggccaaggcgggaggattgcttgagcccaggagtacaagaccatcctgggcaacatagtgaaacctcatctctagaaaaaaatatacgtaagggctcggtgtcgtggctcacacctgtaatcccagcacttggggaggctgaggcaggtagatcacttgagttcaagaatttgagaccagcctggtcaacatagtgaaaccctgtctctactaaaaataaaaaaaattagccaggtgtggtggcaggcgcctgtaatcccagctactctggaggctgaggcaggagaatcacttgaacccaggaggcggaggttgcagtgagccaagattgcgccattgcactccagcccagggggccttgcaagacactgtcttaaaaaaaaaaaaagaaaaaagaaaaaatatacataaggtagccaggtgtggtggtgtgcatctgtagtcacagctactcaggaggctgaggtaggaggatcacctgagcctggggaggttgaggctgccgtgagccctgatctcaacattgcactccatcctgggtgacagaatgagactctgtctcaaaaattaaattaagttaaattaaataaataaaattaaatacaaatgacacattagataattaatacaatttatgtttcctccacaagatcagtggctctcaaatttcacaatggagctgtttaaaactatgtatgcccaggcctctacatctgcaggtctattcggcagaactatgattgttctgcatagctagctttggaaacaaatgtggaagattagagggcaatccatttggggatgtgagaagaaaatagaatacttttctttttagtgtatttgatcctagagttcttgacccaagttaagggctcagttttcttggcagaatctggaataactgaaacttcgtctgccatttgcagtttttattgaatagaagagaaagaaacagagctctcttactcactgtatggccttgaaaaagtcccttatcttttttgggcctccgaattctgagtaggaaattaaaggattataaatgccattatttaggcaaatagatttattcattgttagatgtattaggcaaaagaaaggtgaccaaggctgattgtgagcttccttcatcatagagatttaacaaaatatcagattcccattaatattggtagacaatgaagcagtatactgtagtagaaagaatatgggcttcagaggcagacagacccttgttggaaatatgcctctgctaatgactagtagtgtggtcttgagcaagacagtcagccttccagggtctcaatttcttggctttcacagtggcagtagtagacggctcaaagagtagccttgaggaccgattatgtaacatttgtcaaatgctcaagggagtgcctggtttagctcaagggcccaataaataataaccatgtaggatatatagtcagcttgggtggttgcgatccagtggttagtaaagtaggaacagaccaatgtctatgtcagcctgtttctcatataaggcttaatgacagccccatttgttgagacaggttgaataatctgcaaagcttacaaaggatctttcgtggaagttgagacccttttcctctagttctgttttttctttccccagctctaattgccccctggagaaaatgtaacacactgaaataagcttcaggaggttctgcattagaatataggaatggatggtaaaagattattgggtaggacggtgaagtgcccttctgaagggtgctttgagacacagtgaggctagatgtgtctgggagaggctgggctacaggagagctggtcaagaccagttagtgggccaacttcatctcacctgaggcaagagtcagtgatgcatgcagtgcccattgacttcaaagctcctttaattactaataaaagcacatattgggctgggcgaggtggctcacgcctgtaaaatcccagcactttgggaggccgaggcgggcagatcacctgaggtcaggagtttgagaccagcttggccaatatggtgaaaccccattcctattgaaaatgtaaaaagtagccaggtgtggtggtgcatgccgtaatcccagctactcgggaggctgaggcagtagaatcacttgaatccagaatgcagaggttgcagtaagccgtgatcacaccactgcactccagtgcactccagcctgggcgacagagcaagactccatctcaaagaagaaaaaaaaaaagcacatattgttgggaaaagataacattttaatctgcatttattatctaaatctcaatttgaatgaatgtttttaccatggtgcccaatgaaaaattgttgagctattttgtttcagtcatagactttggggcatatttggttgttctgagtcttgaaacagtttaattcttcttagatcagtgcatagtgaccagaaaaaaaaaaatctatatccaaataggttaaaggatcaccactttccagagattgtggtattcttttctataaaccagctcttgggattgaccctgacctatagagctgtttttctttttttgagacagagtctcgctctgctacccaggctggagtgcgatggtgtgatctctgctcactgcaacctctgcctcccgggttcaagtgattctcctgcctcagcctcccaagtagctgggactgcaggcgtgtgccaccatgcctggctaatttttgtatttttagcagagacggggtttggccattgtcggccaggcttgtctgggactcctgacctcaagtgatccacccacctcggcctcccaaagtggtggaattacaggtgtgagccgccacgcctggccagctgctttttaaaacaagtccaatgtatccattttttttcttgtttaacttttgggtttccagttttgttcaaggtttccctctgcttctaggtcatatatgtagtcttcaaggtttgagtttttaatacacctggaatttatttttttggtaaatgatgtaatatatggatccaattttattttcatctggatgggtagtgagagcttcaatttataaatatttctctttctttaaaaatttctactttgacattttcaaaactacatattaatttgatagtacatgtatagaatttaggaataaatacatataaatatgtcagagctatgtactcgaatgcatatatataaagctgaaagtgttgcctgatcaaaaagttttgaaatccactgtttcttgagctctttagaccatgagctgcttgagggcagggattgtgattttccttacctttgaatccatagtcaagattgtctatggcacattgtatgcgttcaaaaaccggttgttaaataattaaatgaatgaaactgccagtatctgaatcatgtcttaagcaacacagctactgagaaacgacattccagtgtcccgtgggaagatacctgaggctaagaacaagcaatgactcacaatgggaggtagtataacttcactggtgtcaagcttagacattttttttttttttgagacggagtctcgctctgtcgcccaggctggagtgcagtggtgcgatctcggttcactgcaagctccgcctcccgggttcacgccattctcctgcctcagcctccagctgggactacaggcgcctgctaccacgaccggctaatttttttttttttttttgtatttttagtagagacggggtttcaccgtgttagccaggatggtctccatctcctgatcttgtgatccgcccgcctcggcctcccaaagtgttgggattacaggcttgagccaccacgcccggccaagtttagacattttaatatgggaatacagattattaaaatctttaaatacctccctaaggcttataatccataggtgcttaggaaactggtaattatttttttgtgaacacaccccctgcttcttaatagcagtcatctattctgtaatggcagtgtgcaggaagaattacttttctcaataatggcagaagcatgattatatttagtatttatttatttatttattttgagacggagactcgctctgtctcccagactggagtgcagtggcacgacctcggcttagaacctccgcctcatgggttcaagcaattcccctgcctcagcctccggagtagctgggactacaggcgcccgccaccacgccaggctaattttttgtatttttagtagggacgnnnnnnnnnnnnnnnnnnnnnnnnnnnnnnnnnnnnnnnnnnnnnnnnnnnnnnnnnnnnnnnnnnnnnnnnnnnnnnnnnnnnnnnnnnnnnnnnnnnnnnnnnnnnnnnnnnnnnnnnnnnnnnnnnnnnnnnnnnnnnnnnnnngaggccgaggcgggcggatcacctgaggtcaggagatcgaggccagcctgaccaacatggagaaactccgtctctactaaaaatacaaaaattagccgggcgtggtggcgcatgcctgtaattagggaggcggaggttgcggtgagccgagattgcgccattgtactccagcctgggcaggaagatagaaattctgtctcaaaaaaaaaaaaaaaaaaaaaaagtagagacggggtttcaccatgttggccaggctagtctcgaactcctgaactcaggtgatccacccacctcggcctcccaaagtgctgggattacaggcgtgagcccccgtacctgccttcctaatatattaacgttaacaaaaatagcaagtttaatttcctgggatttttttttagttgtttttaataactatactgaagaaagtaactcaaccaaatgggttatgtttaacctggctgtgccctttggacttttttttttttttttttagaccgtctcgctctgttgcccacgctggagtgcagtggcgtgatctcggctaagtgcaacctcagcctcccaggttcaatcgattctcctgcctcagcctcccaagtagctgggattacaggcgcccgcaacgacgcctggttagttttgtttgtttgttggttggtttttagtagagacagagtttcaccatgttggccaagctggtgtcgaaatcctgacctcaagtgatccgcccacctcggcctcccaaagtgctgggattacacgcgtgagccaccgcacccggcctatttgttttctacttagcttattttgctcctattttgagttcattggaagcaagaggataaccgagaacaagggaacggaaagaaattcaagaagtagctgcttggtttttaaattcaagaagtataggagatattagcattgaatacaatctgggatatttattgttatccacactcttttcctattagaggcctctcatattccttctgactttaatacatgagctacgtggccgaatcaaactgttatggagagaatccagaatctgtttattggggttattgactgcaatggatacattattctcaaagatctgcctgcgggttaagagtaggtttgtatttaaagaaattaaaaaaaaaataaaatctatgcctaaacaaaaacttcaagtgattgccatctataaaacaagtatataaatccttactttgataaactacatagaagatattttaaaatatgaatttgagaagattgtgataataaattccttacaagaaaaaaaaaaaacctcttccccaaaataaattgctacttaaacgaaaactgtactttgcgtctttcaagctgctagggagacagtggacaccaagaagaaataaacgaaaatccaaggaacgcctaatgtagtgctaacgtccacagtaaaacacaaaacaaaaaaaatttatgaattaagactcacagaagcgaataaaatattaggtattgcctttattagaattgcaagagttgctaaagaaatactcaatttgaattaccgaatgcaggaccggagaagtcctgctggccccacaaagctgggtattgaggttgtgaaggtgtgacagtttcccagccggaatcaaatttcttcggttagggcttggtggacggcgagtagttagggccaatatagtgttcctgggtcctcattggatcagtcccttgactcttagtgtatttccctaaaccacctatgagcgcttcactctaaaaagaccttcactgattggatactttatcctcacgttggactcattatcagccaataggagggcataagcgacagaggcgtcaggtcacctgggaagagtctgcagagcctttgcccgccagcgccttcgctctttggctccctgagttagtccggttgtttgcgatcgccgcggccggggctgcgaaccgaagggctcgctccgcgccgcctgggtctctacctcatccgtaggtgtggccctgatggtgtggcaggctctggactcctaaagctctggagcggtatgtggggtccacgggcggcagacaaagcagtggagccgggaaggccgcgggaagcggcccctgtaccgaggcagcgaatccgcctgggaggggcgccccgcctccctcttgtcagatccagtagtgggtcccagtgaggcgctttagcacgctctacccccacgtgtcccgtgaatctgttagctttgctcatttcttctttgtcccccctcacatctgacttttactaaccccagtattattaatgggtgtcatctcatcttttcatctctccaggttattctttggtaactttctgttagttttgtgcacctgcgtgtctcctaagagcggaaagacatagttgtgttaggcttaattcaagagagaccagtgttcccatttttatatttaagactgtgttttgggagggcgggggtaggtattcgtgcagttagcaactcctttcgtgatacttagtgcactgaagtgtcagggcagtgcagaaggtacctccaacacctggcaggacagatgtccccacatgagcaagtagtattctggtttggtaattgctggtgtttgattttaccatttcgcgttcttactttaatctgataaccgctgaggattgttatgtgagataactgaggctctaagaacttaacttctcaaagttacagttaactcttcgagtaaggggaaagtcagatttaatatcaatgcttatgttatttttatcaaagcccacctaactgaataaggatttaggttaaacgtattccctctgcatctcttggcatgtgagaattaaatctttgaattgaatggtgaatcttgactgtacgagaaggaaaaatcttgcaggcatctgcctaattacaggtgtctcacatgtatcttctaactgcttgcttctcagagtgtgacaagtagcataggcctcacctggaagcttgttggaaatgcggaatctcagactctcccacctactgaatcagcatttgctttttaacaggaacctttaactgaccagagtgctcattaaacgatgagaagtattctttgtcatagaatgatttgtttgtccaagttgaactaaacaagagaaagtaaaggtataaaaagtcttttcacattttcatcatttgttagtgaggctatggtctttattttttattttttttttgagacggagtatcgctctgtcgctcaggctggagttcagtgatgcgatcccggctcactgcaacctccgcctcccgggttcaagcgattctcctgcctcaacccctggagtaccagaggccttggcctcccgaagtgctgggattacaggcgtgagccactgtgcccggcgtcttgtagagttttattttattattactattattattattttgagacggtatctcgctctgttgcccaggctggagtgcagtggcacaatctcggctcactgcaagttccgcctcccggtttcacgccattctcctgacccagcctcccgagtagctgggactacaggtgccccccaccacgcctggctaatattttgtatttttagtagagacggggttttactgtgtgagccaggatggtctcaatcacctgacctcgtaatccgctcgcctcggcctcccaaattttattattattattattattttgagatgagctgtcactctgtcgagctcccaggctcaggtgatcctcccacctcagcttttgtatttttagtagagatggggttttgccatgttgcccaggctggtcttgaacttctaggctcaagagatccacccccctgggcctcccaaagtgcttggattaccggcctgagccatggtacctggccatcttacagagttttagagcttagcattttattcatatgttcatagccatgtttaaaagagatgcatttatacagcagcataaagttttagtggctctgccactgccatccagcctgggcaacagagcgagaccctatcttaaaaataaaataaaaattattttgcactttgccaaattgggcatatagtgggtaggatagactgaatcctgaattcatttaaaatcattttttccaacctatgaagatagacttttttttttttttttaagagacagggtcttgctatgttgtccatgctgtagtaaagtggctgttcacaggcaagatcatagcacactgtagacttgaactctggcctcaaccagtctcctgcctcagcctcctgagttactgcacccagcaaaggcagacatttttatcaaacagcttgagtgtgtgaagttgatgaaattaacacagaaacataatatgtatctaatacatgattggggttagagttgtaactttcgtttatctgttttcagtttcctaactgttctattgctatctcataaaatctgctttgtgaacgctgcaatccacagaaatattgatcatttaacagaattcaagcaatggccaggcgtggtggctcacgcctgtaatcccagcactttgggaggccgaggagggtgggtcacctgaggtcaggagttcaagaccagcctggccaacatggcgaaaccccgtctctactaaaaataaaaaattagccgggcatggtggcaggcacctgtagtcccaagctacttgggaggttgaggcaggagaattgcttgaacctgagaggcagaggttgtgataagcctaaatcgtaccacgccactccagcctgggtgacagagtgagaccctgttcccccccaaaaattcaggcaatgtggtagttagaaatggatgtcagagtaacttgttatcatcaagaatatcaaggtaagaaaaatgagtcttaactgtgaggagttctctcctgaagttttacataaaacccttctaatttgagggacaaatcacagcttctgtcagcttttcttgccttcctttaaatgccatgggaaatgcagtgaccacagtttctgcctctgttatacagtaaacccatgacattgtctgattcaaccaagcatgaatcgaaaatactgtacaatagtctcaggatttgaaacctgtggatacagagcaccaactgcattagctaaggtctttgatggatcctgtgcagatgctgatttgagcccaatccttatcagtgctctttgaagactggaaggttttttgtttgtgtttttttttttttagacggagtctggcactgttgcccaggctggagtgcaatggcactatctcggctcactgcaacctccgcctcccgggttcaagcgattctcctgcctcagcttcccaagtagctgagattacaggcacctaccaccatgcccagctaatttttgtatttttagtagagacggagtttcaccatgctggccaggctggtcgcaaactcctgacctcaggcgatccggctgcattggcctcccaaagtgttgggattacaggcgtgagccactgcgcctggctgaagattggaagttttagttgttttgatttttgttcatcccaaaggaacaggaaagctatgtaactttttttcagtatagttcctactgaatagttatctaatggctccttgaatgagaatggaactcttcagtttcaaggccagcgttgtatgcaaaaggccaacacccagagtgtttggttcttttttccctgatttattttaaaacattttattgtaaattggtaatttatagttgtatatatttatggggtacaaaatgatgttatgattcatgaatataaagtggagcaattaaatcaagctagttaacatatctatcaccttatacttattttttgtggtgagaccacttgaaatttactcacagcgatttttttctgttttgcttttgagacagtctagctctgtcacccaggctggagtgcagtggcacaatctcggctcactgcaacctccacctcccgagttcaagcagttctctggcctcagcttcccaagtagctgggattccaggtttgcgccaccatgcccggctaatttttgtatttttagtagagatgacgtttcaccatattggtcagactggtctcaaactcctgacttcaggtgatccaccggctttgtcctcccaaagtgctgggattacaggcataagtcaccacccctggcaactcatagccattttaagaccgagaatatactgttttgttttgattttttttttttttttttgagacggagtcttgctctgttgcccaggctggagtgcagtggtacaatctcggctcactgtaacctccatctcccaagttcaagcgattctcctgcctcagcctcccgagtagctgggattacaggcgcccgccagcacgcccagctaatttttgtacttttagtagagacggggtttcaccacgatggtcaggctggtcttgaactcctgacctcatgatacgcctgccttggcctcccaaagtgctgggattataggtgtgagccaccgcgcccatctggaatacactattattaactatattcaccatcttgtgcaatagatgtcaaaaaaaccctcacttattcctactacgactttgtatcccttgatcctcatctcctcattttgcctatccgccagccttttaccaccattctgttctctgctgctgagttctattgttttagattcaacagttaagcaacaacatgcagcatttctctttctgtgcctagtttacttcatttagcacaatgttctccagttctgtccatgttgtcacaagtgacagaatttccttcttttttaagggtgaatagtattccatttgtgtcattgtgtatgtatatcacattttctttctttctttttttttttttttgagatggagtctcgccctgtcatccaggctgtagtgcaatggcgcaatctcggctcactgcaacctccgcttcccaggttcagtcagttctccctgcctcagcctcctgagtagctgagattacaggcacccaccaccaagcccagctaatttttgtatttttagtagagacagggtttcaccatgttgaccaggctggtcttgaactcctgacatcaggtgatccacccgccttggcctcccaaagtgctgggattacaggcgtgagccactgcacccggccgatatgctgatttttttttgtttgcttgttttgagacagagttttgctcatgcagtggcacaatctcagctcactgcaatctctgcctcctggctttaataaattctcctgcctcagcctcccgagtagctaggattacaggtgcgtgccaccatgcccggctaattttgtatttttagtagagatggggtttcaccatgnnnnnnnnnnnnnnnnnnnncgctttgtagagatggggtctccttatgttgctcaggctatctttgaactccttggcttaagcgatcctccctccttggcctcccaaagtgttgggattacaggcgggagtcatcgcacccggctatcctgggttattttgaagcaaatcccagacattatataatttcaattattttacatatttctatgcctctgtcatgatgaataatcatacatataataatttgctttctagaggggtcaagtaaaataagggacatattaaagtgtagacagtgctcatttagtttgtactaccagaatttaggtaactgctacagtgcagtttcattatccttgtgctcaggttcttagtactctgctaaaaatccaaaaaaaaaaaaaaaaaaaaaaacaattagccgggcgtggctaggaggctgaggcaggagaattgcttgaaccgggaggcggaggttgtagtgagctgaggttgtgccactgcattccagcctgggtgacagaatgcgactctgtcttggagaaaacaaacaaaacaaacgaggaaaacaaagtatgcaaagtggaaagactgctgatgagtttaggaaatagtaaataatattttaggccagttctatgctaactagattttgtgatgtggggcaaattattgaacctctctatgactagctcctcatctggcaaatgaattatgtcaaattctacttcattcttcctatttttgcttttctgttaggcagtagaatatggcataatcagatggacagaggtatttagattcagtgtagattcactatgatctttcacactctactggcctgagccacaggctaaatacctttcctgtcttcttgatttacagacttctgcctcctttttccaagggcattttattctttgtagacagagtatgctaggtttttgttcactgatgaataagaaagctgtaaactagccacttttccctcgggcacttgttttagggctagaaatagtctagaggataaaaagcactggcaatattaacagttttagaagtatagcaaagcttactagcttgaactgtaaagatctttattgtgattttattgttaaaatatgtatgctaaaacagaatttattggaatattgaggacaacatatgttctttaaacattgtgcacacaaattttttcagtcgtcttacgttcattttacttttctcaaactgtagagttgccgatttctaagtttttatgtgatttagttttagttacctgattctttctaaaggtgttgtaatcctggttatttcacaagtgctataatatacctcagcagcctagaactaattctgcaaaccttttctacagaatttaagattttattcatgtgcatggcatagaagatgaattcttccacttccaccatgagtgaagagcctgacgctctatcggtagttaaccagttacgggatctagcagcagatccgttaaacagaagagccatcgtccaggatcagggatgtctgcctggccttattttatttatggaccatcccaaccctccagtcgtccactccgctttgcttgtaagttgcctttagtaatttcaatctctgttctatttttgcagttaaggtgagaatttggaaaaagtgctagatgacaaggtaaaaaaacggaaagagagcaattagttgtttgtatttatgtaggtacaaacatatgtatgtgtggtctgtggtctgtttacaccagtggtaacatgctacattgtttttattctttatttttttttttttgagtcatctaggcctggagtacactgtggcaggatcttagttcactgcaatctccacctcctgggcttaaaccatcccccccacctcagcctcccaagtagctgggatgataggcacacaccaccatgccagccaaatttttgatattttgtagagatagggtttcgccatgttggccaggctcaaactcctgagctcaagtgatccttccactttggcctcccaaagtgttggaattacagctgtgagtcaccatggccagccttgtttttattcttttatacaaattgttgcatactccatgcatggaatgtcctaccacttccttttcatttaacaatcttgaggattggatcatatcatacacagagacactcaaagaggcacttattttgtttttattttataacagctttttaagatgtaagcacacagcatcatataattcactcatttaaagtatacaattaagtgattttagtatattcacagagttgtgtgtcaccatcaccacaactttttatttttatttattataaataaattttttttttttttttttagtagagataggatgtagctatgttaactaggctggtctcaaactcctggcctcaagtgattcttctacctcgagctctcaaagtgcttagattacagatgtgagccactgtgcccggcccaccacaactttttatctattgcttcccagaccccaacactccctgtccctaagcaactactaatctactttttgtatgtctatatttgcctattctggcaaaaatgcctatatattttgcatataaatagggccagacgtggtggctcactcctgtaatcctagcactttgggaggccgaggtgggtggatcacctgaggtcaggagtttgacaccagcttggccaacgtagtgaaaccctgtctgtactaaaaatacaaaacaattagccgggcgtggtggtgggtgcctgaaatcccagctactcaggaggctgaggcaggagaatcccttgaacccaggaggcagaggttgcagtgagccaagattgtgccattgcactcgagcctgggcaacaagagcgaaactccgtctcaaaaaaaaaaaaaaaaaagttgttaaaaaaattaatgttttggaaattttatctattgccctttacttaaggactcgtgatgattccccatttagtctaatttcacaagtttgtacagaaggcatatagacttttccttttggaaaaaaatttctattttgcctttacagaatgaagtttagcagtcaaaaaagacattggtgtaagagaacagtagtaacaaatgggaaaaatggcacagcccccagtctgggttcaatttcaataagaaatgcaagaaggatgagaagaaagagggggttgatctatagatagggacttggggctaaaggaagtaagtcttttttatttttaaatagactagaatatgtctaagttcagagggcaagggctactagaatgggagaggtttgaggggaaggctctcataattgcagaaaataggaaagatttgctaactgaggagaatgataaagttgttcagcagtgttgagggctgattagtttggtaatactgaatcgatatgattcaggcctgttgtaggctcacagagccaagtacttggatttgtctagagttgttacttggccaggttaagttgggcagaatgattgtgcaagggagtttaggatcttggcaggattggttgaaatgatatacagtagatactaggctgaataggaagggaagtataaagtcatggagggacagagctaaggagagggatcagtgagtgaaagttcccaagaggctgaagaaaagatttttttgttgttgtttttgagacagagtttttgctcttgccacccaggctggagagcaatggcacaatcttggctcactgcaacctccgcctcctgggttcaagcgattctcctgcctcagccttctgagtagctagaattacaggcccgcaccatcacatgtggctaatttttgtatttttagtagagacggtttttcaccatgttggccaggctagtctcgaactcatgacctcaggtgatctgcctgtcttgtcctctcaaagtgctgaaattacaggtgtgagccaccatgcctggccattgggtgtgttgtttttatgatttccttttttcgtcactgttagcttattagtatacacttttgtttttattttatttagtggttgctgtaggttttacaatatgcatctttaacttcttacagcctacctttaaatgaatcatacccttaacatgtagtgtaagaatcacacaagagtatatttccatttctttctcccatcttttgtgctatttttgtcatacattttacttctacatatgtttaaaaacctacagtgtatatatttttgccttaaacagtcaattatcttttaaagagattaaaaatttaaaaatgtcttttttttttttttttttttttttttttgagatggagtcttgctctgtcacctaggctggagtgcagtggcgcaatgctcagctcactgcaacctctgcctgcccgggttnnnnnnnnnnnnnnnnnnnnnnnnnnnnnnnnnnnnnnnnnnnnnnnnnnnnnnnnnnnnnnnnnnnnnnnnnnnnnnnnnnnnnnnnnnnnnnnnnnnnnnnnnnnnnnnnnnnnnnnnnnnnnnnnnnnnnnnnnnnnnnnnnnnnnnnnnnnnnnnnnnnnnnnnnnnnnnnnnnnnnnnnnnnnnnnnnnnnnnnnnnnnnnnnnnnnnnnnnnnnnnnnnnnnnnnnnnnnnnnnnnnnnnnnnnnnnnnnnnnnnnnnnnnnnnnnnnnnnnnnnnnnnnnnnnnnnnnnnnnnnnnnnnnnnnnnnnnnnnnnnnnnnnnnnnnnnnnnnnnnnnnnnnnnnnnnnnnnnnnnnnnnnnnnnnnnnnnnnnnnnnnnnnnnnnnnnnnnnnnnnnnnnnnnnnnnnnnnnnnnnnnnnnnnnnnnnnnnnnnnnnnnnnnnnnnnnnnnnnnnnnnnnnnnnnnnnnnnnnnnnnnnnnnnnnnnnnnnnnnnnnnnnnnnnnnnnnnnnnnnnnnnnnnnnnnnnnnnnnnnnnnnnnnnnnnnnnnnnnnnnnnnnnnnnnnnnnnnnnnnnnnnnnnnnnnnnnnnnnaaaaaaaaaaaaagattttactttgttgtcttctggcatgtacggtttctaataagaaaactgccgttaattcttgttcttaccttatataatgcctttttctggcttcttctggaactttattagtgattttcagcaaataattatgatgtctttgatatggatggtggttttttttggttgttttgtttttgagatgcagtcttgctctgtcgcccaggctggagtgcagtgtgtgatctcggctcactgcaacctccgcctcctgggttcaagcgattctcctgcctcagtctcccgagtagctgggattacaggtgcgtgccatcatgcccggctaatttttgtatttttagtagaaacggggttttgccatgttggccaggctggtctcgaactcctgaccttaagtgatcggcctgccttggcctcccaaagtgctgggattacagccgtgagccactcagcgcccagcatttttttttttttttttgagacggagtcttgctctgtcgcccaggctggagtgcggcagcacgatctcggctcactgcaacctccgcctccccggttcaagcaattctcctgcctcagcctcctgagtagctgggattacaggcacctgccaccatgcctagctaatttttgtatttttagtagagatggggtttcaccatgttggtcaggctggtctcgaacccctgacctcgtgacccacctgccttggcctcctaaagtgctgagattacaggcgtgagccactgcgcccagcctttttttttttttttaattttttttgagatggagtctcgctgttgccatgctggagtgcagtggcgtgatctcagctcactgcaacctccgcctcccgtgttcaagcaattctgctccctcagccttccaagtagctgggactacaggcacatgctaccacatccagctaatttttgtatttttagtagaggtgaggtttcaccatgttggccaggatggtcttgatctgcccacctcagcctcccaaagtgctgggattataggtgtgagccactgtgcccacgtcattccccccgccaccttttttttttttcttttgaggcacagtaactctgtcattcaggttggagtgcaatggcgcaatcacagctcacttccccactaaatggaatatagttccatccctgtgaagtggtgaaagtaaaaccagaacaacctaattttgaccttgtgactaagttaggaaccttcatttcgaagagtagatcagctactacagctcaaaggatcatttcttccctagggaataattctgaatcatctcatttaaaggattttattctaaaaacaaaaacctattttctccttttttgttttcttgcagtaaattagtagtagtttcaattttgaatagtctggacagacgaattaacttattacttcttctgctgtaggctcttcgatacttggcagaatgccgtgcaaacagagaaaagatgaaaggagaactgggtatgatgttgagcttacaaaatgttatacagaagtaagtacaatagacagtgtctcatttatttatatacttacttatattacttacttacagggcctcactatgttgcccatgctgggttcaagcgatccttccaccttggctttccaaagtgctggaattataggcatgattactactattattggattactatgttttaatgtcctgtagttaactgtttttaatcatttagctggctgagggaggagaaccgctggaaccccggaggtggaggttgcagtgagccgagatcgtgccattgcgctctagcctgggcgacagaacaagattccatctcaaaaaaaaaaaaatttcaattttaggtagagaaaaattacaaattagtcaagaagtaatttattactgtaggaaaatggtaaaactgtggaactataaaataagaaagttaagatggtgctggtagaggcatttaatatttcatacatgctgggcatggtggctcatgcctgaaatcccagcaatttgggaggccaaggcagacggatcacttgtggccaggagttcaagaccagcctggccaacgtggtgaaatctcgtttctagtaaaaatacaaaaattagcctggtgtggtggcacgtgcctgtaatcccagctactcgggaggctgaggcaggagaatcacttgaacctgggaggtggagattgcagtgaggtgagatcccaccactgtactctagcctgggcaacagagcgagactgtgtctcaaaaaataaaatttatataaccatggttgctgatctctcatctgtaactgctttgtttatctaagtagacagaagcttgtgtgactttgtaatataattttgtagtaaattcttaagtttataattaaaatagtgcgagtagcctcagtagctatactggcaatcataagcatgcatacccccactttgcacattgttaatatgaatatgaatacttggctatttctcccctcatcctgttgctgctaatgtggaagccactagaactggtttataagagaattaagccctaaagccctaaggaatccattggatataatggattatcttctgtgcaatgtatctggaatggtttcagctctatactatccttggagtaattgagaaaataataactctgggtttttttgtttgtttggttagttttttgagacagggtctcgctctgttgctgaagctagagtgcagtggtatgatcatggctcactgcagcctcaacctcccaagctccagctattctcccacctcatcctcccaagtagctgggactacagacatgtgccattatacctggctaatttttaaattattttgtagagacatggtctcactatgttgcctaggctgctgtcctgggatcaagcaatccttctgcctcagcctcccaaagtgctggaattacaggcatgagccatcacatcctgcccagatagttgtgttttttttttttttttttttttaaatggaactaaattcttttacaggacctcagttcagaaaggatgctagagaagtgattagtcagagggatagaagcagtgattaaccaggaagaggagcgctggcttaaggatgacaacagaagcatcttccttttttttctgaaacgggtctagtatggtaatcaatagcaacatgtggcaatttaaattaattaaaattaatggcagggagtggtggctcacacctgtaatcccagcactttgggaggcaggtggatcacctgaggtggggagttcgaggccagcctggccaacatggtgaaaacccatctctaccaaaaatataaaaattagccaggtgaggtggcgggcacctgtaatcccagctactcaggaggctgaagcaggagaatcgcttgaactcgggaggtagaggttgcagtgagccaagatcgcaccactgcactctagcctgggcgacagaatgagattccctctcaaaaaaaaaaaaaaaaaaagtaataataataataattaattaaaattaaaaactcagctcctcagtcacatttgccatattccaagtgtttagtcatgtggctagtgacactatttccatcatctcagaaagttctgatgtagagtgctgctctaaaatttttcttttcttgtcttttttttttttgagaccaggtctcaatatgccaccttggctggtacgatgttagctcagtgcaacctctgcctcatgggctcaagtaatcctcctgccttagcctcctgagcagcagggacttaggccatcatgtcctgctaattttttttttttttttttgagtctcatcctgttgcccaggctggagtgcaatggcgcgatcttggttcactgcaacctctgcctcctgggctccagcagttctcctgcctcagcctcccaagtacctgggattacaggcacgcaccaccatgcccggctaatttttgtgcttttagtagagacaggatttgaccatgttggccaggctgattttgaactcctgacctcaggtgatccgcccgtctcagcctcccaaagtactgggattacaggcgtgagtcactgcgcctggcctaatttttgtatttttttgtagagatggggtctcgacatgttgcctagactggtttcgaactcctggactcaagtcatcctcctatctcggcctcccaacatgctgggattacaggtgtgagccaccatgcccagctgctcgaaaatttctttttttttctttttgagacaaagtctcactctcacccaggcttgagtgcaatgtctgtgatctcagctcactgcaatctcttcctctcggtttcaagcgattctcctgtctcagccttctgagtacctgggactacatgtgtgtgacactgcacccgtctaatttttgcatttttagtagagatggagtctcaccatattggccaggctggtctcgaactcgtggcctcaggtgatccacctgcactcggcctctctataagtgctgggattacaggggtgaatcaccacccctggcctgctctaaaatttctttgcttaactgcctctagggctttttttgtttttggattatttttgtttcatggactattttcctaacagattttactggcgaattactaagtcaaagatgtaaatatctttgtctttgtatccctgttttcaaatgatacctatgatgcttttaccagcagttgcctttttctgtttgtttgtttgttttttgtgagatggagtctcgctctgtagcccaggctgtagtgcagtggcgcaatctcggctcactgcaacctccgcctcccgggttcaagcgattctcctgcctcagtctcccaagaatctgggaccacaggtacgtgccaccacgcccggctaattttttgtatttttagtagaaatggggtttcactgcattagtcaggatggtctcggtctcctgacctcatgatccgctcacctcggcctcccaaagtgctgggattacaggtgtaaaccaccgccccggcccgacagttacctttttattagatttttccaaacattgggatggtttcttgacatcatagttctccttccctgtttaatttgaaatcaagtttaaaaacaatttaaatgtctgtgttgagactgttagaaaatggatggtttgggtggggacataattccactgaaattgatgtggaaaacttttcacttggagtttttctggtgagacactttacattaggttcttttttttttttttttttttgagactgagtctcaccctgtcacccaggctgtaatgcagtggcccaatcttggctcactgcaagctctgcctcccgggttcaggccattctcctgcctcggcctgcccgagtagctgggactacaggcgcccgccaccacgcccggctaattttttgtatttttagtagagaggggtttcaccgtgttagccannnnnnnnnnnnnnnnnnnnnnnnnnnnnnnnnnnnnnnnnnnnnnnnnnnnnnnnnnnnnnnnnnnnnnnnnnnnnnnnnnnnnnnnnnnnnnnnnnnnnnnnnnnnnnnnnnnnnnnnnnnnnnnnnnnnnnnnnnnnnnnnnnnnnnnnnnnnnnnnnnnnnnnnnnnnnnnnnnnnnnnnnnnnnnnnnnnnnnnnnnnnnnnnnnnnnnnnnnnnnnnnnnnnnnnnnnnnnnnnnnnnnnnnnnnnnnnnnnnnnnnnnnnnnnnnnnnnnnnnnnnnnnnnnnnnnnnnnnnnnnnnnnnnnnnnnnnnnnnnnnnnnnnnnnnnnnnnnnnnnnnnnnnnnnnnnnnnnnnnnnnnnnnnnnnnnnnnnnnnnnnnnnnnnnnnnnnnnnnnnnnnnnnnnnnnnnnnnnnnnnnnnnnnnnnnnnnnnnnnnnnnnnnnnnnnnnnnnnnnnnnnnnnnnnnnnnnnnnnnnnnnnnnnnnnnnnnnnnnnnnnnnnnnnnnnnnnnnnnnnnnnnnnnnnnnnnnnnnnnnnnnnnnnnnnnnnnnnnnnnnnnnnnnnnnnnnnnnnnnnnnnnnnnnnnnnnnnnnnnnnnnnnnnnnnnnnnnnnnnnnnnnnnnnnnnnnnnnnnnnnnnnnnnnnnnnnnnnnnnnnnnnnnnnnnnnnnnnnnnnnnnnnnnnnnnnnnnnnnnnnnnnnnnnnnnnnnnnnnnnnnnnnnnnnnnnnnnnnnnnnnnnnnnnnnnnnnnnnnnnnnnnnnnnnnnnnnnnnnnnnnnnnnnnnnnnnnnnnnnnnnnnnnnnnnnnnnnnnnnnnnnnnnnnnnnnnnnnnnnnnnnnnnnnnnnnnnnnnnnnnnnnnnnnnnnnnnnnnnnnnnnnnnnnnnnnnnnnnnnnnnnnnnnnnnnnnnnnnnnnnnnnnnnnnnnnnnnnnnnnnnnnnnnnnnnnnnnnnnnnnnnnnnnnnnnnnnnnnnnnnnnnnnnnnnnnnnnnnnnnnnnnnnnnnnnnnnnnnnnnnnnnnnnnnnnnnnnnnnnnnnnnnnnnnnnnnnnnnnnnnnnnnnnnnnnnnnnnnnnnnnnnnnnnnnnnnnnnnnnnnnnnnnnnnnnnnnnnnnnnnnnnnnnnnnnnnnnnnnnnnnnnnnnnnnnnnnnnnnnnnnnnnnnnnnnnnnnnnnnnnnnnnnnnnnnnnnnnnnnnnnnnnnnnnnnnnnnnnnnnnnnnnnnnnnnnnnnnnnnnnnnnnnnnnnnnnnnnnnnnnnnnnnnnnnnnnnnnnnnnnnnnnnnnnnnnnnnnnnnnnnnnnnnnnnnnnnnnnnnnnnnnnnnnnnnnnnnnnnnnnnnnnnnnnnnnnnnnnnnnnnnnnnnnnnnnnnnnnnnnnnnnnnnnnnnnnnnnnnnnnnnnnnnnnnnnnnnnnnnnnnnnnnnnnnnnnnnnnnnnnnnnnnnnnnnnnnnnnnnnnnnnnnnnnnnnnnnnnnnnnnnnnnnnnnnnnnnnnnnnnnnnnnnnnnnnnnnnnnnnnnnnnnnnnnnnnnnnnnnnnnnnnnnnnnnnnnnnnnnnnnnnnnnnnnnnnnnnnnnnnnnnnnnnnnnnnnnnnnnnnnnnnnnnnnnnnnnnnnnnnnnnnnnnnnnnnnnnnnnnnnnnnnnnnnnnnnnnnnnnnnnnnnnnnnnnnnnnnnnnnnnnnnnnnnnnnnnnnnnnnnnnnnnnnnnnnnnnnnnnnnnnnnnnnnnnnnnnnntccctcacctcccagacggggcggcggggcagaggcgctccccacatctcagacgatgggtggccgggcagagacgctcctcacttcctagacgtgatggcggccgggaagaggcgctcctcacttcccagactgggcagccgggcagaggcactcctcacatcccagacgatgggcggccaggcagagacgctcctcacttcccagacggggtggcggccgggcagaggctgcaatctcggcactttgggaggccaaggcaggcggctgggaggtggaggttgtagccagccgagattacgccactgcactccaagcctgggcaacattgagcactgagtgaacgagactccgtctgccatcccggcacctcgggaggccgaggctggcagatcactcgtggttaggagctggagaccagcccggccaacacagcgaaaccccgtctccaccaaaaaaatacgaaaaccagtcaggcgtggcagcgcatgcctgcaatcgcaggcactcggcaggctgaggcaggagaatcaggcagggaggttgtagtgagccgagatggcagcagtacagtccagcttccgctcggcatcagagggagaccgggaagaggggagaggggagagggaattactgttacagtttttatgcaaaacagaaagataatttatgttttagtattttaatattttttgtcactattgcttcattaagcatattaaacagttttgaaataatccaggttttcaaaaaatgtatgacagttattggatgttttattatgtgttatgattcattttctagttgatgcaaaactattgacaatggaaaggagtaacaataatacagtttttctttcttcttttttttttgtgacggagtcttgctcttgttgcccacgctggagtgcaatggcatgatctcggcccactgcaacctccgcctcctgggttcaagtgattctcctgcctccaccgcctgagtagctgggattacaggcacccaccaccacacctggctactttattttattttattttatttattcattttttctttttaagagggagcctcattctgtcacccaggctggcgtgcagtcgtaggatcttggctcgctgcaacctccatctcccaggtccaagtgattctcctgcctcagccccctgagtagctgggattatagacacctgccaccacgcccagctagtttttgtgcttttttagtagagacggggtttcgccatgttggccaggctgggctcgaactcctaacctcaggtgatccacccacctcagcctcacaaagtgttggaattacaggcatgagccactgtacccggccctgtttttttttttttttttaacttaagttcgtaagtttctctaatcattgtctcttcatgctctttataacttgttcttggttaatatttaaaatatctgagaactgcagtgacttttcaataaactctaaaatagctatcaataaaaatgctgaggcaactaatacaaattagtccttttgatagctttctgtaacacacggctaaagtcacccaaagtaacttatctctgtggtcaacagtggctcagaaaagcacttgatatagtaattgagtgtctggaatactgtcagattatcacccctggaattaaagctctaagtagctagaacatatacaatctgagtatcagaaattgaagtattcctactcattcactaaataacttgcaaacatttttgttaggttctatggaaggtacaaaaaggataccttcctcctcttaaagagttcatatacttataaaagaaatagaaaattaagatcagtagtataagtacaagcatagtactctgaatgcaaagggagaattgggttattaggtagaggcattatatagaaggtgttggtcaagctgacccttcaagcattgaaataagagttggaaagcctgcagtctgggtgaagctcttccagctaaggaaagacctgaacaaaacttaagggtagaaagcattctagaacaaagaacatataaaaatgcatggtctttgtaggagatggccaagtgtcatagtcaacccaaagaataatagaaggacaaaatgagctgatggagatagccaaatggggccagattttaaggccttgagtgtacattaaagggtttggacttagttgagcccattgataggtgaaatgaggattcttttcttacagttacatgtacttactctttgttcagttccactaataagagccattagactgtgctgtccagtatggttagccactcactctgtttggcaatttaaattaattaaaggtaaattaattttttttagttgcactagccacatttcaagtgctcagtagcctcatgtgagtggagagtgcagctatagaacatttctatcattgcagaaagattattggacagcacagtcccctagatgttgatgtgaggatctgtagtaggatttaaaagcttaagaatgaaaacttttgttagagctgtggttttatgataaacacataatttgtaatatgtaaaaaatgtaaattaaaaaattggttttaacatacaaagaaatcttgaaattagttgatagtatgaatgatccttttcaaatttggtttctccttttggatttttatatgttgtattttcttaaaagtcaaggtactttcaaattgagagttgaatgttagtgataatacaggaacatgttacaacctgatcttgttagttgattttgtatttgattatttttattaaacgtgtggtttttttttttttttgagatggagtctccctctgtcacccaggctggagcccagtggtgtgatctgagcttgctgcaacttctgcctcccgggttcaagtgattctcctctctcagactcctgagtagctgggattacaggcatgcgccaccacacccagctaatttttgtattttagtagagatggggtttcagtatgttggtcaggcttgaactcctgacctcaagtgatccacctgccttggcctcccaaagtgctgggattacaggcatgagccactgtgcctggccaaatgtgtttttatacctctatagtgttggattttgaatctcaatgagccacgagtttaaaatgaaattagaagattattatagacaagatgctttttctacattattgattattctaggattcactgctattgcttttaaattgaacaaggcattagagtaaaagaaacaaggctccttttagtggagaaataaaattacagaatcagtagaagtgacaagactaattatatatgtgtttcttttcaagaactacaactccaggagaaacaaaacttctggcctctgaaatctatgacattcttcagtcctccaatatggcagatggtgatagttttaatgagatgaattcacgtcgaaggaaagctcaattttttctgggaactacaaacaaacgtgccaaaacagtggttttgcatatagatggccttgatgatacggtaaggtctgttagatgggaaagagaaatcatgtttactgaatagtttcttcagtgccacttgctaacagtctttgagaataaatctcgatatcagtattttactgataaaaagggtcattttgtgctaaagaggtcagttaatcataggatataagaatttaaaatatgtatgtccctaataatagaacatcgaaatatatgaagtaaaacttagagaaatggggagaaatagaaaaatccacagttagagattttaacacaactctctcaatacaggaagcatacagaaaatcagtaaggatatagaagactcaaataatgctatcaaccaatttaacctaatttttattttattttatttatttttttatatattttttgagatggagtctcactctgtcacccaggctggagcacagtggtgcaatcttggctcattgcaacctccgcctcctgggttcaggtgtctcttctgcctcagcctcccgagtagctggaattacgagtgtgcaccaccatgcctggctaatttttgtgtttttagtagagatggggtatcaccatgttggccaggctggtctcaactcctgacctcaggtggtccgcctgcctcagcctcccaaagtgctcgattacagggatgagccaccatgcccggcccaaagcatgttctttgagcacagtgaatgcaaattagaaatcagtaacagaaagatatctgaaaaatttcccccacatttgtaaaactaagtgacacatttctttttttttccttttcttttttcagggacagggtcttgttctgtggcccaggctggagtgcagtggcacaatcatagtctactgcaggctcgaactcctgggctcaagtaatctttctgcctcagcctcctgagtagctgggactatagacatgtgccaccatgcctggctaatttttaagtttttgcagagatggagtcttgctgtgttgccaggtctcagactcctggcctcaaccaatcctcctgcctcaacccagcaaagagctcggattacaggcatgaaccactgcacctagctaaatagcacatttctaaagtaatctatgagtcagtaaataaaagagaaattagcattttgaactgaataaaaataaaaatgaaagtgaactgaataaaaatgaaagtgtaggccgggcacggtggctcacacctgtaatcccagcactttgggaggccaaggcggatggatcatgaggtcaggagtttgagaccagcctggccaacatagtgaaaccccatctctactaaaaatacaaaaattagctgggcatggtggtgcgcctgtagtcccagctactcgggaggctgaggcaggagaatcgcttgaacccaggaggtggaggttgtggtgagctgagatcacgccactgcactccagcctgagtgacagagtgagactccgtctcaaaaaaaaaaagaaaaaaaaagtgaaagtgtaataaaagtgaaagtgatatatacatgaaaatgtagctgaaatttgttggaagtagttaaacaaagtttaaagtggaaattcattagctccagatgcctaactgtttatatacaaaaaagaaagggtatcaagtcagtgacttaagcttctaccttaagaaaatagaagcagctgaaggggatcactggatcccaagagttcaaggttatggtgatctatgttcgtgtcactacacactcctgcataggcaacaaaaaccctgtctcagaaaaaaaaagaaactagaaaaagaagaacaaattaaagccacaacaagcagaagagaagaaacaagaaagatcagggaaatgaaaaacaatagagaaaaaccaatgaaatcaaaagctggtgtttgacatgattgttaaaattgataagcctctagtcagacagatcaagaataaaagagaaaagtcataaattatcaatatcagaaatgagagaggataccactatagatcctacagacatcaaaagggtaagtgagggccgggcatggtggcttacgccggtaatgccagcactttgggaggctgaggcaggtggatcacttgaggtcaggagtttgagaccagcctggccaacatggtaaaatcccatctctactaaaaatacaaaaattagccaggtgtgatagtgtaggcctgtaatcccagctacatgggaggctgaggcaggagaatcgcttgaacccaggaggcagaggttgcagtgagtggaaatcacaccactgcactccagcctgggtgacagagcacaactccatctcaaaaaaaaaaaaggataagtgaatattttaaatacctttatgccaataaatttcataatgtagatgaaacaggtttcatgaaagacacagatgaccgaagctcactcaagaagaaacagatgacccaattagttgtagatctgctaaagaaattgaatttgtagctaaaagtcatgccataaataaaacttcaagcccagatagaagcatgttttctggtgtctggaaatcattggtttttaaattttttttttttgagacggggttttgctctttttgcccaggctggagtgcgatggcacaatctcggctcgctgcaacctctacctcctgggttcaagtctttctcctgcctcagcctcccaagtagctgggattacaggtacccgccaccacacccagctaatttttttgtatttagtagagacggggtttcgccatgttggccaggctggtcttgaactccttacctcaggtaatctgcctgctttggtctcccaaagtgttgggattacaggcgttgagccatggcgcctggcccacaggctttttctagttgtgtttaggtgcttacgctcaggatatggggtttagtaaataagccttcccatatgcatattgtcagacccaaatcagtccacagctatcttactggaagtggggtcacaaggcaatttctagaaagcaagttctgataaaggtaaattgattcactggaagatcttaagatatataaaatatctccaataccatgtgtttaattttagtgaataagaataatatagtttctttttaaagctagcacaaatcaagtaataaaacccagcaaagcacacacaaaaatataggctagccaggtgtggtggcacatgcctgtaatctcagctatatgggaggctaaggcaggaagattgctagagcccaagagttcaagaccagcctcgtcaacatagcgagattccgtctcaaaaaaaaaaaaaaaaagagcagaaaccaaacaaacaaatatataggccaatatatagtaaaaacatgattaccaaagtccaaaatgaaatattagcaagttaattctagtactgtactatcatgttaactttttttggtgacatagcctggtactagtgataagtttatttcatcgattctctcatttgtttctgacagcacagagagatgtatatcttctttctttctttattttttttgagacagagtctcactctgtcgcccaggctggagatcagtgtgacacgatcttggctcactgcaacgtccacctcccaggttcaagcaattctcctgcctcagcctcccaagtagctgggattaaagatgcccaccaccatgcccggccaatttttttgtatttttatagagacggggtttcactatattggccagtctggttttgaactcctgatctcaagtgatctgcctgccttgccctcccaaagtgctaggttataatagaaggggaagttgagtttagaatggtcaaataacttaactgtttactctacctatgtaactttagcttagtcaacattttttggactaggtagtgtgacttcagaattgaactctttttcgagacagagttgctcttttgcccaggctggagtgaggtggcgtgatctcagctcactgcaacctccaccccctgggttcaagtaattctcgtgcctcagcctcccaagtagctgggattacaggcacccaccaccacgccccgctaatttttttgtatttttagtagagacagggttttgccatgttggccaggctggtcttgaactcctgacctcaggtgatccacctgcctcggcctcacaaagtgctaggattacaagtgtgagccaccgcgcctggcccagaatcgaacttttaatcacaatattataatttcctagaaacaatctagttttatcctggagttgtaaatatgatttaacatagtgaaatattttagtataatatcagtaagtcaataatttgataatttgctattgatatagctgtaaatatagaaaatccaggagaatgatctgaaatttcttaaaaatattttaaaaatccagtgacattattaaatatatggaaatcagttacttcttaaaaggagaaaagtagttttactctcccaaacaaaacaaacagctaggaagagtgcaggggtattttttctttttttctttttgtttttttaaacttaatgaccagtgtgatagtagcaagggtattcttaataagaaaatacaagacttaataaaaaaaattaaaggtcttcagtattataagaagactggaataaatggaatgaaatgcctgtttctgaaagtttgtaaggatgttagttcttcctaaatttgtggacttaaaataatgccaatcagtctgatgattttggaactttatttcctgatctgaaagttcacatggtagaatgtactaatttttacaataaaaaggagcacctaatgttaggcattattttagataccagggatacagcgatgaccaaaaagcaaaactttttgctctcttggagctagcatagttggaggaggcaggcaataagcttgctaaaaaagtgtgttaatttatgttaaaataaagataaattagacttatgaatctcgtttctcactgttgcatgtggttggcatttagtaccagactctacctgtggtaaatcaggcaagttgtttttcaacttttcactttcctcacatttaaaataagggatcagattaatagtatcctaacttatatatattgtgtgagctttacttcactttcaagtttacctggtgttgaatatgtggaagagataaacatggtgctatttggcaccagtcctctaaggggcttcaccaaatgcaggcccctgcagagcagggtccagacacagtgcactagatgagcccactgtgggcctgtgctgtgccacagactgacgtgtcccacgtctccctgagtagtgttgaaatgcagaagtagggagatgagcaatggtgtgagcagttgttttgaaggatgtggaaataagtttgaaaactggatatagtctacagatttggcacgtgggtcagttgcagattgacccctcagaaatataaatcaaaacttggtctcaatacagaaatcagaaaatgtagagagtgtgatttggtgtgtgggccagaggtggagggagctatgaggagaaaatgcaattactttttccattttcactttggatcttgtattgagatgaccacttgatggtcaagtggatatgtctgacagacaaataagaaagtcatattggagttagtaatgttagtgatggctaaagtgatgagaatagtcttctgaggtttgaagcagaaagaaaatcagtttaggaactggactttggagttaaggtgagacaaagctggaataatcagtgggaaagtggaagaccaggataatgtagtaccctgcattgaagtattgaagggtacatgttatattgtgttttgaagagtattaggaaaatgagaaccacacagagggtatgtctaacccttgagaatgcaatagtaaccataagaatgccataaatggatgatgcagtgatatttgtaataccaggtgatttaaggaatagtgacttaaacactgaatgctcactaattctaacttcagtctattggaatttatccctggagatttttaggctagtgtgtggatcataaaacttttcttttcttttctttttttttttttttgagatggtgtcttgctctgtcgcccaggctggagtgcagcggcataatctcagctcactgcaacctccgcctcccgggttcaagtgactctcctgcctcagcctcccgagcagctgggactacaggcacacgccaccatgcccagctaatttttgtatttttagtagagatggggttttaccatattggccaggctggtcttgaactcctgacttcatgatctacccgcctcagcctcccaaagtgctgggattgcaggcatgagccaccgtgcctggccaaaccttttctttataggaccagaaagtaaatatttttggctttgtagaccatgatggtctctgtcataactactaactctgccttagcgtgaaactagcctcagataatatgttaacaagtgggtgtgcttgtgtttcaataaaacttagttacaaaaacagctggtggactatagttttccccacccgtgagctagaagaacctctgcttttcttctttttggtattttttccccctgtgttgtgttctgctttatttaagatgtaaattaacattggctaacttctttctgataaaaaattattaaaactacatattagtattgaagctttaaaaatttagcaggaattactattctgttgatcctgtaaaatttaaaaaatttgactaagcactcccccactctgtgccctgaaataagatggtaaaactgaaataggtcatttgctctcttcccccctccaaaatatagcttggttttcactgatttattaccttttatttacctattttcataacaatttgcttttactttttcagtctcggagaaatctatgtgaagaggctttgttaaaaattaaaggtgttattagctttacttttcaaatggctgttcaaaggtgtgtggtgcgaatccgttcagatttgaaagctgaggtaagtattttaaaagactgaatatgcttgagattacaggtaaacaaatcaatttcaaaattgttcctttttatcttggcttaggctttggcatcagcaatagcatcaaccaaggttatgaaagctcagcaagttgtgaaaagtgaaagtggagaagaggtaaaagttgtgtttaattttctttatatccaactcactctcaattattttttatggctagcagattgccagtatttctaaattaatagtgccaagtatgtaaggatgtgctgtttcttggttaacagttaactgttttagaaatatagagagatcttttgtggatatcagagtctgctcttgctgattttacatggaaataaaggatatgtgtcttccttgcatttatttttaaatactttcttcctaatcttaactaatcctgacaatccaaaaaataaaggtgtaaccactgggcaagtaaatagggtgaaaatccttgtctgttgctactcttttcactagctttgtgatgggggaaacaaatataccttgagctcatttgggttcccatctcatagatgggaggttccatggctatccagtggctgcagtggctagacacttgctttagtcattattacacagagagcggttgctcatttactcctagaatttcagcagatcaacttctgagttcttatttgtactctgcttactcctttctgtattgacacagtgctcagcaattgggcctactgtcatgtaagaggaaaatttaccctgagaataaccacggtaattagaataaggagtaaagttgattttgtaataactctcaatattttctgtatcagatgttggtcccattccaagatactcctgtggaagttgaacagaacacagagctacctgactacctgcctgaggatgagagtcccacaaaggaacaggacaaagcggtgtcccgggtcggctcacacccagaaggtggagctagctggcttagcacagctgcaaactttttatccagatcattttattggtgacttcacttttgggctcaaggactgtgtgaaccaacaaggggccagttttccattgttgtggtgaactgtcaagtgcaatttgcaataagttatcatgaaaagtttttagattacacgatcgcatatgctgcatttcacattttattggacattttaccccactgagtggtaaaaaggacagaggctacagatggagttgctttgtttatgaaagtattttggtttgttttctttcatttaattgcctcatatttaaaaaccatgggtccactgttaaaaccacatgtgtatgtgcagctttacattttattttacgtgaagcatgtgattaggaaaactcattttcttttcaagcctcaggacctacctgaagagaagttttcttgtagctcaagttgtgcatgaattactgaatattttactgtgcttttcttcatgaagggtacatgctttgtactcttcactgaaagctgaaaacatttcttgttaccctcttttgtgcctttttattttgccaaccgtgtttatagaaaggacattactaatgacattttgcagattaaaaacattcatttgaacacagtagtcccctagaaaaacaactctacaaaaattttgcagccttattcattataattttgataaaattaacacaaaatcagtcaagaaggaaacatgtatattagtgaagtgtttttggagactgtttgaatgtgaccaaatgtggttctagttgacttcttttcactttggcttatatcaattcttgagagttaatgtgatcatgatattgcaaacaactataaatggtctctaggccttactttgtgattatacgttatctccggctagaaaaaaataatggtagtaaagaaactgacaaactgaaaataagaaaacaaaaatcaaatgcctataataccataatgccagtttggtatagagtccaactttaaaacatgaattgctcgacagagttctattcagtaggtgtttctttgtattgtcttttgtgaatttattatgaaaatgctgcgttgtgttgaatgaaaaagacccaaattactgcttatgaagaaataaagccagcattgatcacttaatcctgtttctcatgtccagccagaaaaaagaacttcagtgaaggtaagataaataaatacatacacatatgtttttttggtagataagtgctaattacatatatgtaatgctttattaaatttctgaaatatttggtaactaaaattttctttttggaaattaataaatccagatacatattaatgttgatatgagtaaaaacaaataggaagaaattgaaatttcttttcatcaacatgtagagctgctattttactatttggagaatatgatgtgaaaattggacctcaaagggtttccttgtgttttcattgtaaaataccatcatcagtgagagtcttgagttcactaacattgtcaccttctggagagagagttaatggggggcattgaggatgatatttttttacatgtgtttggtttctgattcaagtgacacgcacaaactgaaaaaaaaaaaacaaaaaaagcaacaataactttcagggcacctattgctctaaatgcataatataacttgctgccagaaccagatgtgtttaaaaaagaaaataaaaccaccttctttctatagccattaaagcaaactttactgttctaacaaatttgtattttattttgcattgccacacatctgcttatttaaaaactacatccctttggtagtaatgtttcaggacaagtaggtattacagcttgatgtttgtgtgttctaattctaagagttctttattccagatcatatagagtagttaagacaactgtaacagcattttttgaaatacattgtaaaataataaaaggtaacataattaaaatcgagtggatattatatacttgtggtataagcattattgattatttatttttaaattttattttaagttctgggatacatgtgctgaatgtatcataggtatacatgtgccatggtggtttgctgtacctatcaacccgtcatctaggttttaagccccgcatacattaggtatttttcctaatgctctccctccccttccccccaccccctgatatgccctggtgtgtgatgtttccctatgttgattactcttaagcctgtttgtacacacgttgcctggcacactttcccagttccctgcagttgtgctacctgactaattcccatgcatcttccattcgtttccttcctgacaccacacctgcctctctccagattggattgctgctcctgtgcatatactcattgtagcatctatcacattatatcaaaattgcatatttaacagtgtctctcccctgctaagctctctgagaagagaatcttttttaagttttgttttgcattgacacataatatttgtgcatatttatggggtacaataatgatgtgagtcttcacattaaccttgtagctgtgcctgacttatagtaaatgctcagatttttttttagggggaatgagcaaagtttttttaaaaatcagtaaaacataaatatacttgttgggcaaaaggaaaaatgttatatgtattttttctgggcatgcttatttctgatttatcaatatttaacaaatttcagccaggcacagtggctcatgcctgtaatcccagcattttgggaggccaaggtgggaggattgcttgagcctaggagtttgagaccagcctggggaacatgtgaaaccctgactgtacaaaaaaaaaaaaaaaattagctagctgtggtggcaagtgcctgtagtcccagctacttgggaggctgaggtgggaggattgattgggcctggaagattgaggctgcagtgagccgagataatgccactgcactccagcctggatgacacagcgagatcctatctcaaaaaaaaaaagcaagtgtctcaaatgtcttcatttattttgtcatttggtttttatttttaaaaaatgggagggggcataatatttgctccattgaatggagctagaattatcctgattcttacagaatttttacaggagaatatgatatatataaaatagtggttttgattttctgttttataactcatgagctgtgtgattctaggcaatattttaatctctaaactggagatttatttaatctctaaattggagatttattaaaatggagatgattcctctgcctcatggggccgttaattaggatccagtgagagatgagtgctttgaaaactaaaaatttaccagtgtgcaatggatttattgttactagaagtttctcaagtggtaacctttttttttttttttttttccgagacagtcttgttctgtcgcccaggctggagtgcagtggtgcgattttggctcactgcaacctccgcctccagggttcaagcaattctcatggcttatcctccccagtagctgggattacaggcacctgccaccaagcctggctattttttgtgtttttagtagagacagggtttcaccgtgttggccaggctagtcttgaacttctgacctcaagtgatttgccctccttggccttccaaagtgctgggattacagatgtgcgctaccacgcctggccttcaagtgatacactattctaatcttgctttatctgactcctcatcttcccgtcttcccacatccaatcagagagtttttgtttttggcggtttttattttgttttgttttttgtttttagatttagtcatctgctctttgatttttatctaaattttctcccttggataattcatttattgtcaggattttattacctttttgtagataatttctaaacctccactctactgtcaacttttgattgctctttttttcctttgcagtacctatcaaatgtaaagtctgaattttaatttttattagaactgagctcatggtaggcatgcaataagttttaacaaaaatgaattctctgccaggcactatactaatgctttacaaatatttattcaatgaaccctagaccactatgaggtaggtactcttaaatcacagttttacagatggggaaaaacgagacagagattaagtagctcattagtgccaggttatggacctagtaagtggggaagccaggactcaaacctgggcattctggcttctgagtctctacacccccaggaggcagcctgcatcttgtgttcccccactgtgcctttccagatctaccaccacccttctagtccagaccctttggcttgtatctggtctggtgacttaattcaggtacctgttagcagtcagaaactcagtgtctggagaccagaaaagttaggtacatgaaagcaataagcctagtcaggcgacagcacaggaaaacacacagaaagcacctgtctaaaggaaaccacattatcctcatatgggcggttggctttgagaatgcacagcttttggactttctggctcttccagacccatcagacactaccagagccacataagaaatgtctgtcggccagaaataggctactcttcctcctagaatggcccattctgttatatcagtttaatcttaatagtattttcatcattctcagctctaatgtcaacaaaggcctatggactgaagtttagactgctttgtgcagcatcaaaatagtcgccagcctagcctttcacagttttgccaggattagttcagactatgaaaggcacagttgtatatctcattgttagaataacagtctgctttatttagccttgcctattatagcataaatattctgtattcatcctgccctctagatctttttttgtaatctttttgggaatttcctcctttatactctcatctttaaaatattttattatgaaaataagctcaatatattacagaaatgcataagaaagcacaaaccacctgtcatgtcacaacatggacagtctaggtaactgtgaacttcttgtttcattttattttcatttatctttttacaatttttttttttacattggcaacattttcaaaataggcatccagaactgggcgtggtggcatatacctgtagtcctagctactcagaaggctgaggcagaaggattgcttgagtacaggagttcaagtttagcctgggcaacatggtaagactccgtcttgtaaaaataggcatccagggctgggcgtggtggctcacacctgtcattccagcactttgggagactgaagtgggcagatcacctgagggcaggagttcgagaccagcctgaccaacatagtaaaactccgtctctactacaaatacaaaattagccaggcatggtgtcacatgcctgtaatcccagctatcgggaggctgaggcaggagaattgcttgaaccccgtggggcggaggttgcagtaagccgagattgtgccattgcattccagcctgggcaacaagagtgaaactccgtctcaaaaaataaaaaaaaaaaaaaaacaaggcatccagcggaaagtcctgcttctcttcttttgaaccttagttattggttcctctaatcagggacagccatttttaccaattttgtatgcccatcagagatattatacaaatttactatttcatatatttttcccacgcaaatggtagtatgatatcctgcacctacttttttcacttaaagtatatcttagaagttactgtatattcatgtataaagcagctcccttcttttacagcttcaaagtattacactgtattaatgttccatgatttatttagtgctttgtaatcttttgctcttaaaaaaatagtgctatataagtatagctgtaggaaggattcctagatatgtaaatgggccaaaggctaggtttttaattttgatggttctttcctccttagagagtattccagcaaggtgtgagagtggttcccctcaacttctcactgtgttatcccatgttggccaggctggtctcaaattcctgacctcaggtgatccacccgtctcggactcccaaagtgctgggattataggcgggagccactgcgcccagccttaataacttttaacattacttgagcacttattatatcccacactatctgttggacctttacttgtgttctcctttaattatcacagtggtccagtgaggtgggctttttcttacccattttacgtaggaaactaaagcttagaaacaaagtaactggtctatggtcatatcatcctaaacgtgcccgatctcgtctgaaataaaataactggtcttaaatacacttaaaaactaatcagtggtagggctggtatttaaatctcagaggtccttcttagtgaccttttagtctgttgcccaaataattgctatgactgagagtgagcccaggttgagaagcatgacttagttcttgcacatttaagatttttgttgttagtttttttttgtattcttttcaacattttcaggtttttcaacaccagctatttgatttttttctactcttctgctcataagcatttaatggcttactgtgtcaaatctaaattcttatgttttcaggaatccccttaacctgctctcctttcctgtgaattgacctgacgctcatatttttacttaaattgacatctttaaacttcagtaaatgcattgtgtgcttgggagtccactcattctcttctcctcaacttaaaaaattctatctgttcttcaagaactggctattccatgaagctgtccgtgtttgttttggttcttgctgatctatttcccagttgttcaaacttttccaacacttaaacagtctgctgtatatttagacactgattttgtgtcatttgtgtcttcattacttaatgggttcattatgtagattatgacagcagagatctctttcaaaccctgtgcttccccttttctactgcccccttccttatcaagccaaattgaagcctaaccccaagcctcctctttactggtggcttcaggaccagcctgtatcctgaggttctttctggcccttactgactctgaagtccttttctaaccaattcctgtctggtaaggagtttaagctgataagttgtgtaagtactgtttttctcatgtttagttatttctggtggaagatagtacattagaacacaacgctaatactctgtgtgtgatctgtagcaaatagaaatattccaattatgcagaaggagcaaaattgggcaatggaaaaggcactttcaggggaaaaagtatttatgtgattggttgaaaaggagaaattttactttagaaatgaattagaaaaccgataggtaagaaagtggcatagaatgaattgaagatgatagtagggaataaaagaagatggaaaaagaaatgaaatacatggaaaatcaactttacctaccttaaaacagttatagcaaatgtggatgaaaccataaggcagactgagaaagagctgagccagaagccagactcagttttaggaaataaacttcaagggaaaaatgagtcatcacctctcagtgcagaagctcagagaaaaagtacactgctttaagataacttgtatgtaaaaataaagatgtatacaataaacttttgcttatatgggtatttaaaatacccatataagcttatataggtatttaaaatacccatataagcttatataggtacataaaatatgcttatatgggtatataaaatacccataaagatgtatacaataaacttttgcttatatgggtatttacacttttagttttgattttacttctttttttttgagatggagtctcgccctgttatccatcctggagtgcaatggcgcgatctcggctcactgcagcctctgcctcccaggttcaagtgattagcctgtctcagcctcccgagtatttgggattacaggtgcgtaccaccatgcccagctaattatttgtatctttagtagagatggggtttcaccatgttggctaggttggtctcgaactcctgacctcgtgatccgcttgcctcggcctcccaaagtgctggggttacaggtgtgagccactgcgcccggcctgatcttttacttaactttcttttttcttttctttttttttttttttttagatagaatttcgctcttgctgctcaggctggagtgcagtggcacgatctcggctcactgcaacctccacctcccagtttcaagcgatattctcctgcctcagccctcctgagtagctggaattacaggcgcctgcgaccacgcccagctaatttttatatttttagtagagacggggtttcgccatgttggccaggctagtctcgaactcctgacctcaggtgatccacccgcctcagcctcccaaagtgctgggattacaggaatgagccactgctcccagcccttttatttaacttttaatggaagtagtatatatagtaaaactcttggagatggaaatctacaggcatctattctcctgtgattcaatagtaaataacaagtataggcaactgtaaggtaatgagttagagaaaaattgagatcctgctcaattagttacagtctttaagatgggaaagcaagtcaatatttttccttcactataaagtttcctaatgttataataaaataggccaagggctgggcacagtggctgttaaagcacctttaagtatagcacttaaagggtatctttttttcagttatgtcattaaagtcggttatcaaatatttgaaaacctatattgttccattcatggtgctactcggtggaattatagacaagatcttcacaggattcatagtctcgtgggaaggaagatcataggacagataaccacaaatgtgtcgtatcaggaagttgcacagtaggtttggaagacctagtgtttgtggggttgggcagtgggaaactcagggtaggctttctggataaattatggtttcagccagaacttgaaagatgagcaggagttagttggccaagtgggagcagggagagcattccaggcaaagggacccccattgtgacagctttgagtgaggctgctgggtcaaatctaaaatgatactgaaatgttggtggaggccaggttaaacaagattttgcaggctcttcgagtccctgaatattatagtatttcttctcctaatgtcagtagttcaactggtattaaatgtttggatgttaaactaataatagctaccatttattatgctttgcagttgctaagtggttttgtctagtatttgatcttctcaacaatcctatgagctctgtttgaagaaaaagtggacttcacatatgggaaacatggagcatggttcagtacttgcctaagatgagactagtcaggctacagtgtggggagtggattggagaggagaaaagtggatatgaggctacaaagttacaaggcttttactaacacatacagtacaggggcaatgctggatggtaagtagcagtgaatgtggagagaggtgacatgtttgggagattatattttaaggccatatcacagaagaatgtgatgatttgttgtgagggaagactcccaggattctcagtagctgcgctggtggtcttgttgcgcactgagcaaggagacactgttaggataggattgtaggcaaggttaccaatagggggtccagggatgcatgttttaagatgggggagagacaagtatttaaatgctggtgggatggattcaggagatagatcagatatagaagagaatgtttggccgggcacagtggctcacgcctgtaatcccagcacttttggaggccgaggtgggtggatcacatgaggttaggagtacgagaccagcctgaccaacatggtgaaaccccgtctctactaaaaatacaaaattagctgggtgtggtggcacatgcctgtaatcccagctactcgggaggctgaggcaggagaatcgcttcaacccgggaggcagaggttgcagtgagcctagatcaagccattgcactccagcctgggcaacaggagtgaaaatccatttctcaaaaaaaaaaaaaaaaaaaaaaccgaaaattaagcacagtgagaatgtgttcaattttaataatttagtcactaatattttttacattagcatgaatgaagtaatttccatgacagatcttcagatttctagattgtcatctgctttctctttttttttttgagacagagtctcgttctgtcgcccaggctggagtgcaatggtgcgatctcagctcactgcaatctctaccttccagattcaagtgattctcttgcctcagccttgcgagtagctgggattacaggcatgtgccaccatgcccagctaatttttttttattttttatttttaaaatttttgagacagggtctcgctctgccacccaggctggagtgcaggtggtgtgatcttggctcacggtaacttccacttcctgggtttaagcaattctctcgccttagcctcctcagtagctgggattacaagtgcgtgccaccacacctagctaatttttgtatttttagtagagatggggtttcaccatgttggctaggctggcttcaaactcctgacctcaagtgatccacccacctcggcctcccaaagtgctgggattataggcgtgagccacagtgccggccctttcttttatcttttcatttaatcccttcatttagttcagtgggtctcagccctgttgatacattagaatttcctaaatgctttgtgtgtgtgtgtgtgtgtgtgtgtgtgtgtgtggctttttttttttttttttttgagatagggtctgtctctattgcttaggctggagtgcagtggcacaaccatggcttactgcaaccccaacctcccaggctcaagcaatcctcttgccttagcctcctgagtgactggaactacaggtgcaaatggccatgcctggctaatttttgtattttttatgtagataggctctcactacattgcccaggctggtcttgaactcctgggctcaagcaatcctcctgccttggcctccagaactgttgggattacaagcatgagccaacacacctggccagcatatttttaataaatagcagtctgtgttcccactgcagacaactgaaccagagtttctaaggatggggcaagggcttgggtattttgtaaccatgttgtggttatgcttatatgcagcccaggttgaaaagcatgacgtagttcttgcacatcaaagatttttattttgatttttttctttttgtattcttttcaacattgtattaacatacagtgcacatctaagatttaaagatcttctgagacctgttaccttaaacttttgctccatttagtaaagctccttcttccagccagcttgtttcagaaactacacaaatcatgaattagaacaaaaacatgtatacaaaacctttgattgttagttggatatctttgctatttcattatttactaggcgttgtatggcttttagtgtgctcattttacccttgtgcttatgtctgatcagct

SEQ ID NO: 782 - DNA, 2602 bp, Homo sapiens
agcgccttcgctctttggctccctgagttagtccggttgtttgcgatcgccgcggccggggctgcgaaccgaagggctcgctccgcgccgcctgggtctctacctcatccgtaggtgtggccctgatggtgtggcaggctctggactcctaaagctctggagcgaatttaagattttattcatgtgcatggcatagaagatgaattcttccacttccaccatgagtgaagagcctgacgctctatcggtagttaaccagttacgggatctagcagcagatccgttaaacagaagagccatcgtccaggatcagggatgtctgcctggccttattttatttatggaccatcccaaccctccagtcgtccactccgctttgcttgctcttcgatacttggcagaatgccgtgcaaacagagaaaagatgaaaggagaactgggtatgatgttgagcttacaaaatgttatacagaaaactacaactccaggagaaacaaaacttctggcctctgaaatctatgacattcttcagtcctccaatatggcagatggtgatagttttaatgagatgaattcacgtcgaaggaaagctcaattttttctgggaactacaaacaaacgtgccaaaacagtggttttgcatatagatggccttgatgatacgtctcggagaaatctatgtgaagaggctttgttaaaaattaaaggtgttattagctttacttttcaaatggctgttcaaaggtgtgtggtgcgaatccgttcagatttgaaagctgaggctttggcatcagcaatagcatcaaccaaggttatgaaagctcagcaagttgtgaaaagtgaaagtggagaagagatgttggtcccattccaagatactcctgtggaagttgaacagaacacagagctacctgactacctgcctgaggatgagagtcccacaaaggaacaggacaaagcggtgtcccgggtcggctcacacccagaaggtggagctagctggcttagcacagctgcaaactttttatccagatcattttattggtgacttcacttttgggctcaaggactgtgtgaaccaacaaggggccagttttccattgttgtggtgaactgtcaagtgcaatttgcaataagttatcatgaaaagtttttagattacacgatcgcatatgctgcatttcacattttattggacattttaccccactgagtggtaaaaaggacagaggctacagatggagttgctttgtttatgaaagtattttggtttgttttctttcatttaattgcctcatatttaaaaaccatgggtccactgttaaaaccacatgtgtatgtgcagctttacattttattttacgtgaagcatgtgattaggaaaactcattttcttttcaagcctcaggacctacctgaagagaagttttcttgtagctcaagttgtgcatgaattactgaatattttactgtgcttttcttcatgaagggtacatgctttgtactcttcactgaaagctgaaaacatttcttgttaccctcttttgtgcctttttattttgccaaccgtgtttatagaaaggacattactaatgacattttgcagattaaaaacattcatttgaacacagtagtcccctagaaaaacaactctacaaaaattttgcagccttattcattataattttgataaaattaacacaaaatcagtcaagaaggaaacatgtatattagtgaagtgtttttggagactgtttgaatgtgaccaaatgtggttctagttgacttcttttcactttggcttatatcaattcttgagagttaatgtgatcatgatattgcaaacaactataaatggtctctaggccttactttgtgattatacgttatctccggctagaaaaaaataatggtagtaaagaaactgacaaactgaaaataagaaaacaaaaatcaaatgcctataataccataatgccagtttggtatagagtccaactttaaaacatgaattgctcgacagagttctattcagtaggtgtttctttgtattgtcttttgtgaatttattatgaaaatgctgcgttgtgttgaatgaaaaagacccaaattactgcttatgaagaaataaagccagcattgatcacttaatcctgtttctcatgtccagccagaaaaaagaacttcagtgaaggtaagataaataaatacatacacatatgtttttttggtagataagtgctaattacatatatgtaatgctttattaaatttctgaaatatttggtaactaaaattttctttttggaaattaataaatccagatacatattaatgttgatatgagtaaaaacaaataggaagaaattgaaatttcttttcatcaacatgtagagctgctattttactatttggagaatatgatgtgaaaattggacctcaaagggtttccttgtgttttcattgtaaaataccatcatcagtgagagtcttgagttcactaacattgtcaccttctggagagagagttaatggggggcattgaggatgatatttttttacatgtgtttggtttctgattcaagtgacacgcacaaactga

SEQ ID NO: 783 - protein, 280 aa, Homo sapiens
MNSSTSTMSEEPDALSVVNQLRDLAADPLNRRAIVQDQGCLPGLILFMDHPNPPVVHSALLALRYLAECRANREKMKGELGMMLSLQNVIQKTTTPGETKLLASEIYDILQSSNMADGDSFNEMNSRRRKAQFFLGTTNKRAKTVVLHIDGLDDTSRRNLCEEALLKIKGVISFTFQMAVQRCVVRIRSDLKAEASAIASTKVMKAQQVVKSESGEEMLVPFQDTPVEVEQNTELPDYLPEDESPTKEQDKAVSRVGSHPEGGASWLSTAANFLSRSFYW

SEQ ID NO: 784 - DNA, 47040 bp, Mus musculus
  misc_feature (1)...(47040): n = A,T,C or G
gtgtaaaaactaagagaatatgcttttacttggtgtttagtttctggtttaaggaaacagggggttggaactaatgattcagaattcataaaacttttatgtaaatataagaacttctagtaatattattaacaatgttcagagcctcgaagatgaaactttagtaaataaaagactgggttcaggttctcgggtcaggagaaggctaaagcatgagaagagagaaggctgaagaatgagaaagaaggggggagnnnnnnnnnnnnnnnnnnnngaggaggaggaggaggaggagggaggaggaaggatgagactcctcgggcaaggagagagcacttgaaccaacagcttgcatccactgcacccagcaccgctccatgctcccctttctcaggaccctcctcatccggagcctggaactcagcataagtaaaatcaggaaaactgccacaggcttaaggccaaggtcggttggggtcggagaagatcctgcctcaaacaacagaaataaacctcacgacaaaatcatgctctccacaaactgataagtcgaggctctaaccccacagtgtggctgtgtttgaggtagggcttttgggttaaagaaagtcctaaggatggggccctagtccactagaagccctacagaagggaaaccagaacccagggtacagtacagaggtaggatgtgtgcttagcctactcaaacaggattctaggaaagttcccctgcatcactgagacaaacagaaggaagctgtcccctcttacctgcttgacccccaatatccctcatgtttggaaaagagccctcaccagagactgaactctcctcaccttaactcctagtctggaaactgggacttctagcttctagaattacaagaaataaatagcaatgtattgggggaagattcagttcaggcttttttaaaaatggagggtgggggtggggctggagagctagctcagcagttaggggcactgactgctgtaccagaggacccaggttcaatccccagtacccacatggcagaacccaactgtctgtaactccaggatacaacatcctcacatggacacatgtgcagataaaacacccaccgatgcacattaaaaaataaaactttttgaaaagggtgtgtgctcctagacgtgagctattataaaagctccatggacttgttaccactttggaacatggtatttggggcctcctgaatccatgtgccctggccaaggtcactgatacatgcctacagaccgaaccttctccataagaagagttttttttctttcagtgttgattggagcttcggtaagcagtagtcagtctagctctgagcagcatcccccacccattgttccttctttcattcttttcattcacatagacacttcactgctgttagcatctaagttttgattcatgtgaattactcaaagtaggcatcccgttggcatgacaggaggatgggaggtggcaggcctgaggaaggagatctattggtaattaagtcccaacctcatcccatcatggggtgttgggagccattaaggcaacgctattgtcctggtctctgaattgggcctctccccccgagaagaaaagagggtcaaaagcgggccaccgacacatggattccgagaactacaggatgttccagctctgggtcatcaccgctctcctgaccacaccctgacaccaccaagttcctgcttccccgtgtaactgcctaagaatgtgcaattctattgcccccccctcccactgataattacttccccttttgcttgtattgccctacccctcccactgataagtatctgtacttccccctttgcttgtgcatttaaaccttggacctttctcaatacattggggtcttgatacaacttcagaacggtttccgtgtcgttattcgtacaagaccctcgtctctctctaccccccatttggttattaggaggaggtcccctcgagatcctcgaataactggacctgctggacgggtcaatggggttcatagactcccagagacatagtctcccagagagtcatcatatatcacttcctaaagagcaagcttgttccagtggatcccagtttcttcaggtcctcaatgatgtcatccatgctgcattttacgagagcttgcttccccactccaccaatgcaaatgacctccatcatcctgcctggggccaaagagccaagttctccaacccaaacccagaagtggcaaggagcaacccatctgcagaggcagatgccgctcagggccaggcagccttcagcctatttttattctgtagggttgttttgttttgttttgttttgttttgttttgttttgtttggagacaggctgtaatgtatcctaggctagccttaaacttctgatcttcttgtctccacctccccagtgctggggttacagttatacaccagcatactaccttaagaggcactggggatggaacccaggcttcgtgaatgttaggggatcattctgaacgttttaaagaacagattctttccagacctgacagagaaatgcgtgagatggtttaaggggaagtgccctttagcaaccctggttccttaaagtgggggaaactgggataggagatccaacggcaaccaacagaacactgggattcctagctttcggaggcttgtggaaaggcgcgtctaagcttagggggagggatgtctgagtataacggattagcacaggtactacaaaggatattaaagccataatttaaaagcaaatcctactgttccaccctactccatggctgctacaggcttcagcagtttagggaagttactaaatacataggatatcaggagtgcccctagcaggggcaatgtgtgaccaactgacctacatctgagctctcttttttgttgtttaatttttagatagagtttcctccatagcccacgttggcccagccccaaactcagatcattttgcatgtgcccccaggaccaggcttaagtgtgttgacatggtctcttatagaatctccttgacttcttaatcctcctgcctctacacaagagtgagggaacggtaggccaggaggatctttttatccagagcccatctccccttccagggaatcatttggatctggaacagcagctgtatttctgtttggacaaactaagtcatatgcacagccgaagaggtgaagtggaaacttagggttctttggagagtctgttgtgtcggctggtgttttgctggggcaaacacgtgaaggagtgttttcctgaagtggatacagatggagaagctaaggcagagtcatgaaggaacagttcactgaagcagacacaggtggaaggatgttctgctaaagcaagcacatgcaaggacacatgatgaaggaatctttgctaacaacacgaatgtattggtctgccttacattgcaaagttgagctgcatttgttgagactccaagggctgattggatgcacatgccaaggcaagaaccatgccgaggaaaggcacgtgaaggacactcgatatttggagggtgtattagtcagggttctcaggagtcacagaatttacggatagtctctagatagtaaaggaatttattaatgacttagtcggcagcccaattcccaacaatgactcagtcgcagctgtgaatggaagtccaaggatctagcagttactcagtctcacacagcaagcaggcaaaggagcaagaactaaactcccttcttccaatgtccttatattgtctccagcagaaggtgtagcccagattaaaggtgtgttccaccacacctttaatcccagatgaaaggtgtagcccagattaaaggtgtgttccttaaacttggagatttaatcttctggaatccatagccactatggctcaagatctccataccaagatccagataaggatctccaagcctccagataagggtcactggtgagccttccaattctggattgtagttcattccaaatatagtcaagttgacaaccaggaatagccaccacagagggtataaacaggactccatggagtgacagaaacagggcttggcttgctggtacagctggctgtgcaacgcttgtgagtcttgcaacttcactgaccttcgagaagagaggcacagctgaggacttctgatgttcctattggtcctggtcccacctgctgacttgagctgaggctgaggcctggctgtctctgctaggtcttgtcaccacagttgctaacccgactctaccaaattagaccgctggtgtagccgggaagtgtttgcaagtggatcaagctgccgctgcctgctaacctatgaactgaactgctgatttccagacaacacagacgggaattgctccaaagaacctttctaaacaggtccacttcccccacccccacccccattctttctttcccactatctctggtggatggtggactacaagagaggttaaagtgtttaagaactatcattaaaaataagatttgaaaaaaaatcaaatctacaaagaggggctttacagaaaatctcagtgaaaaacacacgtcattaatagcagcacccacctttcactgaagcatttgggaagcagagacaggcaggtctttctgccttcaaggtcaacttggtctacatcatgagttccaggccagccaaaagctacagagcaagacccttctcaaccaacaaaaaagattagacaactgcaagaagggacaacataaataaaaggaggaatcaaaacagaacaaaacaaacaaacaggtcatcatttcacctcccaacctgcttcccaaatagcccaactgagtgaagttgccctgggtgctttggtaccacctgccccacacacatgatcttactaagtagctccagctgctcaggaatgcagtgtaggccatgggagcctcaaactcacagctggcattaaaggcatagcaactattccttcccacgcccacgccgtggtggagctcagagctccacacttgctactgagctacgcacccagctgcctagagcttaaactgtcatctcctattggttttcggagtttgtcttgctagatgatgtttccaaaaagcaactctgagccaggcttgggggcacaggcctttaatcccagcactctggaaacagaggcagtcaaaactcttatcacccagaggctagcctggtctacacagacagtcccaggccatccgcgaaagcaactctgagctccgaaagtacaacctctctgaactgccctctaaatcttcatgcttgttagaccctccataccctgctgcagaacccaaggctttgtccaagctaagcttatgtttctacccagctagagctgcaaccctcacacttctgcccagttttccctatggacactctgccctcaagccttattaatgctctgtacttgcggtcctgaaacacaggcctcctcccctctatctgtaaacatcctccctggtccctttccacttcaaatgtgccataccagtacatgaagcctctccagtcaattaggactcctcttctgcttccatgatatcttctccatcccttgatcctgcacttaccgggtaaataaaaccgtttgcgataaaacacaacaaaaatattgtatttatgcaatgtctcctctactagacaaattttgttcaattcgtttatggaatacactaacaggggattatataatatttgtctattctgtctaagcaaatagttgctgaattgtatgtgaatgtgtgtgtgctgctatgggtcaaacttagccttgcaacacattagagaagcaaggagtctgccttctcatctacttccccagtccttgaatgtatttttgaagtacataccttttaatttctagctttctgattgcttaaagaagttcgtgtttaacactacagttaggatagcatcctctttgaaaccctttgtttgtgggatgggggtgctggggtatcaaacctaatgccttgtgcatgctaaatatttgttttatatttatatacttttgtttattgagacagggtcttgctatgtagccttggatggcctgaacttgctaagtagaccaggctgccttgaagtcacagagctctgcctacctctgcctcttctagtgttggaatgaaaggcatgcaccaccaggacagatctaaaccttgattacatcgtgaattttgtcaacctaaaaagacaactctcatttcaaaagagataagagatagctttattctagaaccaaatgtaagtgactgtgactcaggaacacagatttaggttctccacactctccatgttctaatgtgggatcagtcagtctagtgaacttttacagtaaaaaacaaacaaacaaacaaaaggaattggaaatcaagccacttttcaaatacaatggtgagaatatcagataggtggatcagagaaaggcagggaaatgggaggctttggctcagatgttatctgaatggcattcttagcctttgggctgtggggtgctaggaatgtgtctgtacattccagaggacttaatagtcacatgagattaagtcacagagccggtactaaggagcctgaaaatgacaggaggtgattagctctggacttgcatcactcctccctctccacgccagggaagctctggccagccaatcgggcttgcagacatttcctgtaaactgaggttctttccaggaacctctgctctcactatgcatatttttgtgtgtgatgctcggggtcttgttcatgcttcaacagtactcaacttcagagcatccttcccaatatgtgactatgaacaacgacaaccacgggaccgacacatcagtacacagttgccgctcagcttagtctcttcactctcgaggttgctgatacaatggcttcttcatgacatggtaatattttcatatatgtacatgatgtatcccatcatatccactctttctctgttgtctcttgcctcctaataactgctccttctcctgccgtgtttgtgtgcctttgtgggttccactgagcctcagtagggttgtttacagtagcaacagttgctttgttgccagagcacaggtgagtgcctcgccaggattctgaagaaaatgtcactccctacccccatcaacacctaactgcctctctgtcctaaatgaggactaggacctccaaagccccttgagtgttgactggccctatcttctgcaaataatctgtgagttgccaaagtcgaacaactatgtcattcaaggagagttccacatgccctctcccctcaccccccccctgcctccccgttttttgagacagggtttctctgtgtagccctggctgtcctggagcttgctctgtaagccaggtggcctcaaactcgcagatttctatgcctccaaagtgccgggatcaaaggcgtgtgccaccacgcctggctactctttgctctctatccatctgctaatgtcccctgaatgttggaggacatgcgacagctgtcctgtttatgactgggcactcaagagtcacttaacctctgtacttttgattagttatgagtctctgcagtcacccgctgactactgcaaaaagaacctcctctcagcaaagctgacggcagcagtaacgggcaggaacattgctatttagaaggtaattagaaaggcacatcatgtccacttatcaaaacaatggaagtagcttacctactggactctacttcaggctttggaacaggttcacaatagcagaaatgaattccctcctatcgggcaggcctcgatgccaatcagaaaacggttggctacccctgtaacagtcctgacacgttgtaccaagaggttgttgtctggtcagttgatgttgcacatagggtccacagcaaaggctgttggtgacaaagctccccactccccaccccacccccactcgcccctgctccagcagcctatagaataccttgtgtgcgctaactgggaggaaccttccagtccggttccagctggatccctccatgttctgtgactaacacatatgtcgacacttcagggtcttatcatttatttctggtaggcagccaatagcagtggcaattgcctgtagtgttttaatggcttcaggagctactatatgtacagtagcccatagctggcactgggcgctctaatagcctatggcttgggtggggaacagctttatctacccaggaaacttccactcaagctactttttttaaagatttatttattattatatctaagtacactgtagctgtcttcagacacaccagtaaagggcatcagatctcattacggatggttgtgagccaccatgtggttgctgggatttgaactcaggaccttcggaagagcagtcggtgctcttaaccactgagccatctctccagccctcaaactacttttaaacttgttaattaattcgctcatggagtatctaatttccttaaggctgtctcattcattacaagttctggttgaccctctctgctccctctgctgtgctttcttggctactgacaaactgcttacaggagtaagaaagggaagggggaggggagaaaatgtggtgtgtggtgggggttgggggagggagggagtcagcatccatagatccattacctaaactgtaaaccaactgctgtattttgttctatctgcaaagcacttgctaccttcttatgaccctttgccttgcctaatgactcatgggcgattgattgctgtacagataagaaaactgagcctcagacgctaataatgaccagctaaggagttcctggccccgatgctgtcatcggcttgtcagctgattcatccgtatcctgtgggtgttagatgttttaggccaggtctggaaagcattttgaatccttggtgacgatactcattcaaagtttcttttccattcccggttagggttagtcactccttacacaacctacctgaggtatttcttcaactcattctctcctgcttccctctccgcctccccccaccccttccctctccatacccccttaggtgagaatgtgagtcttgggcctctcaagtgctgtgtaagtgctccaccactgagcaacatctccagcattttcctggaacatatggcatccgattaaaacacagctctgaccatatcctagcatccctgcaacagagctgacaaaaataagggttttctcaagagaatgtgggtgtgtgcatctgactctcagactattgaaacaatggaccccccaagaaatgggaatttccttcaggaaactcctgctgggaaaaggaaaaggcctttgcttgagggggaattctttcaggaagcgggaattcacacagttctatctagtcagatcgctttgacccggactgctgagatgtgcatacccctggccttctatttgaactttaatctcattttgggatcccagagagaggttaactcttcgtccttctaccccatgtgggcatattaagtacatctccttttttcagttttgttcgtttgtattcttgttgttgttttgagggttttgtttgtttggtgtttttctgtttctttgtttttattttgagacagagcttcactgtgtagctctggccggccggatctctccagaccatgttgaagatccgggcccctgccccagtgctgagattaaaggcggtcgccctcaccgccgcacctgctttccactttcaatttggctttttcagtggtttattggatggataatgctttaaattcggtaacagtccaaattacgtctggcccatcccaagcagttgttttgggtttttttggttttttcgttttgttttgtcccccccaattcccttagccttcattttccataactacagtgctgtctcccaggtgtgacttccagccctccaatcagggcccagctagctccaaggccaattccaccagaccttctggcagggctgacgctcaacgccctgcagtccgtttccgcctctcgtgcctgaggggcggatgcttgtcgcagccgccacacaagtagccagcacttcccggtgcctaatctccttcagcaccgcggagcgtggagcccacagctcggggaggacgttctcccagacacgcgctcgcacacactcagcgctggcaccaacccgggattcccagcctgtggacgctcccattgcagccggcgggaggggacagannnnnnnnnnnnnnnnnnnnctggtcgtgcgcgcggatccccccctctgcagccaccgcgtggtagcgcccgctccgccgccgctcgccggttgctccccggcgctagctccctcgcctcagtgagccgccgctgctgccgccgccgcgtctgcctcccggcacagctcgcccggtcggcgccgagggacgaggaggaaggaacaccccgcagcgcagcggtcccgcgccacccccaccccaccgtcgcccgcccagctcggcccggctcgtcagcgcggcggcgcccggcatgtatcagagcccgcggcggctctgctcggccctgctgctcagggacgcccccggcctgcgccgcacactcgtgcccggcccgcgccgaacgctcgccccgccggtgctcggatctcggcccaagtccccgcaactgcaggcggcggcggcctcgggcgccgcgaggtcgcgtccccgaacaggtgagcgggagcgcggaatgaatgggcgccgcgggctggtcccctgcgttcaccccggcgtcgcgtcgggagggagggaacgccgctcagggggcctcgctttccgcgttcgtgtctgatccccctgaatccccggtggccacagtgaccccagtcgctaacgttttgctttacccctcacccccaccccccgatgcagggcggtaacgctttggttgcagacggcttgtggacatcctcatgaaggggaaaaaatatctaaaaatggcatgatcttgggtttgcagggcctacaggctctgaatcttctcaaagccctggtagtaatagcacatgttaactcgttacgctcattaatttatttatgttttggaagggggggagtcttccacttcgtcttaaatccctggtaaatcaacctttcatgaagtcagttctgtacatcatcttgtgttttttaagtgtctcctttctgcctaaaagcagattgcgacggtcacaaactacatataaatcaagtatggcttttaaatgagtagtttctccctcaaatctagcaattacttaatgtaggcgctccttcagaaccagcaattattccatagtacttttctagaaagtgtaatttggttgttacctcaaattaggttattgccgtctaacattcggatgcagtaaccatccttattttactagagtacattttgagagagtattggttgaatttaaggacagagtgtacattagaacgtataggttccctgtggttgtcttttgttgcctttttttccccccaagacatggccatggctgtcctagaccttgtctatgtagaccaggctgggttcgaatttatagagatccacccgcctcagcctaccggatgctgggattaaaggctagcacgtggcgccaagtttcatgaggctttctttaacgagttatcgcagggcagtggtggcccacgtctttaatcccagcacttgggaggcagaggcaggcagatttctgagttcgaggccagcctggtctacagagtgagttccaggacagccagggctatacagagacagctgtctcaaaaaggtaggaaggaaggcaagacttttgaaagtccagggtcgtgcccccacctcagggtctatagaaccttggtgggttgtggaataactgttgggatggatagcatcccagtaacaccattttcctgttgctcgtctcaaggaggaacattgttaggtttggtggtggaaaggttggctggtaccagccccctccaactccttcagaagccggatttgtcattaggcacatctgtgtgcacaggtgggttatgtagttcagagcaaggacagctgtggtaatggagtcaaagagttggcagtgtgaggcttctgaccgatgtctaatgcatttctttaaaagttaattgaaaccccttggatttatgggtaaaaacctatagatggaaggaggtagggtagggaagtggtagactgtgggttttacaataggccctagcagcaaagaaagaaattgcaggcttttttgtggtacttaaactatcttagacagcacagggtgtaggcaggtttcctgtttcttgcagctttgggggaaagatacagtcattgattcgttgctcattcttatgccgtgtcactcactgtagaagagtctgtaatatattaaattgatgagtctaagctttaggttattcaaagagcttacttcccattaggaagtgagatttggggctaaggagatggtgcaaatggtgaagatgcagaagacctaagttcagtccacatgatggaaggagagaaattaagtccttcaaggtgttgccaggcatccacgtgtgcctacacacatacaacaaactctcgggatttttagatttggttgttcgtttgttttgttttgttttgttttgttttaagaggtgagatttaagcagatgtggtgattcaggctggaacatttcttttttttttttgttttgagagtctcaatgtaacccttgctgtcctggaaccctgcacccaagtgctgggattcaaagtgtagcctgaccaggagcagatcttgaattcgaggccagcctggggtacaggttatggttccagtcctgtgttttttaagggggggggagctctcacaaaggcctgtgtcattaaatgaaacaccttttagtctcatagtgacatttttgctgtgacaaggtggaggtgacctgtagtgctaactcttgatacttccggggttcactcaggcggtcgcagcattcaggactagacttgaaaggagaagatgcagcttgaggtgctgacacaaacctttaacccagcactcggcaggcgggtctatgcgttcgaggccagcctggtttaccgagttccaggaaaccctgacttaaagaaaaagagaaactggttagggttgaaggtgaaccattcaaggaaacaacgcggaaaggaaaggtaagaagaaggacatctaaggcgttaaatgagggtggagaagaagccttttgcagaaggggcggcattcttcaaagtatcttggaaacatttcatttctgctcaagaacaagattattgagtttggtaaatcaaatcgaatacccaggttccacattataaaaaagaaataacaagtcctcaaatcccttttatttcttccttctcactttttaaataaagattcttttatttattttatttatttttttggagacagggtttctctgtgtagaccaggctggcctcgaactcagaaatccacctgcctctgcctctgcctcctgagtgctggggaaaaaggcgtgagccaccactgccctcattttcaaaaaaaaaaaaaaattgggtgcttctcgtgccaagggtgtgggagtacctgaggaggccagaagagggcgtcaaatcctggggatgtttgttgggagtgcaccagatgagggaaggatccagaagagcagctgtgctcttgactattgcgctgtctctaggccagcaccttcccttttttttcttaagattaaaccaagatccttgctcatgttaagcaggtggtggcggtggtggtttttctttctttcttttttgagaaaagggcaaccatgttgcccaggctggtcttaaacattcttttttttttttttttaaagatttatttatcatatgtaagtacactgtagctgtcttcagacactccagaaaggggagtcagatctatacgaatggttgtgggccaccatgtggttgctgggatttgaactcctaaccttcggaatagcagtcgggtgctcttacctgctgagccaactcaccagcctggtcttaaacattcttatgtggttatagataacctcaaactcactgattctcctgcctttgcaacaaaactaggcctgggccaccaggccaagcaagcagattgtctctaaaaagccccgaacttgttaaaaggccttaaaggagctgaaagctgttctacctcttttgtgaggttgtgagtaccaacacacacgttcacagtctaacccgcatcttgcagttaagtgctcagaggatgcgcaccttcagagtcatcacagacttaccacgtgggcttaaaagggaaccttggtggcccatctcagcgttttgctttcctctctaaagccaagacagcagcccacggcaaggcaacagttgccacagttacagtgcggcagggatgcagggagtcctctgtgggctgggagatgctcctcctcctcagttaatgaagagttggctggatcacggctctccaccactggaacacggtgctttttctcttggaacagttttaaaggcaaataccagctcagtagaaaagacatctttatttggtaggccccttaactgtgtgagtaagctgtttatgagaaagaagtgggaaagcttgtaattatcaggtttctccagaatagatgtttatccttatggagaactaagagctatcattctcctgtagtagtcaatggcgacagttaaaatgcagagggggagtgagagtggtggttaggttaggaaccagggctccagatgggaaatcgatgaatgaacttttacaaatcttttgaccttgcttgctttgtcttaatgccagatggcatctagacgagattaacacatcaactgataaggctatatccccaaactttggtgaacagtacactcaaccaagtgttaaaaaaaatgttccatatgctaatgacagcaggagttgagaagaacaagccagattgattgggccagattggttggggggaaacttcaaaggagtgggagagacagggtagtggtggggcacagagagcagtgtcattaaaaacgaacttcttggtgtcaaatgcaaatttggagatttgatttcctcaagagaaacctgataaatattggcaagcaagcgcgtcttgtattccttcaggggttgggagtattctatacacttgagcctgcctttccaaaaggtacttggggtttttttttttttttttaagattcatttattattatatctaagtacactgtagctttcttcagatgcaccagaagagggcgtcagatctcattacagatggttgtgagccaccatgtggtggctgggatttgaactcagaaccctcttaaccactgagccatccccccccccccttttttttaaccacctaattttatgtttacgggtattttgcttgcatatatatgtctgttcaccctgtgcgtgcccagtagctgaggaagaaagtagcaaccttcctggaactggagttactgggtgggtgtgagccctggggaagagcatggagttctcttaactgctgagccagctgcttcttagaacctttgaagaaccatggagaggatctgaaagaatgggctttacttgaaggagaattaggtggtgccctggtatcttgggataaggaggaagggagattgacagccacgtgttaggagttactcttgacctatcagaagtggcatggcctcagtggttatcatacctcaggaaatacttagaacttaggagtgacgcaccttgctggaaccgtctggttagctaagatgtcctggttatctttggtttgcgatgtgccgaggatcgacctgggagcctccccttgcacatgctagacaagtcctgaggcactgagttacatctctaacccttgtatttgttatgttctgtagttgggaaaacagcctccctgtagaaagaagaaagctacagggcctcaagtaaggcttgaagcactcttagggtgagctcagagtgtcagatgtagcaagggttgttcaggaggaagacagataaaggatacagatgtctataaactttttctctttgtgctatcaaaaactgtcaggggcccactctggttttctgaccttaagttgagcctgaacatttggtattctggcatgcccaagtgggtgatgtaaggagactcacttcacttagggctttagaagcctgccctaattttttttattgatgcatttcttataccttcaaaaattagagattggtattagatgatgaggtttgtgcaaaaagggcaactttaaagtactttcactgcatcttgagaatgggaagcccgtgagaggaggagcagtgttcattttctctacacagcccgtctgaggccagcctgggaggcagaggaccctgcctcaaaaagtcaataatacaataaagccagggaatgtagcttagtggtagaactcttccttcagtccccggcaccagcaagaagtactgtgatcacgtgtctaggaagtcccttgctcctagatagagtactgacctctcagtcttctatgtctcccttcttatctgcccttcctgcacctaaatccagtggtgggctttgaaccctgtgtctcttgtgcatgctaggtggacactccccctgagctacagtcccaatttgcacggccttaatttggaagggggtctggaaagtggtagttaggcctgtctgtagaatgaggaagccagtagagaccactttctttgccaaaggtaaggaaggctgcctgtcttctgtgctctctttccctgctcagaaataccctggaaaaatagcaagatagcacaagctggtaatgccagcccaccctccctctagaggttgatgccagaggatttcaagtttgaagcctgcctggactgcacaatgaggtcctgcctcaaaaacaacaacaaccaaagtgaaccaaaggggggaaatctacgtaaacatgcccagggagtttgttcatcgtctgctcctgatctggcctgcctcactctggggacagacctctccaggcctaagttgtgtactcactttctttatagagctttatctgattctgtcctgcaggcagtgagaagggcaggctgaaactagtgcagctgtttaaaatctcctttttacgtagtttgtttgcttatgtgtaggttgctggggaggttataagaggctagaggatcacagggagctggaggttgtaagaaacccaacatggctgccaagaatttgccctattgatggcataacttgtggctttctgactaattctttatggtttttttttttttttagttttatttatgtataggaatgttttgcctgtttgtgtgtgtatgtatgtatgtgtaacacaggtgtacctggcatcctaggaagtcaagtgtctgaccttgtggcactggagttacaggtgcctgtgagtcacggccttgtgtgctaggggccaaacccaggtcctctgtgagagcagtaactactcttaaccacagagacatctctccggccctaagttttttggaatgtaggtgctttattctcaaaagatcttagtatgttccattttgctgtcttgaaccagcagacagagtgacttatggtatgccagataaataaccagtttccatttttaaaagtaatttacaactgtactttagttgtgttttattgtttgtgacaggtctcatcaaatagcccagtggaatttactatgtagcctacctaggctgtcttcagactcactatgtagtaaaggttgaccttgaaccccttgtcatcctggcttccctcccaagtgactacagccatgtgttaccacccgcagaaggttctggaaattcctgtatgagaaattgtctttccttgttttataagtgacagaaaacttggttgatttcatcatatgtgcaaactctccaggagccgtgggtgaaagcaggtaaggagacagacttagaggtctatcttaaggtctctaagaccagctctgtgttaaccaagcagccctgtctggcctggagcttaccagatggacaagcccagccttggattcacagagatccacctgcatctgccttcccggtgctgagattaaagattaaaccaccattcccagggacagtttcattttaataaaggttaaaacatgaattggcagactgtctctgaagagcctcctagtgaatgtttaggctttggcccatgtctaacccctgcagttgcaggtgtgttatccacaggtggtatgcaatatatgtactttttatggacattgaaatttgagggtttttttttttcacgtgtcctggaatattgttctcaacaacttatcaatatagaagaaactaatggtgtttcatagattagcaaccgcacaaggccgggcaggggaccagtagatctggaccatagttgtggaccctgttctagagaactctgttgtcagcagactattcctttgagccttttcacagctgtaagaacaggtcatttttaaagcaactcgggtcttattaattcagggatgtgatggcaccagactgcttgtgctgggcttttccacgtatctcttgagagcattgttctagaacccagcttagggaagcagttggccaggtgataagcaattgcacagcaaacatgttaaagtcagtcttaatttgtttgtttttgagagcatgtgtgtaaaagatttcttgagagatattttctaatagggctgtcatgactgaaaatatggctcagcctcttctggaacatgccctggctgtcttgcctcgcctctgactttctgcctgctcttcatggactatggcactgtgtctaggtgtttgtatttttagacacattagatggagagtcatgaccttcactggctatctctggaaatgccacttgggtcatgacactgctttgtacagtctgtgctgtaccagtgtgtgtgccttgacggcagtgacgtcggcaggtggaggaggtgaaacttgacctctgatgattcctggcacaaagtctgggctgctgtgtgtgcctggcctctccctgttgctggaggcgctgctgtggctcagcagtccagggtgcaggtagctttcttcagggccccagctacagtctcctaacatcagtatccacatgtggacttggggatcgctgggagagtaatgggaacacatagtttgacattgtaacagcctgcttgctctttaaatgttagagagccgcgaatcattcagacaggctaggtacatctgttcagtctcacagagctgtaactgatgtaagcatagtgctagagattgaactctgggtcctgcccacactgtgcaagcacttcaccactggtctacatagcattgaaacttgcggaactatgtcctcatgagtaaagttaaacccagggcagcccgccaaacaccatgggctttgctgataaaaatgtatttattttgccattatgggtaagtgctgtaccaccatatgtctccagcccagttagcattttctaaagcactatgcacggtgcactgtccctgccctcacccaggatacggtggtacacactgctaatcccagcacttgggatgtgaaaggagaaatggctcaaatatccaaggacaactaaagttataaaagtatgtccggtaaagaaaaaaaaaagctagaagctagacctagaggcgggtgcttgaacatttgattccttcaaagtatgcgaagtatgcagtctagttaacatccgcctgtcccctgtcattttgtgtgaactttcacttacttgccctgcaggtggccacatttattcaggaccccacaccagtaaaaccactgaataagctcatcttaacctttagagggagttgagtgcatggccagcagatggcagcattgggctgctggtccttgtcatgccgtgttggtgtgcacttcattgttccaggtttccctaggtctaaggttgatcagcttccaaatctccttaggtgcgtgcctaagacgttcctggattttgcttattacgtcagctggattgtgttgtataacaagagagttggcgaggagtagttgctggataactgaagagagtgtggtgaggagctgctgcttctgattgcgctaggacagttcgggaactaggcagcaccagtgtggatctcagctatgaggctgcctccactgatctagttagaaatataaagctgccttatttaaagtcacactcccagccaggagctgtgaccgctcagtccaacacttacctagcaaatataagaccctgggtttagtctctagctctgaagagagaggtctagataaagctagatatggtcttttatttaatgtagtgtggggcgatgggagactgggtctagctgtgtaaccccagctggcctgaaactgtaaagaccaggtcggccttgaacttgaagcactctttacattaaattctttaggaggagaaggtggtccgtgcctctcatctcagcactctggaggcagcgaaaggctggggagctctgagtttgaggccagcctggcgtctatagagctagttctagggtacccaaggctccacgaagaaatcctgtcaacaaaacccaaattctctgaatttctttgagacaaaatgggttgctgttggccttatggcactgctgactgccaggtcttctgagggacagtaataagatgatgcctcaagacaggacaggtgactgccatccacctgcctccctgccgttccccagcccctgaaatgtgtactggctggtttgtgtatcacctggacactagctaaagccatccgagaggaaggagcctcagttaagaagatgcctccatgagaccccgctggaaggcattttctcaactagtgatccatgggagagggcccagcccatggtgggtggtaccactcctgggctctataagaagcaggccagtaagcaggatgtgaccttccgtgatctctgcaccagctcctgcctccagattcacgccatgtttaagttgctatcgtgacctcctaccaataagactgatatggaaatgcaagctgaatgtcttaggatttctattcctgcacaaacatcatgaccaagaagcaagttgggaagcaaagggtttattcagcttactcttccacattgctgttcatcaccaaaggaagtcaggactggaactcaagcaggtcaggaagcaggagctgatgcagaggccatggagagatgttctttactggcttgcttcccctggcttgctcagcctgctctcttatagaaccaagactaccagcccagagatggtcccacccacaaggggcctttcccccttgatcactaattgagaaaatgccttacagttggatctcatggaggcatttcctcaactgaagttcctttctctgtgataactccagctgtgtcaagttgacacaaaactagccagtacactgaataaaccctttcctccacaacttgctttttagtcacagcaatagaaaccctaactaggacaaaacacaaaacaaaaaaatttaggcaatgtttagatctgagtcattttttatctttataataatcctgaacttataaaaatctgagatatagcatataagatgtagttagatggtagtgtaaactagataatgtaataacagctgttagaaatacgtatttgtaaaattggttgctagctagttgagaaggtaggagaaagggcaggatttctttaggatttgcatgttggtgaatctcagccttgcttgtagagtattgtgaagttttaggtggtccacaccctcgggttctatcaggagtgctaggcttagcagccgggtataattttgacgctccccatgattgaacagtgagccaggctggcgaaccatgggtctgtgatgtcaggcgggtttcgggctagcctgctctatggtgcgctgtgcttaggtgttagcattgcaaggtggtgctgcagggctgcgctctctgcaacaggcgccttccagttaggatgtttcttcactaggctgttgaaggcgttttcctttcatggtgagccagggaagatgtaaggctgttgttcacttttgaatatcctttatccttccagaaccacatagcgcatggctgagaccgtacttagagtccaaaggagacaatggcagggtgtgcttttcagttgaaatgaaagcaacgccatctgtctgcttgtcagcccttcttgtaccttggggggatagctcagtggtaggacacgggcttagcatgacaaggccctgtgttctgtaaacactatagtctgtatttcatagcagcctgtgacagcctgtgacatacttaccctgtattcaggtgataattctgagatattccttttaatcttggagtcttcatttctcttgaattgaaggtaaaattactgtgctaacctgattttcactttttaaaataataaacttttcaaagtagcaatgccattttaaatttgcactgtccataggttcttagggctccaagtactttgttatgcttttttagtattgtgtttaagaactctttgcctaactcacagacaagattttctcctgcacttttcttacaagtttaatttttagctgaacaaggtggcacatacctgtaacagcagcctttgggaacttggtgccggcaggtatgggctaccgtgtaagactttccctctcagttgagttgtttgttgtactgggccagaacctagggctttggacatggtgtgctagacatatttcccatcaccgagttgtagtccctggcttgattaattttactgagatagggtctcactaaattaccttggctggtcttgaacttactgtattggctactcagatatacaactcactatccccctgcttcagcttggagagtaattaggctttttcttcttgggtgggctggggtagtggcactgcagttatggtggagaacgtgatgggtctgggaactgaagccaggtcctttccaagagcaacaagtcaatctaactgataaccaaatctcctaacgccacctagctcactccccaggctggttggatttccagactagcattaaacatgtgtgctacatatgccatgtgtcttagctctcaggaatgtatgtctgtctgtgcacacgcacacaccccgtaatgcatccatgtttgtacatcacaggaaggtaagcgtgaattcccactgctgctacatactcatcttacagcatccctgtcgatctcttcttcctttctagctagggacacttgcacccacctacccttttgtcgttgtattgttttgtttctttataagccagtggtttttggattactaggtccttccctctgagaaaggactttgcctttcagtagaatacagtgcgcatgaccgcagcttctctttttaacccctatgttttgttgttggatattgttttccagagataataaccccctttctcctaggctgctctgagagctggtcattttccttggtcaagtactcttgaagtctccaactgccagttaatatttacatttacatgaatcgagttcattctttatggctgcttctctggattttgatatgaaaaaccatgaccaaagcaacttctaaaagaaagtgtttaactgggtttacagtttcaaagggctagagctcatgatggtggagtgaggcatggtgggaaaacatctgagagtttactgcccaaacctcaaacaagaggcagataggacatgctgggacgtgtgtgtgtgtgtgtgtgtgtgtgtgtgtgtgtgtgtgtgtgtgggtgtgcatgtgtgggtgtgtgggtgtttgtttttttaaacctggaagccccgccccagtggcacaccccttccaatacggccacacttcccaatcctcgtccttcctgactccaccaactggggaccacgtgttcaagcctagtaggctttggctgctattctcattcaaacctcagcccatgtacccaccatcctctgactgtacagaccgctctaggagttccctgtcctgccctggcagtcaccactcctgcaaactccagtttcctgttctgtggttcctccaggcaacctcacagtcaactgtagaacccggcttctgtcactcagagaatgcatctaagatcaacctcttaggagtcgctcatgctcctttccactaataatgtgctgtttgcacactgaaggggatcgtggtcgctagttactaaatatagtaaaagcctattaaattaacagctataagccccactaaaccccgtgtctttcgaaatagttagctacccatgttaataataaaattcacagtgaagccatcaggactgagttatgtgtgggaacctaattagtcttgtttctccgtgtaagaatgtccgccactgtcctgacctgaacttctgttgctttcatgaataatattgtatgctctttgtcttcgttgaacatcgaaataactttttcatggtttgtcgccatttgtagtgtcttggggagggacgcgtgtcttgtgagcttcctcaggctgttgtaccagaagcccgagagtgctccttagtgttgacgcacccgacctcgctcacaaacacagcatctcaaaaacatcacagaaacaaaatgcgcagactagttgtacagttttctccttttttaggcaaatttttctcaaaataacttcttttattccctcctcctctcatactgacaccaaaaataagaaatttctgttgtcactaacatttgctgtgttactaattccagacctctctcccttcatctggcttcaggtgtcagcagtgtgggttcctcgtgaagtgtctttacaagccgtctcccctgggcttgcctttgtggatttttggctttcacaagctgcatctcaccctgtccatctcagtccattggtggtggagtaccaggccttgcacattgcaggcagacctatctccgagctatctaattcaacagtcacactgtcttcccaagggcccatccctctcacatgcccaggccaactctgcatggagttagccaagctgtatccagacaaacctagaactctggatcctgctgcctcaacctcccaagtacctggggtcacatactcatgtgtgtgtgtgtgtgtgtgtgtgtgtgtgtgtgtgtgtgtgtgtgtgtgtgagtgactgtccttcctctgtcctctgatgttttctcttctactgtgttgggagccgcccccacattcgccgttacaagatggcgctgacatcctgtgttctaagtggtaaacaaataatctgcgcatgtgccaagggtatcttatgactacttgtgctctgccttccccgtgacgtcaactcggccgatgggctgcagccaatcaaggagtgacacgtccgaggcgaaggagaatgctccttaagagggacggggtttcgttctctctctctcttgtctctctctctcttctcttgcttcgctctcttgcttttctctctctcttgctttttcgctctcttgcttctcgctctctcttgcttcttgctctcttttcctgaagatgtaagaataaagctttgccgcagaagattctggtctgtggtgttcttcctggccggtcgtgagaacgcgtctaataacaattggtgccgaattccgggacgagaaaatccgggacgagaaaaaactccggactggcgcaggagggatacttcattccagaaccagaactgcgaatcaaggttataaggttcccgtaacacagactgttgagaaggattcaactgccgaattcagaactcatcagctggggaacgacggtgataaaggttcccgtaaagcagactgttgagaaggattcaactgccgaattcagaactcatcagctggggaacggaagtgagaaatggctttaccaggtatgtttggccttgaactttttctagtgttaggagcccttttgttccttttcacatgttatatagtgcttaaggcagggctaaaaattctagaggaaattcaggacagtctatcagaagtaaagcggagagagagagtaggaacaaggagaaacggtaagtatacaggcctttccaagggtcttgaacccgagggaaaagttaagggttaggtaggaatacctggagagagattagaagaaaaagaggannnnnnnnnnnnnnnnnnnnagaaaaaagatcgattagcggaggtctctaggagatactcgtcactagatgagctcaggaagccagctcttagtagctctgaagcagatgaagaatcctcctctgaggaaacagactgggaggaagaagcagcccattaccagccagctaatcggtcaagaaaaaagccaaaagcggctggcgaaggccagtttgctaattggcctcagggcaatcggctaccaggtgcactccccgccctatgcggagtccccgccctgcgtagtgcgtcagcccgtagtgcgtcagcaatgcgcagagaggcagtgcgcagactcattcattccccgagaggagcgggggaaaatacagcaggcatttccagtctttgaaggagccgagggtgggcgtgtccacgctccggtagaatatgtgcagattggggaacttgccgagtcggtccgtaaatatggaatcaatgctaattttaccttgatgcagttagacaggcttgccagcatggcactaactcctgccgactggcaaatgattgcaaaagccgctctccctagtatggccaaatatgtggaatggcgagctctgtggcaggaggcggcacaggcgcaggaccgagcaaacgctgctgctttaactccagagcagagagattggacttttgacttgttaacgggtcagagagcttattctgctgaacctgataagaggtatcaatggaaggtcttaccacagggaatgtccaatagtcctacaatgtgccaactttatgtgcaagaagctcttttgccagtgaggaaacagttcccctctttaattttgctcctttacatggatgacatcctcctgtgccataaagaccttaccatgctacaaaaggcatatccttttctacttaaaactttaagtcagtggggtttacagatagccacagaaaaggtccaaatttctgatacaggacaattcttgggctctgtggtgtccccagataagattgtgccccaaaaggtagaaataagaagagatcacctccataccttaaatgattttcaaaagctgttgggagatattaattggctcagaccttttttaaagattccttccgctgagttaaggcctttgtttagtattttagaaggagatcctcatatctcctcccctaggactcttactctagctgctaaccaggccttacaaaaagtggaaaaggccttacagaatgcacaattacaacgtattgaggattcgcagcctttcagtttgtgtgtctttaagacagcacaattgccaactgcagttttgtggcaaaatgggccattgttgtggatccatccaaacgtatccccagctaaaataatagattggtatcctgatgcaattgcacagcttgcccttaaaggtctaaaagcagcaatcacccactttgggcaaagtccatatcttttaattgtaccttataccgctgcacaggttcaaaccttggcagccgcatctaatgattgggcagttttagttacctccttttcaggaaaaatagataaccattatccaaaacatccaatcttacagtttgcccaaaatcaatctgttgtgtttccacaaataacagtaagaaacccacttaaaaatgggattgtggtatatactgatgnnnnnnnnnnnnnnnnnnnnnnnnnnnnnnnnnnnnnnnnnnnnnnnnnnnnnnnnnnnnnnnnnnnnnnnnnnnnnnnnnnnnnnnnnnnnnnnnnnnnnnnnnnnnnnnnnnnnnnnnnnnnnnnnnnnnnnnnnnnnnnnnnnnnnnnnnnnnnnnnnnnnnnnnnnnnnnnnnnnnnnnnnnnnnnnnnnnnnnnnnnnnnnnnnnnnnnnnnnnnnnnnnnnnnnnnnnnnnnnnnnnnnnnnnnnnnnnnnnnnnnnnnnnnnnnnnnnnnnnnnnnnnnnnnnnnnnnnnnnnnnnnnnnnnnnnnnnnnnnnnnnnnnnnnnnnnnnnnnnnnnnnnnnnnnnnnnnnnnnnnnnnnnnnnnnnnnnnnnnnnnnnnnnnnnnnnnnnnnnnnnnnnnnnnnnnnnnnnnnnnnnnnnnnnnnnnnnnnnnnnnnnnnnnntgcaaaaaaattttcataacaattttcatgtgacggctgaaaacattacgcagtcgtttctccttgacaagaaaagaaagcccgtgacattgttactcaatgtcaaaagctgctgtgagttcttgccagttcctcatgtgggaattaacccacgcggtattcgacctctacaggtctggcaaatggatgttacacatgtttcttcctttggaaaacttcaatatctccatgtgtccattgacacatgttctggcatcatgtttgcctctccgttaaccggagaaaaagcctcacatgtgattcaacattgtcttgaggcatggagtgcttgggggaaacccagactccttaagactgataatggaccagcttatacgtctcaaaaatttcagcagttctgccgtcagatggacgtaacccacctgactggacttccatacaaccctcaaggacagggtattgttgagcgtgcgcatcgcaccctcaaagcctatcttataaaacagaagaggggaacttttgaggagactgtaccccgagcaccaagagtgtcggtgtctttggcactctttacactcaattttttaaatattgatgctcatggccatactgcggctgaacgtcattgttcagagccagataggcccaatgagatggttaaatggaaaaatgtccttgataataaatggtatggcccggatcctatcttgataagatccaggggagctatctgtgttttcccacagaatgaagacaacccattttgggtaccagaaagactcacccgaaaaatccagactgaccaagggaatactaatgtccctcgtcttggtgatgtccagggcgtcaataataaagagagagcagcgttgggggataatgtcgacatttccactcccaatgacggtgatgtataatgctcaagtattctcctgcttttttaccactaactaggaactgggtttggccttaattcagacagccttggctctgtctggacaggtccagacaactgacaccattaacactttgtcagcctcagtgactacagtcatagatgaacaggcctcagctaatgtcaagatacagagaggtctcatgctggttaatcaactcatagatcttgtccagatacaactagatgtattatgacaaataactcagcagggatgtgaacaaaagtttccgggattgtgtgttatttccattcagtatgttaaatttactagggcagctaatttgtcaaaaagtctttttcagtatatgttacagaattggatggctgaatttgaacagacccttcgaggcttgccatcattcaggtcaactccacgcgcttggacctgtccctgaccaaaggattacccaattggatctcctcagcattttctttctttaaaaaatgggtgggattaatattatttggagatacactttgctgtggattagtgttgcttctttgattggtctgtaagcttaaggcctaaactaggagagacaaggtggttattgcccaggcgcttgcaggactagaacatggagcttcccctgatatatctatgcttaggcaataggtcgctggccactcagctcttatatctcacgaggctagtctcattgcacgagatagagtgagtgtgcttcagcagcccgagagagttgcaaggctaagcactgcaatggaaaggctctgcggcatatatgagcctattctagggagacatgtcatctttcatgaaggttcagtgtcctagttcccttcccccaggcaaaacgacacgggagcaggtcagggttgctctgggtaaaagcctgtaagcctaagagctaatcctgtacatggctcctttacctacacactggggatttgacctctatctccactctcattaatatgggtggcctatttgctcttattaaaagaaaaagggggagatgttgggagccgcccccacattcgccgttacaagatggcgctgacatcctgtgttctaagtggtaaacaaataatctgcgcatgtgccaagggtatcttatgactacttgtgctctgccttccccgtgacgtcaactcggccgatgggctgcagccaatcaaggagtgacacgtccgaggcgaaggagaatgctccttaagagggacggggtttcgttctctctctctcttgtctctctctctcttctcttgcttcgctctcttgcttttctctctctcttgctttttcgctctcttgcttctcgctctctcttgcttcttgctctcttttcctgaagatgtaagaataaagctttgccgcagaagattctggtctgtggtgttcttcctggccggtcgtgagaacgcgtctaataacactactgtccgtattgccctacaatgtagtagggtttctcttttgtttttgagacagcgtctcactgtgttaccctggctggtctggaaagaattgatgtataccagactagcaaactcagaaacctgcctgccactgccgcctaagtgctgggattaattggacaatcaactctgagttctcttttgcacttgctctccctctgtccagactgcccttcagtagatctgttgggctgattttccagcctcccgtatctttgaagacccatcctggaccatcacagataagcaagcgatttctctgctacccagattcctacctcacctacttcctgtttttactccattaaagttttcgccaaatgtacannnnnnnnnnnnnnnnnnnnnnnnnnnnnnnnnnnnnnnnnnnnnnnnnnnnnnnnnnnnnnnnnnnnnnnnnnnnnnnnnnnnnnnnnnnnnnnnnnnnnnnnnnnnnnnnnnnnnnnnnnnnnnnnnnnnnnnnnnnnnnnnnnnnnnnnnnnnnnnnnnnnnnnnnnnnnnnnnnnnnnnnnnnnnnnnnnnnnnnnnnnnnnnnnnnnnnnnnnnnnnnnnnnnnnnnnnnnnnnnnnnnnnnnnnnnnnnnnnnnnnnnnnnnnnnnnnnnnnnnnnnnnnnnnnnnnnnnnnnnnnnnnnnnnnnnnnnnnnnnnnnnnnnnnnnnnnnnnnnnnnnnnnnnncagatctgcctgccactacctcaagcactggggttaaagttttgagtgttcaaccatgccagccttttaaaagacttttctggttatttttggcactttgaggctaggtcccaggtaactcagcctctcattcaccttgtatgctagtatgtgatatgctggctttcaggagaaatgtcgagaaactaactgtgatgactaagggacagttaggagttgtttttaacatttgttatatgtgttttctgtgtatgtgtgcatgcatgggagacagaacacagttcctgggagtcagtcctcttctatcgtgtggattctgaggatcagactcgggttgtcagactagagatgagagcaggagctcttcccactgggccatcctgccagcttctgcttttaggatagagtgttcccttcactctgccctcctttgtgttgtgttttttatgtattccttgttgagcagttagcttttgtataaataattttttctttagacttgaatatctaggtggggaggaccaatttgaattaaggaaaattaacaaaaagaagatacctgggccgggcatggtggcgcacgcttttaatcccagcactcgggaggcaggggcaggcggatttctgagttcgaggacagccagggctacacagagaaaccctgtctcgaaaaaccaaaaaaaaacaaaaaaacaaaaaaacaaaaacaaaagaggatacacctgactacaccaattgattttgatactcagggacaactgtgaccagccagggtcactaatttgaaccaactgcttgttattagccagcccaattttttttttaataaagataacttggtctttgtctctcaagagacagtaagttgggaccggagagatggcttaatgaataagaatgcatacttaccgaagccccagttcagttcacagcagttgtgttggacagctcacaaactacctggaactgtagctccaggggagtccagacccttttctggcctcccctcagttacctgcacacactggtacactcacaactggaaattggactcaggacctctggaagagcagccagtgctcttacccgctgagccatctctccagcctcaccctgtacttttttaatgagaatatgttcaatgctgatcacaggattctccaagaagccccatccctgattggacgtctgaaaatgagagaagcgaaggttaaacccaccactaccggggagggggtggtcccctcagacagcacagctaggacctcggctttctacgttcacccttcaaaacccattggagtgtttggttctgttgttggtttgttgagacagggtttctctgtgtagccttgactgtcctgaaacgccctctgtagcccaggctggcatagaactcatagagatctgcctgccttcctttccctctgtgggattaaaggtgtgcagcgtgcaccaccactgccgggcacaaaatccaattctttaagatacaaacttgggagaaggctgtgtctttggttaaaggatgcttgtataagactgggcgggtgtgtcaacacaagaggctattgaggttacaagcataagcttagtttcgcgagagattagttagcagcaatacttaaattacctgcccgtgtaagacgctggaggccagaagctcccatcacccacccacccctagagatggcgtgatgcccacaggcagtggggccctggctcataccggagagggacagtgaaggccctgactgacagctggctatgggactgtttctcctgcagtgagttccatgggaaacggcaccagtcgactctacagtgctctcgccaagaccgtcaacagcagtgcagctgctcagcacccggagtacttggtgtcaactgaccccgaacatctggagcccatcgatcctaaggaacttctggaggaatgcagggctgttctgcacactcggccaccccgctaccagcgggattttgtggacctgaggacagattgctccagcagccactctcccattcgcgtcatgcagtggaacatcctcgcccaaggtaggcctggtgctgtgcctgcgcagcaaaggctgccgaggcttcctgtctgctgctgtgcgttcccagtccctcctgtgtgcacttatgggagctttctgttcagcacctcagcaggacaaccttaggcattctgttgcctacagcctgagtctgtgacagcatgtacaggtcacaaactgaatgagtggtggggacagcagttgagacgagctgtagatggccgtggtgaccatgtgccttgatgactgcctagagtctgaggccagtttgagctgtgatgtgaggccttgtctcaaaacaaaaccagagaggggtactgcttggccagttcctagctcttcctgacatttttatttgtggcagatgagtggaggtggcatctgcctttagtcccaacactcgggaggcagaggaggagaaataagagttctagatcagccggggctatacagagaaaccttgtcttgggggaggggataattaaaaaaaaattgtggcattaaagggcccctcttattatacctgctgatttataaactaggcttatcagccatttatatgtggtagtgccttttatcttgtagttgaattgtgagcaaaggcatctttgcaggtgaagggatggttcggtggttgagagcaggactaacctcccacagcaaacagcttcaggggatgcccggcctctggcctctgtagacacctgcactcagtgcttactcctgtgccccgtagttagacatagacagagggtttttccctttgggtttttttttgtttttgtttttcattctgagacagggtttctctgtgtagttctagctgtcctggaactagctctggaccagactggactcgaactcaggaatcccatagactctgcctccgagtgctagagttaaaggtgtgtgtcgccaccaccacccgactcaccaatctttctttttaaaaagacttttctttattctttggcaatttcatatacaaataccatgtatgttaacctagatccacccccgtccaccctgagcggccgcgctttgattctatcccctggggaatgatcctgttcattcgtaaggagagaaagctactcatttgtcccattcattgagtcctatgtttatatccattcacctggctttcttatagtcggggttacaactagtgtttatttacattgacaagtttttatatccccaggactgtgaagaacggtttttctaaacctaaaagcaaaagtcttatatcctagaatacagctatatgaaatttttttttgtatataaaaaccctgctgcttgcttcagcagatagtgtgaggttatttcatctgggtgttagcacagcttagacagacctgccccagcatccgaggcaaatgtcagacatccaagcttctacccactagagttttttttctttcttttctttcctgttttaacttttcctttgtagtcaggggctcagtctgtagccttagccgaagtcggggagacccacccgtctcagccgtcgcagtacggaagttaagggtgtgcaccaccaccccaggcttccccattgtcttcgaggtcgtggtgtgtagaagctgacaggtgtttggctttccttttcagctctcggagaaggcaaagacaactttgtgcagtgccccgtggaagcgctcaaatgggaagagaggaagtgcctgatcctggaggagatcctggcttaccagccagacatactgtgcctccaggaagtggaccactactttgacaccttccagccactcctcagtagactgggctaccaaggcacgtttttccccaagccctggtcaccatgtctagatgtggaacacaacaacggtccagatggctgtgccttattttttctccaaaaccgattcaagcttatcagcagcaccaatattaggctgacagccatgaccctaaaaaccaatcaggtggccatcgcacagaccctggagtgcaaggagtctgggcgacagttctgcattgctgtcacccacttaaaagcccgcactggctgggagcggttccggtcagctcagggctgtgacctcctccagaacctgcagaacatcacccagggagcaaagatccccctgatcgtctgcggggacttcaacgcagagccaaccgaagaggtctacaaacactttgcgtcctccagcctcaacctcaacagcgcctacaagctgctgagtcccgatggacagtcggagcctccctacacaacctggaagatccggacctcaggcgagtgtcgccacacgctggactatatctggtactccagacatgctctgagtgtcacgtccgccctggatctactcactgaagaacagattgggcccaaccggctcccatccttccattacccctcggaccacctgtccctggtgtgtgacttcagctttaacgaggagccccatgagctcttttaatcacaagcgtcttaaccagggatgttttgggaaactgaactaggataggaagttgcctggaaaaggacacccagtttctgccactactctccatcatttccagcatgcccttgaaaaaacattgttcacaaacctttccagctaaaacccgcattgaaaaggtgtttgcactccagtttgagcttgttgttcatctgtgtaccatcctctaccatttaggggcattagtagcataggctttcttgttttttagttgagggtattataaaaacccagtttgtaagcccttcagaattaaagtaagatgtaggaagttttctagacatcatttcaagttatttatttgtgggatttttaaatgtcagtgggaaaaaaaatgcatggtaatatttatttttttatatcttaatgtaaaataaagtggattatctagcattgtggacattttagaaccatgcaggtacagtcttaattccttaaaaattaaaatgtctctatttgctgatcgaacaggatgtacactaaggaactatttagccctgggggattggtgactttgtgtgtacattcttcacaaataattcctgtttgctatgcctttgacttctctgttgtgttttaaagaaattccgtagcattcagttctttagtttccactgtttagtcactgctaggcacttgtgccttttctgttgtgatgacgttggtagacgtgtgaagattactccaatcacttctcctgggatgtgctttttataagtagctttaggaacagctctggaacagttgctaagaatattagtgagaaaccttgccaagacgacagacatgagcccaacattcagctgagacaagaaagctcacgtcttggaggccagcttgggctatatgtcaagaccctttcttgaaaaagccagatgactggattcaagttttctagaaaaatataagagtcaaaaagataacctggagttctctttcaattgttgaagcctcttccaaacaaaatatccttccagtggtaaaatggtaaatatcttaatgtatgagttctaaatattacttaaggttaataaatggacttacaaagagtgcttttaatatcttgtctctttggtctaaaaggaatctgggagtttgtttggatcttgtaatactatatggtgttacacactatccattagtacactaaattttcatcttgacagttaacagaagtaactacacattctagcttctgggtgtcttggtcccaaggatggagccctccctccaaaatggcttacccctgcattccacccccaggtcaaggtcaagctagtctccccaatgtactagagcacttgagatgtttgtgggcctgatgcactcactcgctcaccaggggccaacagtactttaccacaaggcctgactcagttatggggggacacaatcaagttacagcatcagaggacttggagtaactgaatagttcaaggccatgtggagcggagatagctcagtggtcagcaccaggaaaaacaactactagcaggacatggtagtgtcctgggagtgtagaggcagggtggtccggagttcatggccattctcaaccacaaagcaagttcaaggccagcctaggatatttgaaagccaaaataagaaagagatggctgttcaacagagatttgcagtcagtggctcagccattagtaatgtctttgtttcttgccccttatcatctttggcatgttggctttatcctccttgtttaaccttttttttttttaaatgatacactttgtagcccaggctggcctagtgctatgtagcccaagatgacctcaaatttgcagcagtgctcctgcctcagtgtcccagggctaggatggcagtgtgagcctccacgcccagctctgcccagcctgattctccaagcccagacttggtgcttttctagctccccttcccaacatgccagtccccagcctcagagtagacattccccacccaagtaaggtttccaatgcctactatgggattatttgtttgttctgatgcttaactcccacccagtaagaaaagtaaagatgaggtgggagtggagatgccatggatatgtctcaatgataaaaaggtcttgacactagcaaagagacaagtgggcaggatgctattgaatttaaagaaatcacaatggtgtcatgaaatccacttttatttattttggctttttggcgcactagcttcctggaatcacagcactctagagtctgaggcagaaagacgatgtgttttctgacaacctgggctacacagccagaggagtggaggcaggcacgcacaagaacataccatcaacaggacttgggagaatggccagatgtgcatgatgtgtctgagataatcttacaggtccctggcagaagtaacgcactgtactacagggaatgagtttaatgcagcacttgggaagaggtgtgatgtggcaattagataaagtgagccagtaagagtcaaaatctagtctggtctgaggtttggtaaggaaaaagcatgggcacctatctgaagaacagccttcacgacggaatccctttaataaaacattcagtagagcctgcttgtgcacgcgcactaactcctcccatcccttctacactggtaagccctacagagaaaaccttggttggaagtcaagccagaccggaggagagccatttaggctgagaataagccagaggcatgtcatgggaagccaagttaactttgggaagcaaaactaaggcacaagatttgatggggaggcgagggtgaaggtaagtgggtggagacacggctcatgggttagggctgctcctgcagaggtctcgggtttgtttggttcccagcgcctacatggcagctccaagtttaactccagtttcaggagcgccaactctcctggcctccatgagcacctcgtacacaacatctgcaggcacatcaaagtaaattaggtgtaaaaatgtcgtgtggaatgtttgagaagactaggtaaaggtgcttgtgactgagtctcatgacaggagaagaactgacttctgaaccttgaccttcatgcatgtacacgctctaactttgaaaacattttcagaattgtgtttgtaagctaggccactggtgaccttcaatgagcactgcaggttggcttcccattgaggaaaaaagtggcctggtagaaaatactgaatgactgttaactactgggccagggaaagagacactctgatgggtaggaggcacctctttccgagacacaaggatggttgctgaagtgagatcctctgtagcaaagggtccagcctggggtctctgaagctgtacacggccatctggagagaatgctgaaaagtcacctaaggagtaaacacagaccgttcatcacagtgcaaaggcctggagaggctggaaatgcatcaagccatggttttgtggcttttctccaaaaatgctggacacaagatggaaacattatattgacttatcattcagggggttgaagtccgaaagctggagttacatttgcaaatctagattttatatgtttacctgaaaactttttctgttgcttttagaagagagttctaatcagctgaatgcagaagaaagtatctgcttaaaagttagcacctttagctgttaaccaaagtctgtgtatgttctgcgtggctcaggacgcagagagagcatggacctttgcaaaggagttttagggacttgaccaaaagacaatcctcaatacttgacaatactcaattttgagagatgaagtatttaagaggtaaattttgagggtaactccaaaagtagtaatcaaatcaacctagttttttaaagtatcgttacctaagcttgtggaatgagacctggagagacggtttagcagtggagtggtgaccgcactttcagaagagcaggttcaaaacgccaagcacagctcccaaccatctagtgacctgacctctctccagcctcctcaggcaccagtacacaagtgtacacagccacgcagacaaaacacccatacacagaatttttaaaatcaggttagtttttttaaaaaaggctagaaaaggtaaaaatctttgctgctataaatagcatgttaaagatacaaaggccaaaaatattcagtggttcatctacatttctaaaaagatagacgtctaccatgtacaggaggacctaactataactgtgtgacacttaaatttgtgactctggtccttcagtcttcacctgtacagtcacctgtacaggccaggccacagctctctacccataaaaggtgtgacgggaaacaaactgaacggaagcaactcagtacctgggaggtgctaggccagacccaggggccaggccagacccaggggcctgcacatgccaggcacgccgctaccactagtgctgaaagtgtttcacatgtataggtccattatgattggccaatttcctgacctgtatttcttatgtggttatagttataaaggaagtgggaatgtgcagagagttgtcaaatatttctataatgggacaaagacgaaaccggagtagcatttcttcaggcagtcattaagaaaacaccagacttctgtggcctgactgaaacgacagcctgggctggcttgtgagcattgtgaaaaatatcaccagagaccaaaaccacaagataaatttcacttctatatttcagaaaacctacttgaatacactttgaaacaagagtacaacaaaatagaatatacttcaaatgttgaatatacaaactattatagttcaaatctgaacactggtacttcccctcttaaatgtcaactaaaaaagaaaaagagaaaattagggagaaaaggaaaaagggtgagaaaggaaacaaacaccaggcactggagctacctggcaagttcatgcgggcctgaatgtcgaatgacagaagaactgataccgatgtgtctgcagacagcagggcgactcgagtgacgcaggtatggtacagtaaagggccggagccaactgttaatgtcttcacaattaagaaaccgacagacttaaactaccatagaaaatgttacatggaaattctataacaatactgtgctaggtacaagatttttaaaatttttcttttaataaaaaagctttacacaaacaagccattagcttatttcaagaaaggaaaccgaaaattagtctaaggcctttgttttaaaacagcttaagctatgatatatatatatatattcaaaatcaaaaaataaaacaaaacaaacaaacaaaagcgcactagatcttgctctcctctgtgtgaagcttttggatccactcagttcacattctagatacctgtattagcagagtcttcacatagcaccagttaagtgagcactgcccaagcacagtgctaattgctggtatgcatataaaatgcatcaagaaatgctctttgtaacaatgacgtcacccatcccaacccccccactgaaaactatgtaacctcttacaggtgttagtgttccaactcttagtgtaacgtgatagtgtagtgagctgcttggtccctttcaggcttttcttattgagggttcagttgttcttacttaagaggcagttttctgtcagcatctcaatgtgtagttcacttcccactgaaacatgggataggtcatttacttccagtacgtctgattgctttcttctatgcacagttgtgtgagaaccctcctctggctttcttgatgacttccttgcaaatgtctgtcaggacaaccctgacagtctgcagtgcccgcccggaacgtgcttatttatttctcacacgtcactagcccttcggttttcatagtcacaggaagggcgatagcagacggcgcactgacgaccactacgtgggttactgtcttattgccgtctgcccccttctcttctaccagctgcaaagttttcacatcgtgttcctgctttttggcttctgatttcccctccggcccttttaggagcgcactgataactcgaggaggagtctggccagaagcctgctgagcaggcacagacagtctcattacaggtgtaccgtgggctattgaaacaggggtgagtgccctcacagccagtggggttccaacaatgttaatgcttcctgaccccgtcaggtttgactttgcctggagttgacactgtgcgagctgggtggcggggatggtgataatcttggcaggctgcatggtgattctgtctccattttcagtggaggccggcatcacggtcgggactgtctggatgactacttttggagagctggccgaggctggactggtgctggttattaacggcgagcctgtgcctgcattgactgactgaactgccaccgctgaaatcttttggcccagtgaggtcattaccacagggacttgcattgccacacgaactgtcctggtagattaaaaacaagctggttatatttaacactaaatgggaaaatgagtctcaagttaaatacaaatgcaaatgcctagaatcagcgttcccaacttttacagttgcggtgatggccctagggtctcctgcacactaagcgagggtttaccactgagctacgtcaccagctttttggggcaaggtcttgctagcttacccttaggttagaactcatactctgtagcacaggcaggccttgaacttatgattctccttcctcaacctccacagtacttaggactgtaggtgtgttccactaaatatagctaaaagtatacttaaagatccagcactttaaaagtgtccctatagtgctggccgatacagattcaacatttgttccaaggagcgctcaaacacaaaccctctgctacagctctcccgtctccctcaccttggagctgctgctgctgacacaggtgcagtggtagtaggagacctggaggaaccgtcgtgagtaggggaggtgatgttcacaactctagccacacccttctctgctctggagcagttcagaggagatgagtttttcccacctcggacggcagttgctgccttcaggagactttctgcagatagtgacactcgttctaaagacttgtcatcagcagctgctgccaagtcttcagggcaggtctcacttttgtcatcatcaatgaccactatgtttttgggcatgtccttgaactgatatacaagcctctgtccttcaacctttgcaagaattcccctttggtagtaatatctgcaagggaaaaatgactaaattaatcaaatgtactatcacatcttactcaataaaaccacacgtacatgtgacagaaacatttacttattcctgtttatgagggctccttccacttggcctacacctaagattacagatttggtgacaatgaagttggtatgtcataccacaggaccctgtgatggttaatattgactgttgatttgacaagatctagaagcacgtagggctgactagattcagttgaagtgggaagaaccaagctatctgtgagcagcactcttctcagaatctcagaccaaataaaaaggaagggcaagctaagtagcagcgttcaccgctgttgtcgggctgggaatgaggcgagtcctaccatgtgcccttccctaggttgcctctgtcacatcagtaagaagtagctaatatagctctgtgaccttgatgtgtccaaaacagttgtagcaccaacaagtgaacctagactccctattagggcagtgctttatctccagcaccccacggcccttctcttacagaccaggccagcttccagctgtagactgaccctcctccctccacctcccaagtgatgagatcacagtacattccaccatggacaccttgttctctcccttaagaaaagcttaacatagacagaatactttattggtaatagaagcaactctaatttgttacaaaaacaacctgactttatctggaacaacctgactttacctggaataatcatggaacatgtgaatactgactagtagctcatgcctgaaataccagcattgggaagctgggagaatagatgcaagctccaagccagcctgggctacatagcaagaactgtctcaaataaataaacactatcatgtgtacattggctattttttcattttcgagataaagtcatttacaccatttgcagggactaaaagtacattcactctggaaagtgtgttcttacagatctcattgtagctcaggctggcttcaaccttactctgtaaaagaggatgactttgaaatcatcctcctaacttcaattttcaactgactacaaggcacgggcactatacccagtctgggtttaactttttacaaggcctacaaggtaaacaatttctattctataacagttgtaaatgcagagtcacctcctataattaaggatttcccaatgttaaattatttggcatatagaccaaacttctctttccccatctatttccaagcttaaaatattcttctagattatttcaaagttttcagttatatcacgggatttgttttttagcttttctttaagcaaacactttaacaactagcagacgctctaaagagacaggtcggttctgcttaagaaccagcctgtgttcattctcaccttaacgctcgccccatggtttcatagttcatatctggtttgttcttatgcttcccccagagcttcgagacagcctttgagtccacaagtttgaatatgcccttttctctctgagtccatttaatatacctgggacaagtatttttatcttgaagcaaatctaaaagaaactcccacagataggttgtgtttcctttaaaaacaaagcaaaaacaatgacaggcattaacttgaaatccactaacatgattaaatgcaaataaaatatcctcatttacaactatatattcgctacttctttttgagacaagtctgactgtgcagcctttccaggtctgaaacttgctatgtagatcaggctggcctcaaattcaagcgatccctgcctcctgagagctggattaagtgtgagccacacccagttcttaagatgtaagccctagattctatgctgtcatgagtcctggacccaggtttcaggatcggtcatggcggtgacacggtgctggacaatgtagattctaggtatctacaaaacaggcactcctgctggctgtgttccatcctttagcctctcaatctgcactgaaagacaaaacctaacacagtagaaatgtaatatgacccagggcagaagaggaaatcaaggtctgaaaccagttccaatccaaattcataagaaaagaacaatgaaattggagtttgtccttttttcctttcagatataactaataaccaaaattcactgtggaatcattacacagttttcagtagatttacacaataaacattaaaaataggacaaatttaaacatatcaataaaaagtttaagattatcagtttgaaaacatttacctattaaatagtgataatttgtttatgggatcatcagacacatatgcctaatattactggaaatcatcaaacacaacaaattagaaagcataggggctggaaagatggttgagtgattaaaaacattgactgcttttagcagaggacctgggtttaattcttagcactcataactgcttgtaattccaatgtcagatctttaaaagaaaagaaagaaaacaaacaaacacaccaaaaaattttaaaaatcagccaggtggtggttgcctttgattccagcactcaggaggcagaggcagatggaactctgaattcgagaccagtctggtctacagagtgagttccaggacagccagggctacacagagaaaccctgtcttgagaatcagaaaatatgtagtagaaggccagagtagcttaaataacagcgcctgttgccaagactgaccctgaatgcaatcctaacagttcagagatactggctctcagagactgacttccactcccacacagacggatgagtgtagcctcttctgtgtgaggatgagtgtcacataaacctgtcctctaacacatggtcccaaaacaatggtttgcactgtcctgtggatattaccaaatacaatggctatcccatctctttgaggcatagctattttgctaaaagctccccataatgttggtccacccctaattgagaaatactaagaaatggtattcccatatgtacatatactagaaattatcctgcaaaaatgtcacctaaaatttttttaaaaacttactctcatctctagccctccttctctctcgcccttcccccctctctccacatggccatggcaggcctctctccctctttctgccttctctctttcccccgcctttctataatagagctctaaagccattaaaaaatttaaaaaaataaaaggggtattttatttccaaaatgaccatccacaaattaccttttccttctctggctttcttcttgattcctaactcaggagacccattggaaactggtgactgctgggtctttggtttacggccaactgaaaatataagataaagaaatcatgaactgaaaacagaaataagcagactctctaaaaagacattcctcactaaactagatactaatgtgcagactgaaatcctcagtgccaaggaggtgtggtggcacagaaccacggaaagctaggaagcagactgaaatcagcatgggccacagagtgagtttaagggacagcctcctcagcatggtgggaggtgtggtgtggctcagtggagggcgcctgcccagcatgcatggagcgcattccctcactcaggactcagaatagatgaaagatgcttgcaaaaggagctgtaaacacttctgtaattttaaataaaacatttagtagaaatgacaactgtacaaagcaagtcaggaacttccagcttttctttatggtcaaggacagcatcaatactaaattttggactgatgtcctgaagctcacaatatagaccaggctggccttgcactcagaaatccccctgcctctgcctcccaagaactgggaataaaggtgtgagccaccatccgatgctgctagaagaacttc

SEQ ID NO: 785 - DNA, 2928 bp, Mus musculus
  misc_feature (1)...(2928): n = A,T,C or G
aacgccctgcagtccgtttccgcctctcgtgcctgaggggcggatgcttgtcgcagccgccacacaagtagccagcacttcccggtgcctaatctccttcagcaccgcggagcgtggagcccacagctcggggaggacgttctcccagacacgcgctcgcacacactcagcgctggcaccaacccgggattcccagcctgtggacgctcccattgcagccggcgggaggggacagannnnnnnnnnnnnnnnnnnnctggtcgtgcgcgcggatccccccctctgcagccaccgcgtggtagcgcccgctccgccgccgctcgccggttgctccccggcgctagctccctcgcctcagtgagccgccgctgctgccgccgccgcgtctgcctcccggcacagctcgcccggtcggcgccgagggacgaggaggaaggaacaccccgcagcgcagcggtcccgcgccacccccaccccaccgtcgcccgcccagctcggcccggctcgtcagcgcggcggcgcccggcatgtatcagagcccgcggcggctctgctcggccctgctgctcagggacgcccccggcctgcgccgcacactcgtgcccggcccgcgccgaacgctcgccccgccggtgctcggatctcggcccaagtccccgcaactgcaggcggcggcggcctcgggcgccgcgaggtcgcgtccccgaacagtgagttccatgggaaacggcaccagtcgactctacagtgctctcgccaagaccgtcaacagcagtgcagctgctcagcacccggagtacttggtgtcaactgaccccgaacatctggagcccatcgatcctaaggaacttctggaggaatgcagggctgttctgcacactcggccaccccgctaccagcgggattttgtggacctgaggacagattgctccagcagccactctcccattcgcgtcatgcagtggaacatcctcgcccaagctctcggagaaggcaaagacaactttgtgcagtgccccgtggaagcgctcaaatgggaagagaggaagtgcctgatcctggaggagatcctggcttaccagccagacatactgtgcctccaggaagtggaccactactttgacaccttccagccactcctcagtagactgggctaccaaggcacgtttttccccaagccctggtcaccatgtctagatgtggaacacaacaacggtccagatggctgtgccttattttttctccaaaaccgattcaagcttatcagcagcaccaatattaggctgacagccatgaccctaaaaaccaatcaggtggccatcgcacagaccctggagtgcaaggagtctgggcgacagttctgcattgctgtcacccacttaaaagcccgcactggctgggagcggttccggtcagctcagggctgtgacctcctccagaacctgcagaacatcacccagggagcaaagatccccctgatcgtctgcggggacttcaacgcagagccaaccgaagaggtctacaaacactttgcgtcctccagcctcaacctcaacagcgcctacaagctgctgagtcccgatggacagtcggagcctccctacacaacctggaagatccggacctcaggcgagtgtcgccacacgctggactatatctggtactccagacatgctctgagtgtcacgtccgccctggatctactcactgaagaacagattgggcccaaccggctcccatccttccattacccctcggaccacctgtccctggtgtgtgacttcagctttaacgaggagccccatgagctcttttaatcacaagcgtcttaaccagggatgttttgggaaactgaactaggataggaagttgcctggaaaaggacacccagtttctgccactactctccatcatttccagcatgcccttgaaaaaacattgttcacaaacctttccagctaaaacccgcattgaaaaggtgtttgcactccagtttgagcttgttgttcatctgtgtaccatcctctaccatttaggggcattagtagcataggctttcttgttttttagttgagggtattataaaaacccagtttgtaagcccttcagaattaaagtaagatgtaggaagttttctagacatcatttcaagttatttatttgtgggatttttaaatgtcagtgggaaaaaaaatgcatggtaatatttatttttttatatcttaatgtaaaataaagtggattatctagcattgtggacattttagaaccatgcaggtacagtcttaattccttaaaaattaaaatgtctctatttgctgatcgaacaggatgtacactaaggaactatttagccctgggggattggtgactttgtgtgtacattcttcacaaataattcctgtttgctatgcctttgacttctctgttgtgttttaaagaaattccgtagcattcagttctttagtttccactgtttagtcactgctaggcacttgtgccttttctgttgtgatgacgttggtagacgtgtgaagattactccaatcacttctcctgggatgtgctttttataagtagctttaggaacagctctggaacagttgctaagaatattagtgagaaaccttgccaagacgacagacatgagcccaacattcagctgagacaagaaagctcacgtcttggaggccagcttgggctatatgtcaagaccctttcttgaaaaagccagatgactggattcaagttttctagaaaaatataagagtcaaaaagataacctggagttctctttcaattgttgaagcctcttccaaacaaaatatccttccagtggtaaaatggtaaatatcttaatgtatgagttctaaatattacttaaggttaataaatggacttacaaagagtgcttttaatatcttgtct

SEQ ID NO: 786 - protein, 480 aa, Mus musculus
LPRLSEPPLLPPPRLPPGTARPVGAEGRGGRNTPQRSGPAPPPPHRRPPSSARLVSAAAPGMYQSPRRLCSALLLRDAPGLRRTLVPGPRRTLAPPVLGSRPKSPQLQAAAASGAARSRPRTVSSMGNGTSRKAKTVNSSAAAQHPEYLVSTDPEHLEPIDPKELLEECRAVLHWPRYQRDFVDLRTDCSSSHSPIRVMQWNILAQALGEGKDNFVQCPVEALKWEERKCLIEILAYQPDILCLQEVDHYFDTFQPLLSRLGYQGTFFPKPWSPCLDVEHNNGPDGCALFFLQNRFKLISSTNIRLTAMTLKTNQVAIAQTLECKESGRQFCIAVTHLKARTGWERFRSAQGCDLLQNLQNITQGAKIPLIVCGDFNAEPTEEVYKHFASSSLNLNSAYKLLSPDGQSEPPYTTWKIRTSGECRHTLDYIWYSRHALSVTSALDLLTEEQIGPNRLPSFHYPSDHLSLVCDFSFNEEFLF
